United States Patent Application Publication US 2026/0092266 A1 - sequence listing, part 22

SEQ ID NO: 3612 - DNA, 23246 bp, synthetic construct
  source 1..23246: mol_type = other DNA
  misc_feature 1..23246: note = Synthetic
tgtcaccggccttaccgaggacgcccagtgcagccccccgatccaggggtaaaagccgttgcggcgatgacgcggcttatttaccgcaaaaaatgcggtgatcttgcctttgcggtgaataaggctatattcaccgcaaatagagcggtgaatatgacctacatacaccagactgaaaagtggcctcgcctaagctgggacgaggcggcgctggcctcgaggctggcagaagtacgccatcggcaaggccgtcttcttggccgtatggaagcgcttggcttcgacctcaagcaagaggcaagcctcagaaccctcactgccgacgtcgtcaaatcctctgcgattgaaggcgaggttctcgaacccgaggaggtgcgatcatccatcgcccgccgcctcggattggaggtcggcggcttgcctccggcgagccgggacgtggaaggcattgtcgaagtgatgctggacgcgacacaacgctacgacgctccactcaccgctgagcgcttgttcggatggcacgcagcgctgtttccgaccggccgcagcggcttgagccgaattactgtcggtgcttggcgaacggaagccgccggcccaatgcaggtcgtctccggcccattcggaaaggagaaggttcatttcgaagcaccggaggcctcaaggctgccccacgagatgaacacttttctcgactggtttgagcaggagacgaaaatcgaccccgtcatcaaagccggtgtcgctcatttctggttcatcaccatccatcccttcgaggatggcaacggccgaattgcacgcgccattgcagacatgacacttgctcgcgccgaccaggttcgcgaacgcttctacagcatgtcaactcagatcgaagccgaacgaaaggcttactacgatcaactcgaacgccagcaaagaggcgatacggatatcaccccgtggctcgactggtttctcgattgtctcggacgcgcgatcgaacaggccgacgagatgcttgcggccgtcctctacaaagcgcgtgtatgggagcaggcgaatctgaagtcggtgaacgaccggcagcgccttgtcctcaaccggatgctcgacgaatttcgaggacatatgaacacttcgaaatacgcaaagctcgcaaagtgctcaacggacacagccttgcgcgatatccgtgacctgctggatcgcgggttgcttgtccagaatgaaggagggggacgcagcaccagctatcgactgccaaaagaagacgagctgaaggctctgacagagtaatagattgggaagagaagattcgaacctcccccatgccgtaggtcctcgatacatcaattattctgacaccgcccaccagttgtgggagctattgtacgagcatttgtatgtgcatctcggatggcgtcagaaaccctgggacaagcgctcagcggagcctaggagagattgccgctgagtttgggagctcggccacgcttcgcgcggcagcaaaccttatggcgcacaatccatcacgaatatgcaaggtcgctaggccgtacacgactgctctaagtccccgcacaacgctgtatgatattcaacatctcgcttcggctaactgcgttcgtgagccgcgcgtcctgtaacgcgatttgagtgcggcccttgaagggcattaacgtgatcagataatagtggcggatgcgccctgcttgcagagccgtcacggcaatttcaactcgattggcctgcgggaatgtagtgactgtgttccgcatctccagtgcctcttgcttttggaagcagacgagcacctcgtctaaatgcctttcggagatgacggtctccttcggcgcgcttctgatctcgtcgctggaaatgccaacacaagcgtctagcggcataaacagaatcgcggcagtaacagcacgaatacaattgagcgtcatgctctcctcattcaaaaaatctcggctgttgactaccagcgacggggcgctcccaagagagtaacgttctcgtcgatgacggcaacaccttcagaaagctctgggacgatgctgtcgtgaacctggaagaggcaacaggtcagctgcggcaggtgcaaacatacggcgtcacggcctcgcgctttctcccctacgcctcaatgcttccggcgttcgcctccatccggtcccatatcaagaagcttcccgccgaacggcgtctcggagcgcagctcaagatgcggaagtggtattgggcgagcgtgttcaccagccgctactccggatcggtcgaatctaccagcacgcgtgattttctggatctccgaacctggtttgatgacgacgatgccattcctggcgcggttgcggaatttgagcgccggttcaaggacatcgacttcgcctccgaagtaaagagcgggtcttcgatctataatggcgtcttcaatctgctctcgatcaagggagcgaaggactggataagcggagagattccaccggcggagaaactggatgaccatcacatcgttcccgcttcctggggtcgcaaacaactcggcggaaaccgcataaatacgatactgaacagaaccccgcttgtgtcggagaccaacagacacgtcatcagcgaccgtctgcctaacgagtacctgcctgaactgatggccaacaatggccgcgaccaggttctggccatcatggaatcacatctgatttcgggtagagccgtggatatcctgatgcgggaagacttcggaccggacgactttgaggagttcatcgccgagcggcgtcatacgatcttgtctgcgatagaagatctcctgatcaaggaacgacttgatcttccgccaaatctgcgggcactcgacgcgcggatcgaaggcaccgaactttccctgcgaaagcgtgtcgaagacactcttcagggcgacgcatcggctatcccgcagcacatatccgacaaggtcgaggagcgtatccagaaggcgacacgacggcaggcctcgtccggcgacgaagacttctcgctcctgagcaagaaacttgaatatttcgacctgagagagcttcaggacctcatacaaaacaagacgctctggccgagcttcgccggtgccttcggttccaaggaggctctggctacaaaatttggccagctcgccgagctccgcaatggtatccgccacagccgtagcgtcagccagatcgccttgaaagaaggcgaagctgccgcactgtggttcgagggctgcctgaagagcaggtcaacggaaactgcctgaccactccgcgcaggaaaaggcgggccgccgggataaatagctgtcttttcaggacaaaagcggctctttaggatgccggcgttcagtaattcagaggagagatagcgcgtgctgacgggtgagctcaggagcaagatcgacaatgtctggaacgccttctggagtggcggcatcgccaatccgatcgaggtaatcgagcagatcacctatctcctgttcatacgcgggctcgacgatgtgcagacccttgcggaggccagagccaaccagttcggcaagccgctggaacggacgatcttcccgaagggcaaggacccgcgcgggcggccataccgggacctgcgctggtccatcttcaaggaccgtaatccgcccgagatgtatgagatcgtcgcggagcatgtattcccctttctgcgagagatggcggaagacggcacggctcacgccgaacacatgaaatcggctcgcttcaccatccctaccccggcgctactcgggcgggtcgtggacctgttgagcgacatcccgatgaatgaccgcgacacgaagggcgacctttacgaatacatgctggcgaagatcgcctccgccggacagaacggccagttccgcactccgcgacacatcatccgcctgatggtggagctgatggcgccaacgccgaaggacatcatctgcgacccggcggtcggcacggcaggtttcctggtcgccgctggcgagtatctgcgggatcatcatcctggcctcttccgcgacaagaagagccgcgatcatttccacaatggcatgttccacggcttcgacttcgacagcaccatgctgcgcatcggctccatgaacatgcagcttcacgggatcgaggccgccgacattcgctacaaggactcgctgtccgaagagcatggcggcgatgccgatgcctatagcctcattctcgccaacccgcctttcgccggctcgctggattatgaaagcacggcgaaggacctgcagaagatcgtcaagacgaagaagaccgagcttctctttctcgctcttttcctgcgtctgcttaagccgggcggccgcgccgccgtcatcgtgccggatggcgtgctcttcggctcatcaaaggcgcataaggaactgcgcaagctcctggtggaggaccacaagctcgatgccgtcatcaagctcccctccggtgtcttcaagccttatgcgggcgtctccacggccattctctgcttcaccaagacgaattccggcggcacggatcatgtctggttctatgaagtgaaagcggatggactcagcctagacgacaaacggcagaagctgcttgaggatgggaaactcggaccggtgccggaaacgccgctgagcgcagaggagcatgaaaagaacaatctgccggatgtgctcactcgctgggcagaacgcaatgacgcagagctgaagcggccgcccaccgcgcagagcttctgcgtgctgaaggcggaaatcgccgcagcggattacgacctctcgctcaaccgctacaaggaggtcgagcatgaggcggaggaccaccgtccgccaaagaaaatcatctcggaactgaagaagctggaagccgatatcaccaagggcctggaagagctggaggcgatgctttgagctggcagacagtgaggctcggagacatctgcgagatagtttccggagctacaccgaaaacgtctaggaaagaatattgggacggcgatatcctgtgggctacgcctgcggatctttcaaagctcgacaacgcatacatttcggtcacaccgcgccgaataacggacgcgggattgaagagttgcgccgcaagtgtcctcccggaacactccgtgttgttgagctctcgcgctcccatcggacatgttgcaatcaacaccgttcccatggcgaccaatcaaggtttcaaaagccttgttccgaacaagaagattgccgacgccaagtttctctaccattggctagtagcgaaccgctctcgaatccagagcttgggaaatggcgcgaccttcaaggaaatttccaagagcatagtctctagcatcgagattttccttcccccgctcgaagagcagcggcggattgcggcgatactcgacaaggccgacgcgctccgtcagaagcgcaaacaggccatcgcgcttctcgacagtctgacccaatccatctttttagagatgttcggcgaccctttttctgacaagcagaggaacgatcagaagagggtggatttcgctgaagtaacaacgcgaattacatacggcttcacacagccgatgtcacaccttgaatcaggcatcccaattatcacggccaaaaatgtccgaaacggacacatcgactatggcaacgtccactatactagccggtctgaattcgaccgccttacggcgaaatccaaaccggaacaaggagacctactcatcaccaaagacggagctatcggcaggagtgcgcttgttgaaggcgatgcgaaattttgcatcaatcaatctgtgtgcctcgtaaaaccccgacacgacttaattgccgggcaatacctccttcactacctgttatctgggaccgtgcaatctagaattgaagctatgaagaagggaaatgctatacctcatcttcaaatcactgagttagcaaagtttccgatattcatccccaacaaaagacttcaaactaaattcgcggataaggtcgaaaggattgggcgcgtcagggctgcggggcaggtaacgattgccaaagctactgatctcttctcctctctccagcaccgcgcattctccggtcagctctaggagcgctgaatgtccaacttcgcctttctcgcggatgaatttgccgaagttcatgcttccgcgctgagggcggagacgctggcgaatggcgacccgcgggcaagcgcattctactcacggcggacgctggaaatcgtcgttaaatgggccttcaagcacgattcgtctttgcgctttccctatcaggacaatctctcggcactgatccacgaaccgagcttccgggaggcagcaggtgaagccatcttcgccaaggcgcggctgatcgtcaagattggtaatcgcgccgtgcacgaagagcgtgacacgccgcagcgggatgcgctgcaggctgtccgcgacctctttcacgtctgctactggctctcacgcacctatgcgcgtaaggcgcctcccgacggcagcctgaccttcgacgagaagcacctctcccgcaaagacgacattatccgccagagctatcttcgcctgcagcaaatgcagcaagagatggaggcgaaggacgagaatctgacacgtcttctccgcgacaagagccagctcgacgaggaactggcctctcttcgccgcgaggtcgccgaggcgcggcggcagaacgaggcgcgcggacgggacgaccacgattactccgaggccgagacacgcgactatttcattgacgtgctgctgcgcgaggctggctggacgctggacgggccgaaggatctcgaattcgaggtcgacggcatgccgaacaatgccggcaagggctatgtggactatgtgctctggggcgatgatggcaagccgctggggctcgtcgaggcgaagcgcacgaggcgcgacagccgcgcaggccagcagcaggcaaagctctatgccgactgcctggagcggatgaccgggcagcggcctgtcatcttctgcaccaatggctatgagcactggatatgggatgaccgcatgtatccgccgcgcgcggtgcagggttttctcaagaaggacgagctgcagcttctgatccagcgccgcaccgaccggcggccgcttgtcggcgcacctgtcaacaaggacattgccggccgctactaccagacccgcgccatcaccagcattgccaggagtttcgaggccgagaaccagcgcaaggctctgctcgtcatggcgacaggctccggcaagacgcggaccgtgatcgcgctggtggacctgttgatgcgctgcaactgggtgaagcgggtgctctttctcgccgaccgcgtggcgctcgtcaatcaggctgtgggcgccttcaaggcgcatttgccagatgctgcgccggtgaaccttgtgaccgagcggacagcgcaaggccgcgtctttgtttcgacctatcccaccatgatgggcctgatcgaccagaaacgcgacgaaggacggctcttcggtccggggcatttcgacctcgtcatcatcgacgaggcgcaccgctccgtctatgagcgctacggcgcgatcttcgactatttcgacagtctgctggtggggctcactgccacgccaaaggacgaggtctcacgcaacacctacgagctcttcgacctcgaacaaggcgtgccgacagacgcctacccgctcgacaaggccgtggccgacgaatacctggtgccgccgatagccaagtccgttccgctcaaatttccgcgcgagggcatcaagtatgacgacctgagcgacgaggaaaaagaccagtgggacatgctggaatgggatgaggaagcccccccggagtcggtcgaccccgccgcaatcaaccaatggctcttcaacaccgatacggtagacaaggttctcgcgcatgtgatgacaaacggcctcaaggtcgcgggcggcgaccggctcggaaagacgatcctcttcgcgaagaaccagcgtcatgcggaattcatcgagcagcgcttcaacgtcaattacccgcatctcgcggggcacttcgcgcgcatcatcacccacaagaccgagtacgcgcagagcttgatcgacgatttttcgacgaaggacaaggccccgcatatcgccatcaccgtcgacatgctggataccggcatcgacgttccggaggtggttaacctcgtcctgttcaagctggtgcgctcaaaaaccaaattctggcagatgctcgggcgaggtacgcggctttgtgaagacctcttcggtcccggtttggacaaggagtgcttttacgtcttcgacttctgtcagaatctcgagttcttcagcgaggatattccgagcaccgaggtctcagcaggccgctcgctcaatgaaaggctctttgctcttcgcttcgacctcgttcgcgcggtcgacgatcaagcagatatagacgtcgcgaccggcttcaacgaagagagcgaagactatgcgggcgaagacgagcctccagccttgcgggtggtgcgggacgaagccttgcaggtccttcgggactatgtgatggctatgaacctcgacaatttcgtcgttcgccagaaccgccgcgtcgtcgagaaatatcagaggccggaaagctggcagacgctcagcgatgtcaagcgggacgagctgctggaaaacgtggcgccgctcccctccggcgtgaaaggggacagcgaagacgcaaagcgcttcgacgttctgatgttcagccttgagctggctcttctcaagggtggcagagccttcatcaatctccaaaaaaagctggtggagatcgccgcggcgctggaagagcaggcagcaattcctgtggttgcagcgcagatggagcttattcaggagatccagtcagatgactggtgggagggcatcaccgttcccctcctcgatcttgccaggaaaaggcttcgcctgctcgttcagcatgtcgagaagagccagcgcgccatcgtctacaccaacttcgaagaccagcttggcgacggagtggacattgcgttgccgcaggttggcgaggtcgactacgcgcgcttcaggagaaaggctcgccacttcctgctcgaacatatggacaatatcgcgctccagaagctgcgccacggcaagccgctgaccccgaccgacatcgagcagctgcaagccatgcttgtctcggaaggtgtcgggaccgatgcggagcttgaaaaggccatcgagctgaacgaaggactgggccgcttcatccgttccctggtaggcctggacagatctgctgtgtcggaagccttcagcgcgttcgtcgccgagaccaccgccaccgccgctcagatcgagttcatcgacatgattgtcgagcacctgacggaaaaaggaacgatggatccaggtcttctctatgaaagtcccttcaccgacgtagctcccaccggaccggagaaggtgttcgacctgcagcgaacaaaccagctcatcaaggcgattgaacagttcaatgagagtgcggctggttaattggctttggtagacggtatcgttcgtgaacacagaaaaccttagcaatgtttagcgatcaaaactcgaagccttgcttcccccattgagttgcgcagtactgcggggcttcctcaagttcggtcaagctcttgaaatccgcaaaagtggaagtcctagaagaaaccacctctatagacccggatggctcgaattttccggctcctactaggctacccttatactctagggctgcgcctcgctgaggcgatctcgccatccgaactcttggcaagccaaagaccagcgtccgccaaagcaaaagggtgagccgcggctcaccctttgattttgtgccctaaaggcttgttaacggctgctagacccggaggtcctcgctgacggtccacgatttcctatcggctaaatattcaatcggctgactattaagtctagcaaacattgattcccataacaacatggttttgactggtgatcatggggggatgaacgcatgcgctacaggctaggactcgatctaggcaccaattccatcggctggtggatggtgaagctggacaaggcaggacgcgcatgcgggtctctcggcggcggtgtccgcatattcagcgacggtcgcaatccgaaagacggcacatctcttgccgtgcagcggcgcgtaccgcgcagcatgcggcgccggcgggaccgctatctcggtcgccgttccgaccttatgaaccacctgatcgccttcggactgatgcctagcgatgagagcgagcgaaaggcgctggaagcgctagacccctacgagcttcgtgccgcggctctcgaccaccccctcctgcctcacgagctggggagagcgcttttccacctcaatcaacggcgcggcttcaaatcgaaccgcaagacggacagcgacgacaaagaaaccggcgtcgttaaggaacggatcagcgaactgcgaacacgtatcgaaaagtccggagctcggacactcggtgaatttctgcacaaaagacggctaaagggacgcatcgttcgcgcacggcctgaagccggcttctaccccgaacgcgccatgtacgaggacgagttcgacctaatccgccagcaacagaactcgcaccactccctcactgctgaacaatgggacgcgctgaaagacatcattttcttccagcgtcccctgaagccggtagaccccggctggtgcctctttgaaacgggagaaaagcgagcacatcgcgctctgcctctcacccaggaattccgcatggtacaggaagcaaacaacctgcgcgtgacctcccctggcgaacctacgcgacggctgacgcttgaagagcgtgacaaggtccttggccatctgcggaaaaagaaagaattgaagctcgatgccatgctcaaactcctgaagctgtcgtccggctcgactgtcaatctgttcgacgatcacagaagcaccatcaagggtgaagagacggcggcgaggctagggcacaaggagatctttggagacgcatggttcaacctgtccactgaggagcgcacgggcattgtgcgcaccctcctcgacacagaaaaaccggaagagattgagcgaattgctcagcagcaatggggactctcggaggctgccgcaaagaaactcgcaggtaaatcgctgccggatggccattcccgcctcagcgaaaaggccatagcaaagctgctaccaatcatggaagaccaagggctcaactatgccgaggctgtggagcaggtacctgaatatggccaccattcagactttcggccggacgaggcgcgcgacaccctcccctactatggcgaagtactggcgcggcattgcgtaggcgccgacccgtcagcacccaagaagaacgaagtggcgcattggggccgtctcgccaacccgacggtgcatatcggcctcaaccagatacgccgcgtagtcaaccggctgattgagattcacggcaagccggaagagatcgtgatcgagctggcgcgcgaattgaaaatgagcaaggaagacaaggataaggcgcgcagaacgaacagcgagcacgagacatcgaaccgccggcgggaagagcagattcgagcggccggcgtagcaccctctccccatttgctgcgcaagctgcggctttgggaggagcagaaggtgggatcggccaacctatgtccatttaccggccagccaatctcctttgagatggcaatctcggcggccacggagattgagcacattctacccttctcgaagaccctggacgactcgatggcgaacaaggtggtctgcttgatcgaagcaaatcgcgccaagcgtgaccgctccccttttgacgcctttcatacaaacccgaccatcgccggccggaagtatgtgtatgacgatatcctgttccgcgccgacaacctgcctgcgaataaacgctggcgcttccacccggacgcgatggaccggttcgtaaatgacgagcgggacttcctcgatcgccagctcaacgaaacaaaatacctctcccggattgcacggagctatctctccaatctctacaacgagaaggcagaggggcgaatgcgggtgcgcgccattccaggcagactcaccgcaatgctgcgaggaaaatgggggctgtccgcactcctacctggacacaacatggccggcggcgaggacgcacccaaaaagaaccggaacgaccacagacaccacgcgctggatgcattcgttatcgcgaatacgacgcagggtttgctcaagcgagttgccgacctcaacgccgacgcggataggaaacgccttgtggacgaagtgcctgacccctgggacaacttcgatcgagaagaactacggtcgcagctcgcgcgcctcaccgtcgcgcacaaggccgatcacggcactccggggcgcaaaggcaagacaaccggcgcactgcataatgacaccgcctatggcatcgttggaccgggcaagaacggcaacaccatcgtcgtctcccgcaccccgctcgcacgcttcgcgacacccaaggacatggataaggggttgacgggcatccgtgacaaggcgctgcgcgatgctctgatcgtcgcttgggatgcgttcaaagaagcaccactggagacatcaagtcctgacgacgaggatagtcgacggaagccgaagaacccggcaatggcctttgccgagatggtcgcgacacagggcatcgaacttaacagacgcaaggtgaaggtacgtcgggtacgcatgtgcgaggagcttggcgttgttgccatcaaggatcggaagaccggaaagccgtacaaggcctacaagccggacggcaacgcattcaatgaaatctatgaactgccgaacggaaactgggtctccgtagtcatccgaaggtttgatgccaaccagactgatttcaactcggcgaacttccggccacacccggcggcacgcaaggtgatgcgacttcacattgatgaccttgtcgcaatcgacgagggagaacaaagacgcgtgttgcgcgtagtgaagatgagcggtcagacaatcacgctggcggatcactttgaaggcggcgcactcaagtctcgcgactctgacaaggaagatcccttcaggtacctgggaaagtcagcaaatgtcctgaaatcgatgggtctgagaagagtaggcgtggacgagatcggccgcttgaccgatcccggaccgcggcgggtcgaagacggaggaaaagctgcgtgatcggccgagtggttgagatcgctgcggatgaccggcaccttgccgtttcccgtggctttctgaccgtctcgacaaagggcgaggaagtggggcgcgtacctctggatgatataggtgtgcttctcgcgcatgctcacggcctcacctactccaacaatctgatggtcgaacttgcacaacggggggcagcggtcgtgctgtgcggtccaaaccacatgcctgttgcctggctgtggccaatggacggccaccatgtgcaaagtctcaggatgcgccaacaactgggagccggtgcgccactgcgcaaacgattgtggcaagtgctcgtgcgcgcaaagatcgagcagcagcgctccgtgcttgaaaggtttggcaaaccaggcggcgcgttcgatctcctcgcgcgaaaagtaaagtcgggcgacccggagaacattgaggcgcaggccgctcggcgctactggcctcttcttatgggtgagagctttcgccgtgaccggagcgcaagcggcgccaatgcaatgctcaattatggatacacggtgctgcgtgcaggcgttgcgcgcgccgtgacttctgcgggattgcatccttccgtcggcctgcatcacaacaatcgcaacaatccgatgtgcctggtcgacgacctgatggaaccctttcgtccgattgtcgactatatcgtgacccagctgagtgccgctggcgaggatgaagtaaacccgaaaaccaaatccatccttgcacaggtgcttgccttcgacatggcgaccgaccaagggacgactccagtttcgacctgtatcgaacgactcaccttctctctcgcacagtcattcgaaacaggaaaaccttcccttacccttccccacacgctgttaccgctcgaaatgccaggcttcgaacctcgttccgacagcggctaaatccatgctgaccgggtacaggcttatgtggatgatggtgatattcgatctgccggtaggcacaaaaaaggaacggcgcgccgcaacgcgtttccgtaacgacctgctggatcaaggattcgagatgtgtcagttctcggtctatatgcgcttttgcggaggcaaggagcaggtcgagacctattcgaagcggatcgagagagctcttccaaagaccggactcgtccagattctctgttttaccgaccgtcaatatgagaccatcgtctccttcgatggacgcacacgagaaagggctaaggagaatccgaagcaatatgtgctgttttgagggacattcacggccgattccggccggatactgcaccaaatctctttataaatcagagacttggcgcaacaccgagtttagccgataggaaatcgcggaccagccgcaacaagggtctcggactgcccgtcgaaaagccgagtttagccgataggaaatcgcggaccagccgcaacaagatggcgccgtatccgctgaacgatcccagtttagccgataggaaatcgcggaccagccgcaacaactcgacgaccattgcgaagatcgcccgcagtttagccgataggaaatcgcggaccagccgcaaccatctgcagaagcagtgggtggatgtgatcagtttagccgataggaaatcgcggaccagccgcaacggtgccaaggtgcgattgcggcgaaggacgagtttagccgataggaaatcgcggaccagccgcaacgaaatgatcggcaacgccatcctcgaaagcagtttagccgataggaaatcgcggaccagccgcaactcatccagcgtggcgaaggtgaacgaccatagtttagccgataggaaatcgcggaccagccgcaacggtcgggtatttcttgataaaaactttcggaagtttagccgataggaaatcgcggaccagccgcaactgaaagacgcagccgcccggttccacaagagtttagccgataggaaatcgcggaccagccgcaacagcgccaatgttgcggtggcctgtggtgacagtttagccgataggaaatcgcggaccagccgcaacctagtcaggggcagcaaggataaggcaacaagtttagccgataggaaatcgcggaccagccgcaacgtgcctcacattgggcttccgacagggtgtagtttagccgataggaaatcgcggaccagccgcaacggtatcgctgcccggcgctcaaccgggcgaagtttagccgataggaaatcgcggaccagccgcaactcatgcaccgaagaggcgatcagtttcacaagtttagccgataggaaatcgcggaccagccgcaacaagatgaagcgctcgccaatgccggattgcagtttagccgataggaaatcgcggaccagccgcaacccagaaggtgggccagaaaatccgctttccagtttagccgataggaaatcgcggaccagccgcaacctaccattgcgacagcgcccgcatcgagcgagtttagccgataggaaatcgcggaccagccgcaacgtactcactgccctgcgctttgtgacaagtagtttagccgataggaaatcgcggaccagctatctcatcatggcgattgaacagttcgacgaaagtgcggctggatagccagcaaatcagagtcctggtgcacgagcctggcaggaacacggtcttggaaatggtgcagccgactggtacattcggtagcgaaaacgctcaccgaggctgactgtaacttattgatttcaaaggctattgaggaaagtggtagcggaggacggatttgaaccgccgacacgcggattatgattccgctgctctaaccaactgagctactccgccccggaaaccgcacattccgtgcggttgatggccctgaagcccttcgagagccccggatataaggggccgcacaaagccctgtcaagcaagagcatggatctatacgcaagccagcccaattaggccctgcacaaccggaattcgggcccgtcaggccaccggaacggcctctccgggcgcagtttcggcatccgcttccgccttgcggaaacggagcatggtaaacaggccaaaaggcttgagcttcacggtttccacgagttcaagcgtagtgatgtcggtgatgacttcagcccggaaatcggggtgccagcccagcgcacgagcggctggcgccatgaagctttcaacccaaccgcgaatcccgtgatcctgggcgaagtgattgacgatcagcacctcgccgcccggcgcgcaaacgcgctcaagctcattcaacaccttcaccgggtccggaaccacagtcatcacatacatggcaaccacggtgtcgaaggaaccatcctcgaaggtgaggctggaggcgtccatctcgtaaatgccggcaatattcgtcagacgcttctcgcgtacgcgctcacgcgcaatacgcagcatgtccggcgacaaatcgatgccggtaacggtgagatgcggctggtagcgtggcagggcaacacccgtcccgacgccaacctcaagaagagagccctgccgcttgttgataatctcgatggcacgcttccggccggcatcggccacgggaccaaaagagaagtcatagacgggcgcccagcgcgcataagctttgataacagacttttcgtctattcgggctatcccgctcaaaaccgcttaccccgcaaattatactcagtaaatgtgcagccttcatgcctgcacgacaatattaattatatcgaacccgattaaggccaaattgaggttcagcgcaaggccaccatcttctcccggggctgcgaggcagcctgccgccagcggctctcggcacgggcaatccacccgccaccaagcacccgctcgcccttccccgcctcgtaaaagacgcaagcctgccctggcgccactccgtcttccccttcgaggagctctacttccgctccgccttcggcaggccggagccgcgcagcgacaggcggtcgggttgagcgaaccttgacgagaatggaaagcccttcctcgggcaggtccgcaagcggcatgtctccaagccagttgatatcgcgcaaggtcagacggtgcgtctcaagcgcatccttggggccgacaacaacctggcgccgcgctggatcgagcttcacaacaaagagcggctcactgtccggtccgctcgccccaatgccaagcccacggcgctggccaatggtgaaattgatgatgccgtcatgacggccgataacgcgaccatcgagatcgacgatatcccccggttccgccgctcccggccgaaggttctgcacaatggttgtatagcggcccgtcggaacaaagcagatgtcctgactatccggcttgtcggcgacgacaccgaggcccatgcgcgcggcaagcgcccgcgcctctggcttggtcagatctccgagcggaaagcgcaggaaatcaagctgttcacgcgtcgtggtgaaaagaaaatagctctgatcccgatcgaaatcgcgcggtcggtgcatctcgcgccccgccttccccggtcggcttgcaatgtagtggcctgtagcgagcgcctgcgcgccgagatcgcgtgccgtttcgaggagatcgcgaaacttcacccgctcgttacagcgcacacaggggatcggtgtctcacccgctgtataggaatcggcaaaatcgtccatcaccgccttgcgaaaccgatcctcataatcaagaacgtaatgcgggatcccgatctgctcagcgacgcggcgcgcatcgtgaatatcctgccccgcacagcaggcgcccttcttctgaaccgccaccccatgatcgtagagctgcatggtgatgccgacgacatcatagccctgttccttcagaagggccgctgtgacggaactgtccaccccgccggacatggcgacgaccacgcgcgtttcctccgggcgtcccggaagatcaaggctgttaaggcccgttctggtatcgaaggcttcgcgcatatcgcaagaccggatttaccggtgctccgtccgaattttactgagaagcccgcagcggcttccattcctgtcccgcatcatatgggccattccgtcagcggcaagaataggcttcctgcgtgcggtctctgcccggcaaaaaatgccgaaccggcatggaatatcgagcccaagcgacctgccgtcaagttcaaccccatgaaattactgcgatttttcgtagaagaagcatggcccggcacttgcttccaaggatgcgagccatttttttgaccgggtgacgcttatggaattctctacgccggccacgcaacgcagctcctcttccgagaagctcaccattcagccgggctccgtccggccccccgtcgcagacgcagccaacgattttgcacgctatttggccgaaaatgccaaacagcgtaatgatcggcgcgatgaccgtccggtcgaacgacgcgaccgctccgcgacacccgaacgcgccgaagaacgtgagaaaacgtcccggccgcgcgacgcatcgagcgaggatcgcgaacaagacgacacaatttccggacaaaacaacggcgccgacggcataaatgcgacggcagaagacactatatcgccggaagccgccgcaatcacagaggcgtcgctcgccggtcaagaccaggccgacctgacggaggcagccaacgcacccgaggccgctgaaggcacacaggcggcagaagaagccgataacgccactgaaagcgaagaatccgataccgcgattgccgccgtcgtagcggcagaaacgacaccggcacaagaagcggcgaagaccggctcaatgggaaccgtcacaaaagtcgcagctgaaaacactcagcagcagactgcggcttcgacaaacaatgaaggtactgaccaaggcaccgccaacacgcctgctcacgttaaaacgaatacggcatcggcagaaggaacggctgaggcgaagaaacaggcacaagcgcagaacgcgggacaaattcctgtcgcccggagtcaaatcgcagaaaaagcggccggtgaactcgctgctgcagaggccgaggcagaagatcttcctgtcaccaagaccggaaaggggcttggcggagaagcggccgaaaaactcgccgaaaagaaatccggcgacaggcaggcgtcggctcaacccaacgccgctgtcacgccgtccccctctcatcaggccgcacacaatagcaggtccgctcagcaaacggtgcaacctgcccccgcctcgggcccaactgccacaccaaacagcgaccagcttcccccgtcgcttcagcagacaaacagcggcggcagcaccgcaacgatccgcatcggaacgctgcccggccagacacagcccacacagattccggcgaacaccattgcccttcagatggcccgcaatcttcagaaaggcacaaaccgtttcgacatccgtctcgatccgccggaaatgggccgcatcgatgtccgcatggaggtgcgcaaggacggccatgtcgttgcccacatgtcggtcgaccggcccgaaacactcgacctgctccagcgcgatgcacgcgcactccagcaagcactcaacaatgccggtctgcaggcagacagcgacagtctgaacttcagcctgcgcgaccagaacagcgacggcagtgcgcctgactttgcggatggtggcggcagaaccgacatgacggacgacgatgccggcatcgagacaccgccgacgcccatctacgacatcaacctcgccgccaatggtggcgtcgatatccgcatctgacgcagaaaggttcaaaccatggatatcgcatcagccgccgcaagcgttcaggccgccgccagcggcaccacatcgtccaacgcttccgctgcccttaccggcgatttcgataccttcctgacactgctgacaacgcagctacagcatcaggatccgacgaacccgatggactccgatcaatttacccagcaattggtgcagatgtcgggcgtcgagcaatcgatccagacaaaccggaatctcgaaaccctgatcaccgcctccttgattcagaattcaagcatggcggtctcgcttctcgggcgtgaagtaacaggctcgggcaccggtgctctgcttgaagatggggaagcgaactggtcgtttgcgcttgcagatgacgccccggacacgacattgcaggtcatcaattcggacggcgccacggtctattcccagaagatcgacgccaccaagggttccaaccagttcgcctgggacggcaaggacagtcagggcagcgacatgcctgacgggacttacttcctgaaggtggtcgcgaacggcgccgacggcacccccattgcggtcgacacacgcacctccggcattgtgacggaaatcgatctcagcacgaccgatcctctgctcaccgtgaacggcgctcagatccgctattcgcaggtggtctcggcaaaatctccggaaacggacatttaattcagttcacacgtcccgcaatggaacagctaacccattgaatcgggagaaattttaccttcgcgcttagccgttttttaaagtcgcgtccttatgctctgaaacaagcgaagagcacggagaccaaagttcgatgagtgagcatcagaccaccaaggtcaactacgtgatcggccccgacgggagcccgctcacggttgctgacctgccgccgccagatacgaagcgatgggtgatccgtcgcaaggctgaagttgttgccgccgttcgcggcggcctgatcagcctcgacgatgcctgccgccgttacacgctgacggtcgaggagttcctgagctggcagcgctccatcgaacgccacggcctggccgggctgcgagccaccagggtccagcaatacaggcagtgagatagaacagtacctgcgtacttgctgtctttcgggacgccggcggatcctccctccgccggcgtcttttattttcagcctgccccttccagagccaacccggcaaatattgccgtgtgcgttaagcttctgtttaggcagtaggcggtaatttttgcccactgacacggggcgcttcgattgggcaaataaaaatcgaggttcgaggggcaaaggatttgccgactcgcctgttgtcgggcggaagcatgaatccagaatcggatttgaggcttgcgcgctgacacaagaggtgggcaggtgaatagttttacgaatcttctcagatccctgggcatggtgcgtcttgttgcgctcggtctggtcgcgatctccctgctggtcttttttggcttcatcgcactgcgtttcagcgctgaacccaaggcgttgctcttctcggacatcggtgtagatgacgccgccaagatggtagcggagctcgatacagcaaaggtggactacgagcttcgcggcgatggcagcatgatctatgtgccgcaaaccgatgtcctgcggctgcgtatgctgcttgccgagaaggggctccccgccggcggcacggtcggttacgaaattttcgacaatgccgacgcgctcggcactacgagctttctgcagaacatcaaccatttgcgtgctctcgaaggcgagctcgcgcggacgatccgggccatagatggcattcagggtgcgcgcgtccatctcgtcctgcccgaacgtgaactcttttcgcgcgagcgtcgcgaaccaacagcctccattgtcctcaaggtaagccgcaatgcgctttccgcgcagcaggtaaaggctatccagtatctcgtctcttccgctgtcgatggacttacccccggtcgggtttccatcgtggatgagcgtggaacgctgctagcgaccggtacgggcgatgacgaccaggggatatttgcaagcacggtggacgagcgccgcagcgcctatgaaaatcgtctccgcacacatctcgaaaacatcattcagcgcgtcgtcggcgccggcaaggcccgtgtcgaagtgacagcgcagatggactacaaccgggttacacaaacctcagacgtcttcgacccgaacagtcaggttgtccgctcgacacaaaccgtcgaggattcttcgagcagcaccgatggagtgcagaatgacggcgtaacggttggcaacaatctccccaacgcgaatctcggcggtgcggagaccgagtccggctcaaggcaggcgaccaaccgcatcgaagaaacggtgaactacgaaatctcgcgcacgaccaagactgaagtgctggagccgggtcgcgtgaagcgtctctccgtcgccgtcctggtcgatggctcctatatacagggcgaagacggaacgcctgtttacacaccgcgctcgcagcaggaactcgacaagatccaggccttggtaaagtcggccatgggcttcgaggaatcccgcggagatcagcttgaaatcgtgaacctccaattcgcaccgagcccggaactcggcacgatttccgacgcctccgaagaacagaccggtttcctcggtttcgcgcgcgccgacatcatgcgccttgtcgagctcgccgtgctcgccgttctgggcctcgtggcaatcttcttcgttgctcgcccgctgctgtcaaaagtcggcgtgctccccaactccgccagtcgccttgccctgccgggcaccgccaccgctgcaggcgtcggcgcgggcgcgagcgcggatggtcagatagccatcgctggcccggacgacgaaaacgccggcgcactgccttcgcccgaccagctcagtgaagacatgctgatcgacatcgcccaggtcgcgggcaaggtgaagcaatcttccgtacgaaaaatcggcgagctcgtgacgaaccatcccgacgaatccctttcgatcctgcgcagctggctgcacgaaaccgcttgaggacctgaaaattggcgacggcacccaaaatcaaggacgacaaggccctgactggcccccagaaggcagcgatcttcatgcttgccattggcgcggatgacgcggccccgctctgggaaatgatggacgaggacgaaatccgcgagat

SEQ ID NO: 3613 - DNA, 22577 bp, synthetic construct
  source 1..22577: mol_type = other DNA
  misc_feature 1..22577: note = Synthetic
acgccggtctcgactcgcgcagaggcgagaacgcctggctcaccgtcagcctgcgcgaggggcgcaaccgcgaggtgcgccgcgtgatggcacatcttgggctggcggtgacgcggttgatccgcatcgcctacggcccgtttcaactcggtgcgctgccacgtggcgaggtggaggaagtgccggcccgcgtgttgcgcgatcaattgccgcgcccaagctgatgcgacccgcctgatgcgccgtagctgacgcggccaagctgatgtgcccaagctgatgtgcccaacctgatgcgtatcgttgccggtgtttggcggggtcgcgcgcttcaggcgccgccgggcggcacgacgcgccccaccgccgaccgggtgcgccaggcactgttcgacatgctgctgcacgcgccctggggcggccgcgacgccatcgagggcgtgcgcctgctggatgtgttcgccggcaccggtgcgctggggctggaagcgctgtcgcgcggtgccgcatttgccaccttcatcgagcaggaacgcgcggcactggcgacactgcgcgccaatatcgcgacgctccgtgccgaagcccgctgcgccgtgttctccggggatgcactggccgtcgataacctctccgccgactcgccggtcgccttgggcggggcgccgtgtgcgctggtgttcctcgatccgccctatggcgccgacctcgtgccccgcgcggtggctcatctgaccgcgcgtggatggatcgcgcctggcgccctgattgtcgccgagacggcccgcgccgacccgccatggccggctgacccgctggccgagcgcgtgcacggggcggcgcggatcacaatctggcgagcgccgacgagcggcccatagagtctgcaacccgtgacgcggctgcccggaacccgtgacgcggctgcccggttgcgcttgatgccgtgctatccgatgcgcggtgccagtctgggggccgcgatcccagcgtggaattcgtggtaccggagggtctgcgccccagtgtcccttcggctacgctgcggcgggtgctgctttgcctgctgtgcaatgcgatcgaacacgcgccggacggccaagtattcgtcggcgcgatgcgcgccgacagcgagatgcgagtcatcgtcatcgacgacgggcctcgcgtggccgaacccttgaccggcgatgcgcgcacctcgctcgcccgcctgctggcgctgtccgacgcgtcgctgttcgtcgatcatcgcccgggcgacggaacaacggtgatgctcactctgtccgacgcggggtaggatcggcgagcctgccacccgaatccgaggtccgcgatgccacgccagccgatcgtctcgcccgcgctcgcccaaccgagtggccatttctcgcagggcatcatcgtcgaggcgcgcggccggctggtgttcatctccggcatggtggcccgccgcgccgacggcagcatcgccggcatcggcgacatcgaggcgcagacccggcaggtgtgcgagaacgtcaaggccgcggtcgaggccgccggcggcacgctcgccgatatctgccgggtcgatgtccatgtccgcaacatggagcatttcccgatcattcacctggtgcggcggcactattttcccgatccaccaccggcctcgacgatggtcgaggtcagcaagttcacccatcccgactacctgatcgaaataagcgcgatcgcggtgctgccgtagtgccgcgcttcgtcgtgcaacatcacgccgtgctggcctcgacgatggacgcggcccgggcaggcgcgcgcgacggcgcgccggacggcacggtggtggtggcggggcggcagacgcgcggccgcgggcgacacgggcgtgactggttcagcccggttggcaatctgtacgcctcgatcctgctgcggccggaactgccgccgtcgcgcctgagcgagcttggcttcatcgtggcacttgccgcggccgaggcggtggacgcggtactgccgggcgggcgtgccaggctgaaatggccgaacgacgtgatggtcgacggcgccaaggtcgccggcatcctggtcgagatcatcgaggacagcgccgctgtcatcggcatcggcttgaacgtcgcccgggcgccggagagggcggcgtatccggtcgcctgtctgcgcgatgccggggcgacgacgtccccgcaggcggtgctgacgcatctcctggcggcgctggagcagcacgtggcgcactgggcggagcacggattcgcgccgtcccgtgcggcctggctcgcgcgcggcccggcgcctggagatgtggtgcgggtgcgcattggcacgcgcatcgacaccggccggttcgcgggactcgacgccgatggggcgctgctgcttgccgaggatggggcgctgctgcttgccgaggatggggcgctgcgccgcgtgatcgtcggcgatgtggtcgccgcgtagggcgtgctgcggacgccactccgggctgcttcggttcacgtggctggcgagcgcagatcaagaccgaccagacgatcgagtgcggcctgatcctgcatcagcgcgtccgagctgccgcgatgggcgatgatcccccgctcgagcaccaccacgtcgcgcgtcagcgatagcgcgatctgcgcgtgctgctcgatcaggatgaccgccgtgccctgcttggcgatcatgccggcgatcgccccggcgagttcctcgacgatgatgggggccaatccctccagtggctcgtccagcagcagcagcgcgggattggtcatcagcgcccgcgcgatcgccagcatctgctgctcgccgccggacagatgcgtgccgctattgcgccgccgctccgccaggcgcgggaacagctcgtagacggcgcgcagcgtccatcgcccgacgggacgctcgttggaacgttcattgggacgttcgtcggaacgttcgttgggacgctcgtttcgatgttcgttgcgaccggcacggaggccggccggccgggccgccaccgtcaggttctcctcgaccgtcagcgacgggaaaatctcccgctcctgcgccacccagccgatgccgagccgcgcccgtcgatacggcgccagccgcgtgatatcgcgcccgcgccacaggatcgcgccggcgtgcacgctggtgcatcccatcatcgtcgccagcagcgtggtcttgccgacgccgttgcggcccagcacggccaggctcccaccctccgccagttcgagcgtcacgccgtcgagcacgatcgactcgccgtagcccgcgcgcaggtcacgcaccgcgagcagcggttcagccatgtcggtcgttgccatgtcggatgttgccatgtcggatgttggcgtgcgagacaccacccaggtacacctcgcgcacgcgcggatcggcggcgatctccgccgggctgccttccaccaggatgcgcccgcccagcatcacgatcacccggctggcgaagcggaacacgatgtccatgtcgtgctcgatgaacagcacggtaaggtcggccgacagggcctcgatcgccgcgaacagcgcgccggcttcctggcgcggcacgccggccgccggctcatcgagcagcagcaccctgggccgcgtcgccagcgccagcgccagttcgagcagccgctgctgcccgtaggccagcaggcgcgtcggccgatggcacaccgcgccgagcccgagcgaggcaaggatggcatgtgcctcggccactgccgtgcggaatgccggcaccggccgccaccagttgccggcaacccccagacgctcgcacaccgcgagcgtcactgcctccagcggatcgagctcggggaacagcgtgttgatctggaatgtgcgcgccagcccgcgcttcacccgcaggtccggcgccagcgcggtgatcggctgcccgtccagcaagacctcgccggcgtcgggacgcagggcgccggtgagcaggttgatcagcgtggtcttgccagcgccgttcgggccgatcagcgcgtggcgcgcgcccggcggcaacgcgaaatgaatgtcctgcgcgaccaccagcgagccgaagcgcttgtgcaacccgcgcgcgttgagggcgggggtcatggaaattgctggttccaccaaggattcaggacacccattacgcgtggcctcgcctggttagcgagacagcaagatccaccgcggagatcgcggagatcgcggagaaagaaagtcagcgctacgcgcgaagcgctgatctgccttctccgcgtgctccgcgatctccgcggtgaacctgcttccttgccgtcgatcgagcgccacggtcgcacgaccagagcgccccgaccgcgccgccgcatcgcgcaaccgcccgacggttcgtcgttgcagtaccgcgcactcccacgcagtcgccgatatatccattgcaccgtcggtatcatgccgcatcccgcccacgtggcagcagtcgcgccagtccacccagaatcccattgggcaggaacagcacgacgcccaccagcagcaggccgatccagaaataccaatattgtggattcatgtcggccaactggtcgcgcgcgatcataaacacgatggcgccgacgatgccgccgtacaaccgccccgtcccccccaacgccagcatcaccagcaggtccgccgagcgctggaaccccagcgtcgagaggtccacgaactgcgtggtctgcgccagcagcccgccggcgatcccggccatcgcggcggcaatggtatagacggtgtgcaaccgcgccgcgctcggtgcaccgatcgccggcatgcgccgctcgttctcgcggatcgcgcgcagcgacaggccgaacggcgagtgaatcagccgccgcgccatcagcaccagcagcagcagcaccgccagcgcgtagccataagcggtggtgccatacagatcgaactcgaaccgaccgaacaacctccagatgaccaccccctgcagcccgtcattgccgccggtcagccagctctcgcgattcgccatctcgtacagcagcaggccgatgccgagcgtgatcatgatcagcgcaagatgccgcacccgcacaacgacaaagccggacagccagccgaacagccccgccgccgcgccggcaaccagcaggccggacagcggctccccccagccggctttggccagcagcccggcggtgtaggcgcccacgccgaaaaacgccgcgtggccgagcgagaccagcccggcatagcccaggatcagatcgagcgagaccgcgaagatcgcggtaatggcgatctggcttgccagcgtcagataggtgggcaggaccacgaatggcagcagcgtcgccagccagaatgccagctcaaccggccgccagcgccggcgctcggacagatgccgatgcggatcgatcgcccggcgagcgctcgcggtttgcgcgctcacgcctgggaccttccgaacagaccggacgggcgccacagcagcaggctgatcatcaccaggtagatcaggaacgatcccagtgtgggagcgtaatatttccccgcggcgtcgctgacgcccagcagcaccgcggccaggaacgagccgcggatcgatcccagtccgccgaccgcgacgacgatcagcacatagatcaggtaggtgaatgcgaagttcggatcgaggccgacgatctcgatcgccagcgcgccgccgagccccgccaggccactgccgagcgcgaaggtgacggcgaacaccagctcgacattgatgccgagaccctgcgccatgcgctggttgtccaccgcggcgcgcacctgggcaccgaagcgggtgcgctccagcgccaccaccagaaccagggtcaccgccagcgcgaccgcgatcaggaacagccggtaatggctgaagttgacgcccaacactgtggtgtagccgcgcaggtcgtcgggcagccggaccggctgttgctgcgtgccgtagaagaaggccgccgcggcgaccgagatgaacaccagccctatcgtcagcagcacctgatcgagctctcgcgcgcgatacagccggcgatacagcgtgcgctcgaatcccacgctgaccgcgccggtgaccagaaacgccatcggcaacgtggccaggaacggccagcccagcgcgttcatcagtgtcgcggtgacgtaaccgccgagcatggcgaaggcgccgtgcgccaggttgacgaaattcatcagcccgagggtgacggacaatccgaccgacagcaggaacagcaacatgccgtaggcgaaaccatcgaagatcacgccgacggccggcgcaatcatcggcggaaaccgcgaccaggagtcggatcaagctcagccatgaccttgcgaacgtcagacatcttggctcctgaccgtcgatcgattggtcaggcgaatgctcgggcgggacaataaccgtcccggctgcggaacggtctgcaagcaaggaaggttcaccacagaggtacagaggcacagagcagcaatggactgcgcttcgcgcgacgcgccgctgtcctccttctctgtggctctgtgcctctgtggtgaatcttccttgccggcggtccagcgcccaggtcccattacgagagagccccggccgcgcccctcacttcgccatgcgcgccttcaaggggtccttgacgtcggggatcttgtcgaactcgacgttcaccagcttgccgtcgaccttctccacccggcggatgtagaccgtctgcacgatgtcgcgggtatccttgtcgatggcgatcggcccgcgcggactttcccacgccatccccttcgccgcgtcgatcagcgcctggccgtcggtgttgccaccggtctttgccagcgcatcatagatcagccgcatcccgtcatagccgccagccgagaagatgtcggggttgcgcccaaacgccttgttgtaggcggcgacgaactgcttgttcagcgccgagtcgtgattggggtcgtaatggaatgccgtgataataccgatcgcgtcgtcccccatattcttcaacgcgtcctccatggcgatctcgccgttgccgaggatcttggtgtttttcggcgtgataccgcggccggccagcgccttgccgagcgctgccggctgcgcgccgccgggcacgaagatgaagatcgcgtccggattggtgtccttggcgcgctgcacgaaggcggagaaatccgggttcgccaccggcacccgcaccgagccgaccgccttgccgccggccgcctcgaacccgcggatgaagctggtctcggcatcgatgcccggtccgtagtcggacaccatcgtgtagacggtcttgatgccctgcttcgccgcccagtcgccgaacgcctcgtcgatctgcggcagcgtcaccgaggtgcgtgccatgtagggcgacttcgtagtgacgatcgaggtggcggcgttcatcaccaccatgaacttcttcgcctgcgccgagacgtcgccggccgcgagcgcgttcggcgtcagcgcgaagccggccaggatgtccacgttgtcgcgcaccacgagttcttgcgccaggcgcttggcgacctcgggcgcgatgccgccgacatccttgcggatcacctcgatcttcttgccggcgacggtgtcgccgtgctgctgcatgtagagcttgatgccgttgtcgagctggatgccggtgtcggcgaactggccggagaacggcaggatcaccccgatcttgatcgtctgctgcgcccgggcttcgggggcaccggcgagcggcacgctggctagcgagccgatgacaagcaccggcagcaggcgtaggcacgccgcgatcagccgcttcattggtcgtctccccgagattgcttggtgtagttggtgcgaggcgatggaacggcctcggtcataggaaacaggaagactctccccctccccttagagggcttgggccgcgaagcggaccaagggagggggaggggtcgacgcgtgaatgagcttcgatacggccccggcaccaacccctccccccaaccccctccctcaaggggagggggagaacaagaacgcctcccctactcggcggcgatggccgggtcgtagtcgatcgcttcgttgcaccagccttccttgcggaagcgccaatatgactcgcccagcttcgcggtgaccggcccggggcggtcgttggacaggatgcgcccgtccagccgcgtcacgccgatcaccccgccggcggtggacgagatgaagatctcgtcggcgccgcgcagttcctcgagcggcaccgtccgcacttcgcagggcagtccgagcttctcgcacagctcgatcaccgcgccgcgggtgatgccttccaggatgccgcgatccggcgtggcgaccttgccgtcggtcaccgcgaagacgttgaacccgggaccctcggtcacgttgccggcgaagtccagcagcaccggattgtgcgcgcccttgtcctcggcctcgaacatcgcccgggtcatgtcggcccaatggaagttcttcgcccgcgggttgacgcactcttccggaatgcgcgggttggaggcgacgatcaggtgcatgccctgctcgcggatctcctgcggcaccagccagacatagggcacagcgtaggccagcaggtagggccgcgcgttcaccggatggcggcgcaggttggtcggcgccgaaccgcgcaaacagtccatcgccacgtaggcctcgcgcagcccggtacggcgcaccagctcgtgcagcatggtgcggatgtccgagtcgctctcgcgcgggaccaggcggaagtattccatcgaggcgcggaagcgcttcaggtgctgatcgaggcggaagaacgcgccgtcccatacgctgaccacgtcataggtcacgtccgatcgccggtagccccattcggtgaccgggatcgacgcctcgcccactggcatgaagcgcccgttgatataggccgcgcccgtcggccacatcgcatccattgctgcctctccccgtatcggtgtgacgggagcataacagcatccgcgcgccaagcgcacccgtccggatcgcatcgcgcggaggaaaattcagatgcccgagtccaccaaaggtcccgacttcgcccacggtccggtcgttgtcctggggccggaggacggcgacgcgttctggcagccgctgccctcggtcggctatatcgtcaacaaactgacgccgtacaacacgccgtacgacagcttctcgatgggcctgcaggtgctggagcccggcgcgcatatccgccgtcacgcacatgagcgccagcacgaggtgctgttctgctaccagggcaccggtgtcgccgaggtcggtgccgaacgccatgaggtcgccccggaaaccatgatcctagtcggtcgcggggtgcagcacaaggtaacgaataccggcgccgggcagatgcgcctgctgtggatgatcgcgccggccgggctggaggactggttccgcgccatcggacgcccgcgcaaaccgggcgaggcgatgccggccccgttcgagcggccgacggacatcgccgagatccaggcgcggcagcgattcgtgcggtcggaggaggggtgacacgtcagtctcccacgtcatggcccgcgaaggcgggccatccacgacttcttgtagtgctgacctcgaccaatcagtagatggatcaggcaagccacccgccaaaacgtcagaagggcaggccggagcctgcccttcgattttgtgccctgaaggcttgttaacggctgctaggcccggaggccatcgccaacggcgcgcgatctcctatcggctaaatatttgatacggacgccccctatcctaggccggttacgatacaatgacaatgggaaatagccgataagagatcgcacgccagccgcaactctgcgccattcgacttaggttgaaggacatcaattcggggggcgttggcgcgagtgacgtgtgcggcggcctcagtggaaggccgccgccgctggggaggattatcgcatgaaccaaccatatcgccttgggctcgacgttggcaccaactccatcggctgggcggcgctgacgctcgacccgacggggcggccgagtgacatcctcgcccttggcgcccgtatctacagcgacgggcgtaatccgaaggatgggacctcactcgccgtcgcgcgccgcatgccgcgcgggatgcgccggcggcgcgatcgctatctgcgtcggcgcgacgatctgatggaggcgttgattgcgctggacctgatgccggcagacgaggcggagcgccaggcactggttacgctcgatccctatgtcttgcgtgcgaaggccgcgcgcgtaccactgccgccgaacgagcttggacgcgccctgttccacctggatcagcgccgcggcttcaagtcgaaccgcaagaccgacacgagcgacgacaacaagcttaccgacaagatcgaggcgctcgatcggctcatcggcgaccggacactgggcgagtacctccaccggcgtaggcttaaagggaagatggtgcgtgcgcggccggaagcggcgttctatccgcatcgcgctctgtacgagaaagagttcgacaaaatccaggaaacccaggcaccgcaccacactctgcgcccagaacaatgggcgcacttgcgggacatcatgttcttccaacgcccactgagaccggtcgatccgggctggtgcctgcttgaagaaggcgagcagcgcgcgcaccgcgccctgccctgcgcacaggaattccgcatggtgcaggaggcgaacaacctgcgcatcctagttccaggcgagtcaggacggccgctgaaccgcgaccagcgcgaccgggtgctgaaggaattgcggaccaagaaagaactgaagctcgacggtctgctgaaattgctcaagctaccgtcaggcgcgcgggtcaatctgttcgacgagaatcgcaaagcgctgaaaggcgacgagacggccgcgcgcctctcgcacaaggactcgttcggtcggctctggcacgccttgccgttcgcgcggcggactgacatcgtccgcaagctgatcgagaccgaaagcgccgatgagatcgaacggatcgcgcgggccgaatggaaactggatacggccgccgcgaagaaactggccgcgacgtctttgcccgaaggctatgcgcggctcagcgaaaaggcgatcggcaagctggtcccggtgatggaggagcagggcctcaactatgccgaggcagtcgcggaaatccccgagtatcgacatcactcagatttccgcccggatcgcgagttggatgagctgccgtattacggcgccatcctgacgcgtcaggtggttgggaccgatcccaccaaaccaaaggaagatgaggttgggcactacggacgcatcgccaacccgaccgtgcatatcgggctcgggcaactccgacgcctcgttaatcgggtgatcacggcctacggcaagccggcggagattgtcgtcgagttggcgcgagacctcaagatgaacaaggaggagaaggaagcggagcgaaagcggaaccgggagaacgagcaggcaaaccggatcagggaagagcagatcaagtccgcccatcgggtgtcatcaccgcatctgctacgcaagctgcggttgtgggaggagcagaattacggctcctgcaaggtttgcccattcacgggccagacgatctcgttcgaaatggcaacggatcaccgtactgagatcgagcacattttgcctttttcaaagacgcttgacgattccatggcgaacaaggtgctggcgctgaaggcggcgaacgacgccaagggtgatcgctcgccgtacgaggcgttccataccagccccaggatcggcacgatcgaatacgactacccaaatatacttcgatacgccgacgcgttgccgccgaacaagcgctggcggtttcttccggacgctatggagcgattcgagaacgagaaggaatttctggaccgccagcttaacgagacgaagtatctgtcacgcacaaccaggctatacctggcccacctgtacaacgagagggccgaagcgcgtcagcgggtgcgagctattccaggcaagctcaccgccatgcttcgcggcaagtggggactgagcgcgctgctgcgcgaccacaaccggacgggcggtgacggcgacgacgggccggcgcggaaaaaccgcgatgaccaccgtcaccatgcgatcgatgccttcgtgatcgccatgacggatcagggattgctgaagcgcatctccgatctgaactcggatcccgagcggacgcggctgatcgagaagatggaccctccctggcccgacttctcctacgagcaattccgcgagcgctcgaccgtatggtcgtgtcgcataagccggatcacgcagaacgcaagcagaagcgcaagacgcctgggacgccaggcaaggttccaagcgagcagggcaagacgaccggctcgctgcacaacgacaccgcatacggctttgtcaaagatcgcgacggcaacattgcccccggcaagaacggcacatggacggtcgtctcacgtgcggccttgagcagcttcctcacgcctaaggacatggacaaggcgctcatggccgtacgcgacaatgctctgcgcgtagcgctgacggcggaatgggagaggtccaagcaagcggcactggccaacgaaggtgccacccccggcgacggtgaaaaacgcaagcagaaccccgccgcgctgttcgccgatcgtgtcgagaaaaaaggcattccgctcaacgggcgcaccgtgaaagtccgccgcgtgcggatggtcgaggagctggccgtggtgccgatcaacgatcgccgcaccggcaagccctataaggcttacaagccggatggcaacgcctttgccgacgtctaccggctgcccaccgggcggtgcaccgcggtcgtcatccggcgcttcgacgccaaccagccggccttcgacccggcgaagttccggccgcatcccgccgcgaagaaactcatccgcctgcatatcgacgacatggtcccgctggaggacgccgggcagcgcaaaatcctgcgggttgtgaagatgagcggccagaccgtcaccctggcggaacaccacgaaggcggcgcgctgaagaagcgcaacgacgacaaggatgatccgttcaggtacctggaaaaatcggcgaacatgctgatcggcatggggctgcgcaagatcggcgtggacgaaatcggccgcctcagcgatccggggccgcgcgtcgcaagaaacacctgatgatcggccgcgtcgtggagatcgccagcgaccggcgccacctggcgctgtcgcgaggcttcatgacggtttcgaccgagggcagcgaggtcgggcgcgtgccgctcgacgacatcggcgtcctgctttgcaacgcacacggcctcacgtattcgaacaacctactgctggaactgtcacgacgcggcgtcgccgttgtgctgtgcggtccggatcacatgccggtcgcctgggtttgatgacgccggtgcgccgcctggcaaagtttagccgataggagatcgcgcgccagccgcaactcgatcttcgaccgcccgaccaagttcaccagtttagccgataggagatcgcgcgccagccgcaacagcgtaacgtctgtcgtcgtgtcggacattagtttagccgataggagatcgcgcgccagccgcaactcggccacacgcatgtcgtgacgctgccggagtttagccgataggagatcgcgcgccagccgcaactggatgtcgctgctgaccttctccggcaccagtttagccgataggagatcgcgcgccagccgcaacgctgtatgtgcactacccgcggatcctgcagtttagccgataggagatcgcgcgccagccgcaacaccgcgtgaccgccggcgatcgcgtcggtcagtttagccgataggagatcgcgcgccagccgcaacggacaggctacgcgcgcgctggggcgatgtagtttagccgataggagatcgcgcgccagccgcaaccaaggcacccaaaccaacccgatcggcggcagtttagccgataggagatcgcgcgccagccgcaacacgagctatacggccgcaaagccgcctgaagtttagccgataggagatcgcgcgccagccgcaactcgggcaatcgctggtgacagcacggaaagagtttagccgataggagatcgcgcgccagccgcaaccgtagagatgcgcggccagcgagggcgccaagtttagccgataggagatcgcgcgccggccgcaacacataccggagacgaacgccttgaagtggaagtttagccgataggagatcgcgcgccagccgcaacgcagcgccacgtcgcacacgcgctcgaccgagtttagccgataggagatcgcgcgccagccgcaacttgccaggtcgaggcgcgcgactacgcgggagtttagccgataggagatcgcgcgccagccgcaaccctgcgccccgtgcggccccaccagtttagccgataggagatcgcgctgctgctcaattttaggcgatatgtcacttgccaaacccaagatgagtaggaaaacatgccacgcagccgacctggactcattgacgtacgtcaaggcgcttccagtcgtcccgcgctagaaatgcctacggcaccaaggggtgccgtagcatgcaagagcgaccccgcctaagtgagatgacttccgatcagctatatgaccgcgctgccgatttcatgtttcgatccaaagacgccagcactccatcgcgccggaaaagactcgggcaattagccgcgcaattcaaaaaattggcggccgaacgggagattgaggaagggggtgggcgctcggcggcttagtcatccctcaacccttcggcttccgcttcttcggctcgtgcttcgggagcggcttggactccgccagcttcttcaacgccgtctcgaacgcggcctcgtcctcgtcgcagcctagttcgcgggcgagttcagcgaatctcgcgtgctgcgcggtggcggcgcgacgggacggggggtggtgcgcgcggcaccaccctcaccgttggtccgctcttcgcggcccaaccgcgccgctcgccgagctctcccgccagtgcgagaggtgtactggtggcatcagcggcacccggaccgacgcatcatgccaaatgcgatcgccctggcacccttctggatttcgctggcgccgagggtgggttttggtgtatcactaactaacgtatggttcaggatcgctgatgcgcccaatcgcagccctcgcccgcgtgcccctacgcttccccgaggcgattgtcgcgtcgccggggcaattctccatgcaacaccggctgccgggtgaggacccgacggtaggaccgaaccctcgggggcggtccacggcgcggccgctgcgggcggcggagcagcaggacgctggcgccgtggcaggcggggactgccggcgcgcggttgatcaagcggggggtgatggtgggccatcggggggcgtcagtcgcgaatcgcgggccagcccccatgctgagccagccaccgcgcactcgccccgccggtcgcccggtggggttggcggggggatgggacgccggggacgccggccaggaagctgtccgcgaggcggagtggcgcaattcgcgaatctcgacaaagaccctatggaacgccgtgcggtcggcttggcggcaggacgggctgccggggtgccgaccgggcacctgacctctgggcgcgttgcgcaattcacgaatcgcgacaaagaccctacggagcgctgcgccgtgggcttggcggcagaacgggctggcggggtggcaacgaggcacctgcctccggggcgcgtggcgccatgcgcaaatctcgacaaagaccctatggaccaccgcgtggagggcttggcagaaggacgggaccccggaattgccagccagggacacctgccctcgggcgagtggcgcaattcgcgaatctcgacaaagaccctatggaacgccgcgcggtgggcctggcggcaggacggcaggccgggacgccgaccaaggacttgcccccggggcgactggcgcaattcggaaatctcgacaaagaccctatggaacaccgcacggtggcgcctggcggcaggacggagcggcggggacgccggccgggaacctggccccgagcgcgtggtgcaattcgggagtctcggacacgacccctgcaacagtctgccacccggcgacgaccaggtggtcgcgcggtgggcttggcggcaggacggcacggcgggtggcgccagccagggacctgcacacaagcgagtggcgcaattcgggaatctcggacacgacccctgggacagtctgccacccggctatgaccagatggtcgcgcggtgggcttggcggcaggacggcacgccgggggcgccacccaggggcctgcacccgggcgagtggcgcaattcgcgaatctcgacaaagaccctatggaacaccgcgcggtgggcttggcggcaggacggcacgccggggcgccacccaggggcctgcacccgggcgagcggcgcaattcgcaaatctcgacaaagaccctatggaacgccgcgcggtgggcttggcagcaggccgggacgcgaggggtgccaggcaggggcctgcacccgggcgagtggcgcaattcgcgaatcttggacaagagcgcatggcgcaccgcgtgggtcgccttggcggcgggacgggaccctggggtgccaaccaggcacctgccgccggggcgagcggcgcaattcacgaatctcgacaaagaccctatggaacaccgcgcggtgggcttggcgggccgggatgccggaggtgccagccaggaacctgccgccaggcgcgtggggcaatgcgcgaattcggcaaagacccatgctgagcccgtcggtgccacgacggcgccgccccctcccgttgccggtactgctgcccttaccccccggtctggccagtcgtgtgccaaatgcaatccccctggcaacggctccgcgcctacgctgccagctcgcgcatgatcgcatagaggtccgacttcgcctcgaacccgatccccggcagatccggcagcgtgacaatagaattctccacgcgcgtgccgtcgggaaacccgccatagggctggaacacgtccgggtagctctcgttgccacccaggcccaagccggcggcgatggcgagcgacatctggtgtccgccatgcgggatgcaccgcttccagctccagccggcatccttcagcatcgccagcgtgcgctgatactcgcacagcccatacgacagcgcgcagtcgaactgcagccagtcacggtccggccgcatgccgccgtagcggatcaggttgcgcgcgtcctgatggctgaacaggttttcccctgtcgccattggacccggatagaactcggccagcgccgcctgaagctggtagtcgagcggatcgccggcctcctcgtaccagaacagatcgtattgttgcagcatcttcgcgtatgcgatcgccgttgcaaggtcgaaccggccgttggcgtccaccgccagccgcgcctggctgccgatctccttcagcactgcctcgatccgccgctgatcctcggccacgctctcgccgccgatcttcatcttcacgaccgtgtagccgcggtccagatacgaccgcatctctgcgcacagcgcgccgtcgcccttgcccgggtagtaataaccgccggccgcatagacgaacacgcgcggatcggccgcgatcccgtgctgctccgccagcatccggaacagcggcctgcctgccagtttcgccgtcgcgtcccacaccgccatgtcgatcgtgccgaccgcgaccgagcgatcgccatgcccgcccggcttctcgttcgtcatcatgcacgcccacacgcggtcgggatccagcgtctcattcgccgcgtccagcaatgtcgccggcttcgcctccaggatgcgcggcgcgaaccgctcgcggatcaatccgccctggccataccgcccattggagttgaacccgtagccgaccacccgcctgccgtcgcgcaccgcgtcggtcaccacggcgaccacgctgacggtcattttcgagaagtcgatatacgcgttgcggatcggcgagctgatcggccgcgtgatctcgcgcacgtcgaggatgcgaacggacatgcaaaccctccttacggttcgtcgcctgaccgaaggtctccctccgccggcctgcggtctggcggaattccccgcgggacgcaacgcccgcgcagccgccccccgatggcatccaaacgcggccccgacgggttgccttctcgtccggccggccgcatgacgaggctccttccggacccctgtgtcgagagccatgcaaagcatttccctggcggcggccgccctggcagcttccctgtgcgccgtgttgaccgcctgcgcgccgccgcctccaccaccaccaccgccgccggcgccgccgcccgagccgatcgacggcacctatcgtggcacctccacgaggttccaggcggacagccgcgcctgcccgcatcccgggctggtgctgctggtcgtgcaggacagccagttccagtaccattggagctacggcgtccacatcgacgcatcgatcgcgcccgacggcaccatccgcggcagcgcgccggattttaccctcgtcggcaagcgcgacggcaggcacatggacggcgacgtgaccaacggcgcctgcggcctgcacttcaccgcggtcaagacccagcagtgacggtgatcagtgaccggtcgccggtgacccccgatcaattgcccgcaggtgatcagtggccgatgagcgctgatggcttgcccgactcgcgggatgcagcgttcgccgataatctgccgcccatgcagtacgtttccacccgtggccacgcgcccgtcctcgacttcgccggcgtgttgctggccggcctggccgaggacggcgggctctatgtccccgagacctggccgcttttcgccgccgccgactggcgcgcgctgcgcggcctgccctacccgacgctggccgcgcggatcatgcggcccttcgtcggcgacgcgatcgaattcgccaccctggaagcgctgtgcgacgacgcctatgccgggttcaaccatcccgccgtggtgccgctgatccagctcgacaccaacctgttcgtccaggaactgttccacggcccgacgctggcgttcaaggacatggcgctgcagcttctcggccgcctgttcgaccacatcctgtccgcgcgcgaccagcgcgtgacgatcgtcggcgccacctcgggcgacaccggctcggcggcgatcgaggcctgcgccgggcgcgcccgcatcgacatcgcgatcctgcatcccgagggccgcaccagcgaggtgcagcgccgccagatgaccacggtgcaggacgacaacgtcgccaacatcgcgatccaggggacgttcgacgactgccaggacctggtcaaggcgatgttcgccgacgcaccgttccgcgctgagatgggcctgtcggcggtgaactcgatcaactgggcgcgcatcgccgcgcagatcccctattacgtcgccgccgccctggcgctcggtgcgcccgaccacgaggtggccttcgccgtgcccaccggcaacttcggcaacatcctggcgggctgggcggcgcggcgcatgggcctgccggtggcgcgcttggtggccggctccaaccgcaacgacatcctggtccgcttcctcaacgccaacgacatgtcggcccgcccggtcgagccgagcctgtcgcccagcatggacattcaggtcagctccaacttcgagcgcctgctgttcgaactgctggaccgcaacggcgccgccaccgcggcggcgatgcaccggttccgcgcgaccgggcacatgggcgtgccggatgccgcgtggcaccgcgcatgcgccgtgttccacggcttccggctggacgacgccggcaccgaggcggagatcgcccgcctgcacgccgcgaccggctacctggccgacccgcacaccgccatcggcatcgccgcggcccgcgcgcatccggcaccgcacgccgtcccgatggtcgcgatggccacagcccacccggcgaagttccccgaagcggtcgcccgcgccaccggcgtccaccccgcgctgccgccggcgctggccgacctgctcaaccgccccgagcactacgtgacgctgccgaacgaccttgccgccgtcgaggcccaggtgcgcgccctggttcgccgcaatcgcccatgagggtgccgggtttgcctcgcccgcgcagccggtgcggtcgctggacccctcaccccaaccctctcccacagggggaagcgggagtagtgcaggtgcaattgcgccctggccgcccggccggtaaatcatcgtctgcttacgcgggtgtagctcaatggtagagccccagccttccaagctggatatgcgggttcgattcccgtcacccgctccacgacccaggggccccgccgtccgtcgatgaccggccatgtccacgtgattggcgccggcctcgcagggctgtcggcgacacttgcgctcaccgcgcgcgggcggaccgtctcggtctacgaatccggccccgccgccggcgggcgctgccgctcctatttcgaccgcgagctgggcatgacggtcgacaacggcaaccacctgctgctgtccggcaaccgcgcggcgatgcgctatctcgacgcgtttgccggccgctcggcgatggccaggccggacgagccgaccttccccttcctcgacctggccaacgatcagcgctgggcggtccgccccaatcgcgggcggtatccctggtgggtgctgtcgcgcgcgcgccgcgtgccgggcacacgcctgatgaactatctcgcgctgcggcggatcctgggcattcgcgacgacaccacggtctacgccatgttccgccaggaaccgctgtatcgtcccctgatcgcgccactgaccatcgccgcgctcaacacccagcccgagcaggcgctggcccggctgctggcggcggtgctgcgcgaaacgctgatggccggcggcaacgcctgcctgccgatgttcccacgcggcgggctgtccgcggcactgatcgacccggcggtggcactgtcggcctcgcgcggcgccacgttccacttcgggcgccggatcgctgccctggagatcgccggcggccgggtgatcagcctggccggccctgacggcccgattccactcggcccggcagacgccgtggtgctggcggtgccgccctgggtggcgtcggacctgctgcctggattgcaggtgccggcagcgttcgaggcgatcgtcaacgtgcatttccgcatcgacgccgaccccggcccggcgggcttcatcggcctcatcggcggcaccgcggagtgggtgttcgtcaagccgggccacgtctccaccactaccagcgccgcccaccgcctggcggaatcggacgccgaccggatcgccgcctcggtgtggccgaatgtgcgcacggcgctcgacctgcccgccccgatgccgccctgccgcgttgtgaaggagcggcgcgccacgatcacggcgacagcggcgcaggaacggcgccggccgggggcgcggaccgagttggcgaacctgctcctggccggcgactggaccgccaccggcttgcccgccaccatcgagagtgccatcaggtccggcgaaaccgtcgcttcactgctgaccggctgacacccaagcactgagatcgccaggccgaaacccccaagctgacatcgcccagccgagagcgcccgctgagaccgagctgagatcatggatatcgccgcacccgaggacaaactcgccgccgcggtggatcgcgcgaccgcggcgttgcgcgcgcaccagcgcgacgacggacatttcgtcttcgagctggaggccgatgcgacgattccggcggaatacgtgctgctggagcactacctggatcggatcgatgccggcctgcagcgcaggatcggcgtctatttgcgtgcggtgcagggtgcgcatggcggctggccgctgttccatgacggggcgttcaatctgtcctgcagcgtgaaggcgtatttcgcgctgaaggcggtcggcgacgatcccgacgcgccgcacatgcgccgcgcccgcgaggcgatcctggccgccggcggagcggagcgcggcaacgtcttcacccgcgcccagcttgcgctgttcggcgaagtgccgtggcgcgcggtgccggtgatgccgctcgagatcatgcacctgccattgtggtttccgttccacctcagcaaggtgtcgtactggtcgcgcacggtgatcgtgccgctgctggtgctgatggcgaaacagccgcgtgcgcgcaatccgcgcggcgtgcatgtggcggaactgttccgcacaccgccggaacgtatcaccgactggatccgcggaccgtatcgctcggcctgggga

SEQ ID NO: 3614 - DNA, 16013 bp, synthetic construct
  source 1..16013: mol_type = other DNA
  misc_feature 1..16013: note = Synthetic
taaaggtcttcatcaggatggtagcctcccgagaggaagcgtccaaacgcttcaacgaagattgttgctcccatcaagactctccccgctaaccccagctagtcatcgtattgtctgccgcttgacgcgacgcgacatttaacatttcggctgaccgtgtatcggtctggcgggtcaaggacccccggtatatccacgtccacggtagcacggaatccggtcattgcgcttccgtatctgcattcggcgcgagcggttgctctcctcccatgtcctccgccttccctgaccctctttctgtctttacgataaggctaatgcctggtctggtaaacacccgagcggacttcccgacgcgaacacctgagccggacgccacggccagggagttgctggatcggttgatatgccgtcatcctgagcgtttcagcggaagtcaccttcgcacgctgcaacgccgagtgcgacaatggcgtagggttatggcgagagagctggtgtatgcttctggtgaacggagtgaaatgattgaggctgaccaaaggaatatcagacctgtgggcgtcgattagaagctgagaaaattacggtaactgcgataatacctaatgggccatccgggactggatctgacccatacagtaacatgttccggtgaggcaacaggagcggtcagaataaatgtcgttgaccagctaagcgcaaattgagagaaaattcgccataatcgttaaatgaagttcataatgacatgtgtattttggatacgaaagagcatataatacttatctgacggtagtaatttgcgctccgagcgaagcggtgcccggcaaggctgtaggaatgatgggcgaagcgggggttggcgtgtggcggccgaaatgctcaccagagcgaggatcgaatcatattcatctgattttcagcaactaaatggtatcgcacgaatattgatcccgagcaggcgacaggctttgagcctcgctctacattgtctctgctcatccagccattcgggaatgcacttcatattgtcaccaaatggggactgttctgttcgtataccaactaggcgcggcggttctaccaacactagaaggcgtcctggttccgtgggtcgaggactatattaggtccgcctgactttggttcgacacgtgaggttctcgcccttgaaaggcctactgcctcccttcggtcagatattaaagggtgcgagattcaagtacaaacccgaatttcgcgcccacgcacaccggccggtcatcttgtgcgtcgattcggatgtctgtcggtcacacttctcgaaggtggaacggagaacgattagcattgacgcgtccactcatcggaagaagaatatgaacactcaaattgcagtgaacctgtttctggagagccgtcgctccaagcggttctccagcgttacgatggacacatacggctgggcactcgccaagatggccgagatgtatcctgcggaattgccggacaaggcgtctgacattcagcggcttttcatcgttaacgccgaattgtcggcttcctcgctgcgaaatatatgggagatgttgcgcattttctggtcttgggcggagaacgggggcatctgccccaatgtcatggagggtgttcccgccccggtgatggggcaggctgccccgcatactccggcgtgtggggtatacgcaggctactgggttacgtggaggtggagcgcgactacgcgatactggcgacgcttctggacaccggcaagcgaatcggcaaactcgcgtccatgactcgtgaaagcgtcagcgcggaaggagtcctagtgtccggcaagaacggtgaaaaggaaggtacttatgtcgcagagcgcgtctgaggcagcaggcagccaacaagacgaaccagaaccgcggaccggcagccggggctaccttactgaggggggtctgccaccgataatcaggcgcagcatgcgaaaagcgggcactgagccgccgaagatagggcgggagacttcgcagtccacaatgggcacacaatacgtcctgaaaggcgtggatgtattctcgcaacagcgaataatggggcaaaggcggcaggcgccctcgacggtcatcacggaaatatccgcagtgcttgtggcgctgcagcacgggaagttctcgccggctacactttaagagagggcgcttaaaggtaaaaaaggggcgctgcaccgatcgtagcggaagcatcgcccaccgacggcagaaatgagcgcagatattcctatcggaaatgcagaagtttcaaatccggcgtttgggtagaagttaaagcagtcccgcgtggctaggctagaccctactgggaactggtaggcaaccgttatgctcgaatcgtatgcgttatgcaaggtgctgccgcatgcgtcgtttagaaaccctataggatgaagtaacctcggggactaaggctctgtgcaggccgactggcgaacaaagaaaaggggcaagccgtagcaagccccctaatttgttgcacaagcttcttgcacttgttaacggttggttcatccacaaaagcggactccccaaagttccccgttctccattcggttacagccaacacgaacaattgacctcatgcactccagaaacatatcacttctgcagtactaatgcaagtccgatttcaaaaggatgcatgcgcggaaactagtttgcctaccaagttatcctagcgaaatcagcacatagcataacaggagcctgtaatgagcagcagcgttgtcaactaccgactgggactggacatgggcacgaattccataggctgggctgcaatcaagctcgacgaacaaggaaagccctgcggtattcttgacctcggtgtccgaatatttccagacgggcgcagcaacccgaaggatagcacttcagcctcgaatgcagtgcagcgcagacttgcgcgtggcggtcgtcgtgtccgcgaccgttatctcatgcgccgctctaagctcctcaatgcccttgtccaatatggcttgatgcctagcgatcccgaagggcgcaagcgcatcaccgccgatgagaaacttgacccatatgaactcagggcgcgtgcgttagaccgtccgctcaaccccttcgaactcggacgtgccatctttcatttgaaccagcgccgcggcttcaagtctaatcgcaacgccagcggtgataacgacaacgaagccaagcagactcgcgatgccataagtgaattgcatcgccgcattgaagaaagcagatcaaggacgttaggagagtatctccaccgaaggcgcaagaaacgcaagccggtgcgggctcgtcctgacttggggctatatccggaccgcgccctgtatgagcaggagttcgatgctatccgtgctgtgcagcaacttcaccatgccatgaatgatgtgcagtgggagaacttgcgcgaaaccatcttctgccagcgccccttgaaacccgtcaagccaggatggtgtacttttgaggaaggagagcatcgggcggcgcgcgccttgccgctattccaagagttccgcatgcttcaggaactcgccaatctcactctacatgtcggcgcggaatctgaacgtcgcttgagtgataaacagagagcttgcaccttggaacggcttcaggcaggtgatgacctcaatctcgatgctgataaacataagagaataaagaatactctcggatttccgtccgacaccaacttcaacctcgtcgccggcatccgtacaatcttgaagggagacgaaactacggccaagctcaggaaaccggaaatgttcgacagaaaatggcttgtcctttcgctcgaagagcgcaacgacatagtgaagttcctgattaaaactgacgaccctgaagtcgtccgcgagaaagccgtcgtagaatggggtttgaccgaagaacaagcggtcgccgtgtctaatgtgtcgctcacgagtggatacggaaacctgagcgaaaaggctattcgcaagatcctacctcacctagaaatagggaagggatactccgaggccgtacaagccgccggttatgaccatcactccgactttcgcagcgaagaggctcacgataatctcccttactatggcgagattctccctcgagccgtagtaggcgcgaacccagataaagacccgaaaagcgacggcgaagcggcacactacgggcgcatcgccaaccccaccgttcatataggcttgaaccagctgcgtcgcgtggtcaacgctctcatcaaaacctatggcaagcctgaagacattgtcgtggaattggcgcgagaccttaagacgaaccgcgagcagaaacggcgggatgaccagcgtcgaagagaaggcgtagaccgcaatgagcgcctcaccgagatgctaaaatccgccgaacaatccgtatcaggggaaatccttcgcaaactccgcctatgggacgagcaaaagaaaggctcgctccacatctgcccatatactggcaggaacatatcttttgagatggcagtttccgcacaaactgagattgaccatattctgccgttctcacgcacccttgatgactcaatggcaaataaggtcgtgtgcatcgccgcagcaaaccgagcgaagggcaacaggacgccttacagagcattcggagacaacccgcccgggtacgactatgagcggataaaggagaatgtcgccaacttcccccataacaaacgatggcgcttccagccggacgcgatgaatcgcttcgagggcgagaacgacttccttggccgccagctcagcgaaactcgctacctgtccaggacggcgcgaacctatgtggcgtacctctacgaccaaagaggtgagggcaagcagcgtgttagagtaattcccgggcacatgaccgctttgctcagacgcggctgggggttggaaggcatgcttagcgacaatccggacggcgaaccagtccgaaagcagcgcgacgaccatcgccatcatgccatagacgccttcgtagtcgccaataccacgcaaggactgtttcaagaattttcccgcgccgctggttcctcatatcagaacgctgaggaaagacttgctagtttgataccacctccatggaacggattcgacataaacgaactgaagcaactcctcgacaatatcgtcgtatcatacaggcccgaccacggtacacgcggcgcagaggctcggggcgcaaccaccggacaactgcacaacgataccgcctatggcatcgtcgaactggttgaagatgggcaatccgcgatagtggttcgcaagcctctttcgtcaatcagccggaaagcgttaaacgatgtccgagacactcatctaagagccgcgctcataaatctctgggacgaggttggcggtaacaaggcgcgatttgccgaaagagcttggtcagaaggcgttgaggtgaatggacgccggcaaaaagtgcgaagtgttcgcgtgaaaggaaacctccgaattattccgattagggacagagttgggaatgcgtataaaggctatctgcccggcggcaatgaattcgcggatgtgtggcagatgcgagacggaagttggacgctggtagtcgtgccgactttcgatgcgaatcagcctgattttgatatagaaaagttccgccccactacgtctagaggccagtacaaagggaagcccgacccggcggcaaagcgactgatgcggcttcaaatagacgacatgggagcgttaggcgaaggcacggaacgccgaatcgtgcgggtcaggaagatcacaaacaatgctcggcaaggtgggctggtagtgttggatgaccataatgaggccaatgtccccgagcgcgtaacacgggatgctcgcattagaaaggattctggcatagacatcggcatgaaagaggaagtgtaccctgcttcaaaactccgcaggtttggcttccgcaagatacatgtggacgaaatcgggcgcgtccgcgacccaggacccaagtcatcgtgataggcagagtaatagaaattgcgaatgatgggcggcatctggcgcgctcgcgtggctttatgacggtatcgagcgacggtaatgagttagggcgcgtgccgctggacgacatcgccgtccttctttgcagcgcgcgcgggcttacctactccaacggattgattaccgaactttccaagcgcggcgtcgccgtagtcctatgcggttcccactacttgccggtcgcatggatatggcccattgaaggcaatcatcgtcagacgctgcgtatgcgttgccaactagaggcgtcaaagcccctgtgcaaaaggctgtggcaggccatagtcaaagagaaagtcaagcagcagagcattacgctggaaatgctcaagataccgagtggcagcctaaaatccctcggccgtcaagttcggtcgggagacccaagcaacgtcgaagggcgtgcggcgcgactgtattggcagctcatatttggcggcgacttcaagcgagagcgcttcggacccatgcccaacccgctgctcaactacggttacaccgtgctcagggcagaggtcgcaagagcaatcgtgtcctgcggattgcatccgtctatcggcatccatcaccacaatcgcggcaaccccatgtgcctcgcggacgacctcattgagcccttccgtccgctagtggactacactgttgccaaactgctgcaactgggaactcaggaagtggataacgaagccaagagcacgttggttggagtgcttgcgattgacatgaacacggatagaggagtttcacctgtacaattgtgcatcgaacgcgccgctcagtcgcttgctcaatctttcgaggacaaaaagccttctctcgtcttcccttcaatcccagtggtggaatcctgaggacgcacgatgttgagcggctacaagctaatgtggatgttagtgctctttgaccttccagtcgtcaccaagacggagcgcaagaacgccaacaagttccgcaagttcttgcaggaccagggattcgacatgtgccagttctcagtttacatgcgcttctgcgccgggaaggaacagacgcaagtctatacacggcgagtacaatccgcgctcccgccgtccggcaatgtgcagattatatacataactgacaaacagtatgagaatatagtcagtttcagtggccctaggcgaaattctccaaacagaaatccggagcagttcacgctattctgacaaccaaatctcgcgtttttcctattttgcctcccaaatgcgcctgataaccacctactggagcggctgggcagagtgtagccgaatggagaacggggaacaaccgcaacacgcctaagtggtccgccgtgcccgtcaatagtgtagccgaatggagaacggggaacaaccgcaacggcatcggcaaccacctcgtcttcgccccgagtgtagccgaatggagaacggggaacaaccgcaaccaagacgctgggggccgtgccaggctacgcagtgtagccgaatggagaacggggaacaaccgcaacttgttaatggcctggccgtccgcaatccaagtgtagccgaatggagaacggggaacaaccgcaacacagggggggcttggtgcgtcgcgtctgcgagtgtagccgaatggagaacggggaacaaccgcaacatgatgcagccagacgggcagtgcagatacagtgtagccgaatggagaacggggaacaaccgcaacactgatgactgcaacgcgcgatccgtgcgagtgtagccgaatggagaacggggaacaaccgcaactgtacgaacagatgggagtgcagcccggcaagtgtagccgaatggagaacggggaacaaccgcaactgtacgaacagatgggagtgcagcccggcaagtgtagccgaatggagaacggggaataaccgcaactccacgctgccgggcgtctcgaccgtgacagtgtagccgaatggagaacggggaacaaccgcaaccgtattcaggccgagcagtccctccgccgcgagtgtagccgaatggagaacggggaacaaccgcaacacctgctggttcgccccacgacagagccagagtgtagccgaatggagaacggggaacaaccgcaactaccaggcggccgtcatccggctgaggcgaagtgtagccgaatggagaacggggatcaaccgcaacttatttagttgacgggtggcgccgccgaagtgtagccgaatggagaacggggaacaaccgccattcgctgagaatgctcataactcctcccagacccctactcaacttggctgcgagcatagggcgttcttggcgttggcggctgtaggtcgttagtcatgcagtcctttgaacctccgcacatgctgtgccttccactccaagagaggttggacctggattcgtcggtgcagttcgatatcgtcggtcaagaccgttgcgtcgacttctcctttatcaagcaggaggttgagaatatctcgttcggcgtcgttgaaaggcagcaacgccgccagcacgttccggcactcgtccaccaagtaattcccatatttgatcgcgtctgcaccagtcacctgcccgatttggagtgccgggaggagttgattgtacaattccgcttcgtccaacactacgtccgtcgctgagacggtacgccaatctttccggtcaatcgcaccatatacagcaaagacagttctgagtcgctgtatgtccagtccgtcgatggaaaataccaaactgccgtcaaacaagtccctggctttgcggcggaccagcagcgcagccaattttttgcgccgacagttcatgaatatccactacgggtatcgctttcgcctgccaccctgccaagaatgcgagtccattcgggttatgggccacagtggtacccgaagcatatagttcagatccacgtcgattccactcctctgcccggaggacgttgcgtaccgcagatgccacttacctcccgcatgctctcttggggcttcccccacctcaaagtcctcccgtccaaatttggcccgcatcgattcctcaatttgcggacgctcctcaagcatgccgtccctggactcggaccccacgtaattcaggtcgatattcgccgacagtcttggcacgtcgaacaggaacaggtttaatgccgttccgcctttgaggacgagctttccgcgcagaaaggggtggctgtcgaggtttcccagcaaggccagaggatgagcgaccctctccagcacatctgggcggaatcctgtcgactccgcttcggcttccagcttttccagggatattttcatatcacctccgaccaagatcgctcggctacttccaccggtactatcaggttccagtcggacataaggatgcctgacactcgccggttccggtccagataatgaggtcgcttcggacgcctttcacgaagcgcctggatatagcgctcgtcaaccatcagttctccgcggtgctgctcaaggaagacccccactttcgaggccgttgtagcattgtccagcagcagcgtgtactctacgactcgatccaggtcgaagaactccaccgactccagtgagcgccatacttcttcccatcctcccgagaagtgcgggcggtccaggacatccaccagagtgcgctcaaggctggcgaccttgatagacatcccggctctctcacgagtcagcacgtcgaaatgttcctttccggcgcggagaagcgcctctgggaatttggttccgcggaatacgtgggaacgaaacgccagtgtcttcaacggccgcgacgacatgtagctgacatgttgccagaccgagtaggctcgaccgtggaactctaaggccgtatggtgagacaggacggcatctccagtcagcttggcggcaaccaggtaagggtccaccgggtaagtgtcgcaagtttctcctggtgggatgactgcgaacaacccacggcgcactcggacgaggcgttccgccttcgtgtggtagctcacgagggattcttgcgtccgcgttcccacctcaccctttgaagacagatgtgcagccagctccccgccggtaaacacctgatgccgtcggaagaaggcttcgtgtttggtagcaggcatgattgattaacttacgagtaatccaagataacactgtgggtatcaggagtatatgtcattatatctggcagctattctgacaaatacacgagttatacatatagaagccacgtgatacaggtgacattgtcaaccaatgcgacgtagatcaccctcagtcagcgttcaattatcagaaatagtcctctatgtaacttgacacctagtattttagttaataaggtagataatatataaagtttctagttgcttagttaaccttggatgttttgttcgatgtcaggtgaatactcatgatagttgccgttgcaggagaaaaagggggctgtggcaagacatcactcgccgtgcatctctcaggctggcgcatgtgtgccggtagagacgtgatgctcgtggacgccgaccgccaaggcagcgccagcatgtgggtggattccagggtggaacggaagttgccagctccatcgacagtcaggcaattcgacacgggactaagacgtgccgtcagagacctcgcaagacgctacgaggacgtagtggtggacataggctccggtgacggcgcggcgatagaggcggtgatgcgagtggctcacttcgttttagtcccggtgcagccgaacggcatggatgtctggaccatcgacctcctggatgaaatggcttgcgatgccctggacgtaaaccgtgaactaactgtctgctccgtcatcaatcgtgcatccacacaccatgcaagcaaggatttgctcgcagcacaacgagaactactaaggtttagagacgtcaagcactcagaactcgtgataagagagcgaacctccataagaagagcagtgccgttcggactgcttattgacgagtatagaccgctcgacccgaagggcatcggagagcttcgtgcagtcttcgagtatgttttcagatagtcttccaatccgcttgacgcacccaactcataaggaacgaaacgatgaatgagataaatatgaggccgcctggcggcagagaccgcaggcgagatcgaagggcaagcggcttcccggcgaggaaagggcccacacggactatcgatagcgacggagatatatatcgaaagctcggcgtctccgtctctgaggagttgttcgaccaaattagagtcgcggccgctctggagaaggtctccataagagaattcgtcctacgcccgctgatacccgaagttgagcgagtctatcgtgaacatgggctggactagtgcaacgacgtaggcatcttctatgaccgccgaatccctttcctccatcctacagcgcataatgtcacaacgtgaagctcgtttacaggcggcaggcgaacccgcgcctgaccctcctgcagatgctacctcggcaagctgccctgactgccatggacacggcctgctggaggctgaccccaacgatcgccgcccggacaaatatcccaagtatgtcccctgcaagtgccagcagccacacttcgaggccgggctaatagagcgacttcaactttacagcaacctcggccatctgcgccgcttcacgtttggcactctcagggaggacaatgttgcgggtggagaagcaaaccttgcgctcttcagagacgcttgtcgcgcagctgcggctttcgcggagaagcccgaaggatggctcgtgctaaatggcccgcccggctccggcaagacgcatctagccgcgtccatcgcaaatcacctgatggaaggccgccagatcgtgctcttcatgtcggcgcctgatttacttgaccagctccggtccggatacgctccgacaagcgacatagcctactccgacatctacgagcgagtcgccgaagcgccgattcttatccttgacgccctcggcacgcatcacgccacaccatgggcgcaggagaagctccagcagctaatcagccaccggttcaatgcagagctacccacagtctttacaacggcatcgaacctgtctgacctcgatccccacatccgagtaaggctggagcattccgggttctctcgtgtggtgccgactgccgctccaagtcccacgcagaactccgtaggaccgtccagactgccgcatccgccgatgctcgcgcgcatgaccttcgagagcttcagaggagaagggaatagagcggacagtgaagggcgggcctctcttcaagacgctctgaaggcggctgagacattcgcctcgaaccctgaaggttggctcctcctgtacgggcctacgggcgttggcaagacacatctcgcggtcgccatcacagcacggctaatagaggcgggacgccagccatactacgtcaggacacagcagttgatacgccaactaggtagcacgttcgcccgggaaagttccctgaacttcgacaggttgtttgcagctgttagtgacgctcccttactcatcctggatgacctcggcgccgagtcggatagtgactggacaagggcgacactacaggacctcattacgcaccggcacgacgcgcgtcttcccacagtcgttaccacgacggtgcagatgccgctggaaaccggcccgatcgccacgaggatatgcgatcgctcattgaccactatcgtccgcatcagcgcgcccaactatcgcatgaagcgctagaccgccccgcttagggcagcctattcatcgcgccgtcacccgggcagtcgtcgctctttcttccgtcaggacagaccgtatcgcgccactcggcgtcgcgcgtacccgaaaccctgtcgaactccgcgcccgtgaggtctgtcctgacgaacttcgcgttccgcacctccgagccgttgagaaaagtgtcttcaagccttgcgtcggtaaagtccgcgttgcgcaggtcggcgttgcgaatccttgcatcctccagtcgcgccctgacgaacaccgcccgctgcagttcggcgccgtcgaacagtacgtccagcaggacaacatccgtgaattccgctcgaaccagcctggcctgggtgaagtcgatgcttctgagcgtcaagccggtatagatcgtctcccgcaggttcgcctggctgaagtcggtcgtcttgtcaaagacgactcgcgtcatgttggcttcctccagattggcctcacccaagttggctccggtgaagtccgtgtcggtgaggttggcgtcctcgaagttcacgcgccggagggaagctccgttgaagttgacccgatatagagtggccgagacgaaggaagctccatcgaggaccgcgccttcgccaaacgtgctgcgggacaggtccgtaccgtagaagctgacatccagcagcagcgcttcagccggccaggtcgtgttgtgcatgatcgctctgtcgaacgagactacccgcgacaggtcggttctgctcaggtccacgtttgacaggttcacctggtccaggatagcgcccgacagagacacatccttgagaattgcgtccttcaggttcgcctttctgagatcggcgttcgccaggttcgcgccggtcaggtcaagccttcgcaggtcccgcccggagaagtcacagccgaccagcagagcgcccggcgcgggcgtgcaaggtggtggcgtcttcgtgggtgtcggcgtgatggtaggcgtgtacgtagcagcagcggttcccgtcgcggttgcagtgcccgtcgccgtgggcaggggcgtcgatgtagacgtctcagtgggcgtcggcgtcgccgtcccggtaggtgtaggagttctagtcgcagttgcggtgttggaggcagttggcgtaaatgtcggggtcgccgttgccgtaggagtcacagtcggtgtatcggtgggcgtgggagtgacggttggagtgttggttctcgtcgcccagattatcccgtatggcgtcgccgtcggccgaggcgtggtcgtatgctcaggtgtgggagttcgagtcgggctttccgtcgaaaccatcgatgcgacctcatcgcctcccacactttgggcctctgccccattactgccatctgcatgttccgcggtcacggtatcgccgctcgcggaaacatcgccatcagactcgctgatagtctgacagcccaaagatgccgcgaagaccagcgcagcgagcagcatcccgcagagcagtccgggctgcgctcgtcgcctacggccaaatgtcattccttgttctcctccacgaccctggcctgacagaagctgaaggccatgccgataaaggcctcgaagctgttgtgctgccccgcttccagagcctcccacatcctgcgctccgactcctctatttcccggttgaacacctcttcggggagattggggttcaggtaagttcgcgcggtgcaatccgccatccagcgcacaatctcaagttcgttctcgctcgcgtctttctttgcaagcgtgtactgaggcccggcggcctccccgctcgcaagcgagccgcctccggagcgttccttctgagcttgagccacgatgtagtcctggaaagacttcatctgggcttcaagcgcagcgatgcgctcgctgtccaacttcccatcagttgacgcgccctcatcgtcaccgccgcagctcactgccgtcgcaatagccacagtcaggagggtgaacgcgagaaagcggctagtcacccgtatcagctgcaacttcgccatacatttcctccggccgccgaagcggctgcgtcagtttctccgactgattccaaatcaactccgggttaagccccagactcctgagttcggacagcagcagcccgaagctgtcaggcagacccggtttcaggaccgtacccccgctcaggccgttgccgtcgtcgaccataatcgccctggtcagcgcctcccgcccctccacgtcgtccgccttgaccgtcatcatttcctggaggacataagccgcgctgtgcgcctcaagcccccagacctccatttcacccagacgctgcccgccaccagccgacttgccgccgagaggctgctgggtgatcatcgagtatgtgcccgtcgagcgcgcgtgcatcttgtcctcgaccatgtgtatgagcttgagcatgtacttgtagccaaccgtcaccggcctgtcgaagaactcgcctgtcctgccgtcgcaaagtgtctgcttgcccgttatcggcgcggcaagattctcttcgcggtcgagccgcagagcttcacggcgcagttccccgtaccctgtaaagggggagggatccaatccctcctgtttcatccacagctccaagcacacgcgttccgcctcggtcccttcctcggcgccatctccgaatagaagctcgaagtcgtacccttgattcagcgtccacttcctgacccgctcccaatcgacgctgcatacatcatcggcgggcagcctctcggcaggcagaccgccggcgtgttccacgagccatgcctgcgcgaggcactgctcgatctgcgcccacgaggccgagtcgaataccggagtcctggcgcgaaagccaagtctgtgcgccgcccaccccagatgcacttccatcagctggcccaggttcatcctcgacggcacaccgaggggtgacaggatcacatccaccggcgttccgtccggcaggaacggcatgtcctcctgcggcacgacaatcgagacgcagcccttgttgccgtggcgacccgacatcttgtcgccgggctgcaggtcgcgcgtccccgcagcctcgacctcgacgcgcgtgtgacagcctgaaggaagcgaccttgcggcttcactgccatcgtttcgccggattatctttacgctcaccacgcgcccctgctgacccttcggaagcacacgcgagttgtcctggtagcgtatgttgtccgaagtctctccgaataacttgaacagcagc

SEQ ID NO: 3615 - DNA, 14624 bp, synthetic construct
  misc_feature 1..14624: note = Synthetic
  source 1..14624: mol_type = other DNA
gcacgcgcgggtgcaacaagccgtcgatttcggcttcgagatcgtcgaacagagaacccggcccggcgtagaattcgatgcgctcttccatgtgcggtatcgcctcgcggcagaagctgcgcgctctgtcggcggcttgcgcatcgtcgatgcggatgcgcgaggtgtcgtcgtgaacgatgtcgcgcaaagcgcgttcgaccggaacgaggtcgcggcgcagggtcgaaggtatcttggcgtctttgcaggcaaccgcgatggcttcccattccccggccagccgccgcatgtcgtcgcgcagttcatccttggaaaccccgatcgccgccgtgcggaagatgcagccggcgccggacggcagcacgccctctgccgcaagttcctcgccgagggactgaaggcgggcccgttccgcctcgtcctcgatgcgccgggaaagggcaatccccgcctgacagggcgtcaagacgccgagccttcctggcaaggtgacggaggccgtcagccgcgcccccttttcccccatcgggtccttgatgatctgcaccagaactttgtcgccttcgcgcaacaactcgccgatcggcgtttcgaccgcggcatcgggcaccaggcatctggcttcgcgggcgccgagaaaacccgcgcgttcatgtccaatctcgacaaaggcggcttgcaccgcaggcacgacgcggatgacgcgccccagcacgatgtcgccgatcaggctggagccgttcgcctcgctgctgttcagcgtgcgcgtgcagctcagcgcctcaagttttccgtcccggacgacggcgacgcgggtctccgccgcgccgacattgatgaagatttcttgcgacatgaacttcgttatgagcgttccgccgggaagtgcaagcgggttgcagcggctacgcgcactcctccgtcaacgcgtcaatgctatcagacccgtacagccgttccacatgatctggatgccgatgcacagaaggatgaaggccgacagcctcacgaggacattggtgccgctcgagcccaggcgcgcaaccgtcttctcggcgaagcggtagcagaggtagatcgtgatcgagagcgccagcagccccgcaagggcagccgcgccaagtgccgccagatgcggcagatcgacaaggctgggtcgctggctgccgagcgctattgccaccgacatggaaccggggccgaccgtcagcggcatggtgaagggataaaatgtgtcgagcggctgcgtgcccgagccggcctcgtgattgtcggcgttgagcccggaattcaagagccgccagccaaaggccgtcaccaccaggccgccgccgatccgcacgacgggcaggctgatgccgaagaactccagcacatgcgatcccaccagcagcgaacccaagagaaggaaaaagctgttgaccgccacgcgccgggccagcacagaccgctcgtgaccggtgtagccgcgcgtcaggcttaaaatgatcggggcattgccgaccgggttgatgatcggaaacagcgccgcatagatcagaaagaaggcgttgacgaaatcgttcatgatagacctgtttcagcaggcgtaaccgcagccgcgcagcagcaataccgtctcggccagcggcagaccgaccacgttggaataggagccgttgatgtgacgcacaaacatctcggcgagaccctgcacggcatagccgcccgccttgccgatgccttcgcggctgtcgacataggtttcgatctcggcgggcgtcaggcggcggaaggcgacgcgcgtcgtgacgatccgcgtccggagctttccgtccggcagaaagacggcgacggccgtcatcacctgatgctggcgcccggacagcagcttgaggcagaagcgcacggtttccgcgtcctcggccttgggcaggatgcgccgcccgcaggcgaccacggtatccgccgccaggactagcgcctgcgaacgtggattcgtctcggcaagcttcgcggccaccacggaggccttctctgccgccagcctcagtgcatgggcgcggggcaattcgccggggagcggggtctcgtctacggcggcggcgtggatggaatcgggcacgatgccggcctgcgccagcagcgccttgcgccgcgggctttcactggccagcacgaggcggcccgatggctcacttgaagcgataggtgatgcgtcccttcgagagatcatagggagtcatttccaccatgaccttgtcgccggtcagcacgcggatgcggttcttgcgcatcttgccggcggtgtgggcgatgatctcgtgtccgttctgcagcttcacgcgaaaggtcgcgttgggcagaagctcgctgaccacgccttcgaattcgagcagttcttccttgggcatcaggcctctgggttgacggcaaaatccggcccggagattgcacttaaaaccgccaaaagcaaggctttaaggggtcccatccccgggtttatcctttgagatgcagcacgcaaatgagcgtaaaaaggcgccgggccgtgttcaaatccacctcgatcttgcctttgagccgttcgagcaggatcgccgccccctcgtcatgcaggccgcgccggcccatatccagcacctcgatccggcttgaaggctggttggggatggccttgaagtagctctcgcagacctggaaataatccttgatcacgcggcggaacggcgacagcgagaggatcagcttgccgtgcgcctcgccgctcatgaggcggatgtcgaagatgaggcggttcgcctcgataccgagcacgagctgatacggtccgccatgcgaacccaccgggcggaaactgttggtctccagaagatcgtagagcgccacttcgcgttcatgctcgatttcgcgggtgcagcggacggcgttgcgctcctccagcttcacttcggtcagccggaaggaagacgcctcagtcatcggaggaacgcgcgttgaggcgcgccgcaaccgagcgcgcatgcccttcaaggccctcggcttcggcgagcgcgatagcgtcgggtccgagcttggcgatggactgcggcgtgcaggagagcagcgtcgtgcgcttcagaaaatcgagcacggagaggcccgaggagaagcgcgccgtgcgcgccgtgggcagcacgtgattgggtccggcgatgtaatcgcccatcgcttccggagtgtgacagccgaggaagatcgcgccggcgtggcggatcttcgccagcagcgcgtcggtgtccttgacggcaatctcgagatgctcgggggcgatgcggtcggccagcggcgccgcgtccatgagattcgccgccaggatgacggcgccgtagtcgcgccaacttgccgaggcgatctccttgcgcggcagcagcgccagcgccctctcgaccgcagcctgcaccttcccggcgaagtaggcatcatcggtgatgaggatgctctgcgccgagggatcgtgctcggcctgggacaacagatcggccgcaatccaatcgggattgttggcgccgtcggcgatcaccaggatttccgacggccccgccacggaatcgataccgaccttgccgaacacctcgcgcttggcggcggcgacataagcgttgccgggtcccacgatcttgtcgaccggcgcgatggtcttggtgccgtaggcgagcgccgccaccgcctgcgccccaccgacgcggtagatttcgctgacgcccgccaaccgcgcggcttcgatcgacaaaggattgatggtgccgccgctggccggcgtcaccatgacgagacgtttcacgccagccacgaccgcaggaatggcgttcatcaggaccgaactcggatagctcgccgtaccgccgggcacatagagcccgacgctgtcgagcggcgtccagcgccagccgagacgcacgcccgcttcgtcggtgtagaaggcgtcctcgggcatctggcggcggtggtaatcctcgatacggcgggcggccacgtcgagagcggtcagcgcttcgcgcccgcactgcgcgcgcgccgccgcgatctccgcttgcgaaaggcgcagcgtttccggggtcagcttgacgcggtcgtagcgttcgccgagggcgataagagccacgtctccacgggcgcgcacgtcggcgatgatgttccgcaccgaaacggagacatcctcgtcggtctcgcgcttcagcgaaagaagcgcttcgaattcgcccgcgaaccccgcggcgcgcgcatccaggaaacgtgtcatttcagtgctcttcgtcctcgtggcgcggacggccgcgcgcggcccaatcgccgctgacatcggccaatccggcgtcgaggcattccacttccagcaatatcgccccgccgcctgcgaaaacaagctcgaccttgccggccggatcgtcggcggaattgggcgtgaagcgcagcgtcagcaactcgacgacggcatcgggcgcgccgcgcttcagcttgcgcgacttgacggacaacacgccgtcgaaatgcaggcccgtgcgtacgcgaagatcgccgcgcttgccgctttcccacttgaagcggttgaacagcgccgcgaagcgccgcttcttcggcagatagacgagatcgcccatccgcgccacagcgtcctgaaggcgcgtggagatgacttcgaggtcctcgggatcctcagcggtcaagatcggtccgtgtgcggtcatgtgggcagccgttcgatgtcggccccgacgcggccgagtttttcctcgagccgttcgaagccgcgatccagatgataaacgcggttgacgatagtctctccttccgccgcaaggcccgcaagcaccaggctggaggaggcgcgcagatctgtcgccatcacctgggcccccgtgaggctgggaacgcccgtcacgatggcggtgtcgccgtcgaccttgatgtcggcgcccatgcgcagcagctccggcacgtgcatgaagcggttctcgaagatggtttcgcggatgcgcgagacgccctccgccgttgccatcagagccatgaactgtgcctggagatcggtggggaatccggggaagggttgggtctcgaccgaagcggagacgggacgatagccgttgcgggtcaccttaaagcctcgcttcgtggcggcaatctcggcaccgacggatttcagcagatcggccacggcgccgacgagttcgagcgacgtgccggtcagctccacctcgccgcccgcaatggccacggccatcgcataggttccggtttcgatgcggtccggcaggacggaatgctcggccgcgtgcagccggtccacgccttccacctcgatgcgcggcgtgccgagacctgtgatcttcgcgcccatcgcggaaaggcagcggccgagatcgcctatctccggttcgcgcgccgcgttggcgatcacggtgcggccttcggccagcacggccgccatcaaggcattctcggtggcgccgacggacacgaaggggaattcgatcacggcacccttgaggcccttcggagcgctggcgatgacatagccttcggtcagctcgaccgtggcgcccagggcctccagtgccttgaggtgcagatcgacggggcgagcgccgatggcacagccgccgggcagcgagaccttcgcctcgcccgcgcgcgccaagagcggcccgagcacgacgaagctcgcccgcatcttgcgcacgatgtcgtaatcggccgtcgtgccttggagcgtcccggcgcgcagacggtagcgcccgccctgccccagcgaagcctcgcctgtccattcgacatcgacgccgaacagccgcagcagatcggccatgaaggccacgtcggccagcttcggcacgttggtcagaaccagcggctcgccggtcagcaggccagccgccatcagcggcaaagcggcattcttggcgccgctgatcgggatttcacccttaaggcgagccccacctcttatcctgattttgtacataacccctcgggcggttcaggccgggcgttttagcgcgccaagcccttccgcgacagcatcaattgctgcctatttcaatccggttttttgtcttttccagggtaggacggcggcggggtctccccggtaccggcccgggaggccgtttccttgtcttcaagggcgcgggcgcgcgccttccggcgcttcaggttctcgcgcaatgcggccgcaagccgctcccttcggccggcggatttgaccgtttttgccacgccggaagccctttcccttgcgcccggctatgggctatagcagccctcctttcgggcccaatagggccaccggtcgccggagtagcgtagtggtagcgcaaccccttggtaaggggtaggtcgtgagttcgattctcacctccggcaccagtgcctcttttttaggcaacaaatttaatcacaaaatattacgtaactaactgaatttcctgagaaatattgaacatactcgaacatagcgaaacgccccaacgcatcgaaattgttggaaaaatgttggaaagaaatcgcccctctgttggtacgcgttcatattcgtagtacccatttggcatgccgctgaccgatctccaatgccgaaagatgaaggccgattctaagctcgtgaagctttcggacatgggcgggctccagctctgggtatacccgaccggatcgaagctgtggcgcttcgcgtaccgcttcggcggcaggcagaaatccttcgcgctcggccggtatccggcgacaaccctccttcaggctcggatgggccgggacaacgcgaaggtgcagctcgacgaaggcatcgacccgtcgcacgcaaagcggcttgcccgcatcgagcgcgagtttccgagtgaccgtttcgagatcgtcgcgcaggaatacctcgcgaagctgcgccgggaaggccgcgccgaagccacgatgaacaagctcgaatggctgctcgactttgccctgcccgtgcttggtcccatgccagtgagcaccatacgccccatcgatgttctggccgtcctacgcacggtggagaagcgtgggcggtacgattcggcacacaggctccgctcgacgattggggccgtctgccggtatgctgtcgccacggcgcgggcgcaggtcgatccgaccgcgccgctgcacggggcattgacgacgcccatcgtaaagtcgagagccgcggtcactgacccgaaagctgttggagcgctcctacgcgctattgacgggttcacgggccaatttacgacccgcgccgctctcaagctcatggccctgttctttccgcgcccaggagaattgcgcgcagcgcaatggcccgagttcaaccttgaagaagctatatggacgatccctgccgcgagaacgaagatgcggcgcgaacaccgcgttccgcttgcgcctcaggccatcgctctgttgcaggaacttcacggcatcacaggcaacggtccgctcgctcttccgggtgtgcgcaccgtgcgccagccgatgtccgagaacacgctcaacgccgcgctccggcgtctcggatacgcgcaggacgaagcaacatcgcatggcttccgcgccacggcttcgacgttgctcaatgagtccgggttgtggagtgcggacgctatcgagcggcaacttgcacacgtcgagagcaacgacgtgcgccgcgcctacgcacgtggtgagcactgggacgaacgcgtgaagatgatgacgtggtgggccgactatctcgaccaattgaggaaagtaggtcaggtcgtgccgatggagcgaaaatcggcatagccatctagggtaacctgccgcctgcgggttatcatcaatggcaaggttcccgaaacattacccgtcgagtcaattcacgaggcgaccagcgccatttgaagcgcatggtacatcgtcggcgtcgattggcgacacaccttcatacccgagatgcaaaacgctgacgtgcaggcgttcggcgttatccacttgcatttgcatgacataattgacttgcatacgtaacacgctatatacttgtactaatgcaacacaaaacacgtgtgtcgagacagggaacatccgccatggctgcgccgcatgaaaagctcgccgcatcgcttgcggtccttcaaaagctccagcgggaccggcgtgtgttccgctcgaacgagttctcccgcgtgcaccgggagcgcctcgtcaagaacggttttctgagggaagtcgccaagggctggctgatttctacgagccccggtacccaaaggggcgacagcacgccctggttcgcctcgttctgggagttctgcgcgcgctattgcaccgaccgcttcggcgaggcgtggcacctttcgcccgagcagtcgcttctcctccacgccgagaacacgatcatccctgcccaggtcgtcgtgtacagccccaagggcgcgaacaataccatcaagctcctcttcggcacatctatatatgacctcaggcagcggatgcccgccaaggccgacctcgtgtcacacgagggcctacgcctcttctcacccgtcgccgcgctcgtccgcgtccctgaatccttcttcgcccggaacccggtggagacgcagatcgtgctttcgcgcgtcaaggatgcctcggaagtgctggcccagcttctcgacgatgggcgttcggtcgtggcgggtcgcctcgcaggagcatttcgcagaatcggccgcggcagcgttgccgacgagattgtcaccacgatgaagtctgccgggtacgtgatccgcgagagtgaccctttcgctccacagcagaccttcggcatcattgaagctgccgcaccgcccatcgtggggcggcttcatgcgctttgggaggcggcacgcggcaccgttatcgaggccttcccgaaggcgcccggcctgcccacaaaaccggcggactatctttccttcgtggacgacatctacacgagcgacgcctatcactccctctctatcgaaggatacagcgtcacgccgggtctcatcgagcgcgtccgttcgggcgcctggaaccccaaagagaacgtgacggacgccgagagcaagaatgcgctcgccgcgcgtggatactggcaggcgttccagctggtgaagaactcagtggcggaagtcatcggtggaaagaaccccggcgcattcatccgggcagcgcatcgcgagtggtaccgcgagctcttccagcccttcgtgatggctggcatcgttccagcaaccgccattgccggatatcggcgtaatccggtgtacctgcgcggctcccgctacgtgccgccgcgcgcagaggccgtatcagatgccatggccgcgctcttcgagcttctcgaaaaagagccggaaccatccgtgcgcgccgtcctcggccattggcttttcggatacatccatccgtatccggacggcaacgggcgtatggcccgcttcttgatgaacgtggcgctcgcatcgggcgggtatccttggacggtcatccgggttgaagaccgggacgaatatcttcatgcgctcgaccgcgcgtccatagacctcgatattgctccgttcgccaagtacgttgcaggacgcgtgcgctggtccatgcaaaagatggcaagaggcggaaaccgccgtctcttgaagtaacggatttctgacctgtctatgtacacaaaacagaaaggcgggccgaagcccgcctttcgattttgtgcgctaagagctttcgctcaaacgcttgttaacggctgctaggcccggaggctttcgctgacggcgcgcgatctcctatcggctaaatattcgaactttgcgctgcgctagtgtatgcccctagttgcgatgtgcaattcactaatcaggaacgacgggtcggatagccgataggagatcgcgcgccagtcgcaacaccaacgtcccgattcgcaagagaaccgttggttagagatttatacagcacgggtcgttggtgggaaagatatttcttgccccagcgatagaattcgttcatgtttggcttgcctctgggtccaaaccagagcgcaaacggccgtcggtggtgtcctgcagggcaccaccacaactctccggagggctggatggcttaccgccttggtctcgatatcggcaccaactccatcggctggactgcggtcactgtcgatacgcacgggcagcccaacggcgttctcggtcagggcgttcgcatctacagcgatggacgcaatcccaaggacggctcgtcgcttgcagtccagcgtcgcgtgccgcgcggaatgcggcggcggcgggaccgctatttgggccggcgcagcgaactgatggaagcgctgattgcactcggactgatgccgccagacgaagccggacgcaaagggcttgagacgctcgatccctacgaacttcgagcgaaggccgtccacgctccgctaacaccgcatgagcttggccgcgcgctttttcatctgaaccagcgtcgcggcttcaaatcgaaccgcaagaccgacaaggccgaagacaataagctaacggaaaagatcggtgagttgaagcggcgcatcgatgaaagccaggcgaagacgcttggcgaatatctccacaagcgtcgcctaaaaggaaagatggtgcgagcgcgacctgaggccgggttttatcccgaccgcgcgctttacgaagacgagtatgaggaagtccgcaaggtgcaggctccgcatcatctcttgcgaacatcacaatgggacgacctcaaggacattattttctaccaacgcccgttgaaaccggtcgatccgggttggtgcttgctggaggatggtgaacagcgcgcgcatcgcgccctgcccctcgcccaggaatttcgcatggtgcaggaggcgaacaaccttcgcattctgattctcggcgaaccagcgaaacgcctgacgcagcaacaacgcgacaaggtattgaacgatcttcgcaccaagaaagagttgaagctcgaacagcttgttaagctgctgaaattgccttccggggcgcggatcaatctgttcgacgagaaccgcaaagctctgaagggtgatgaaacggcttcccgcctgtcacataaggacttgtttggcaaagcatgggcttccatgccaattgagcgccgctcggaaattgtacgcaagctgatcgaaacggagaagctggaggaaatagaacgtgttgcccagtcggattggggactggatgcagcatctgcaaagaagcttgcggctacgccattacccgagggttatgcgcggctcagtgaaaaggccatcgctaagctgctgcccatcatggaggagcaaggcctcaattatgccgaagctgtggcggaagtaccggaatacggacatcattccgatttccggcccgacacggcgctagacgccctgccttactacggcgcaattctgacgcggcaggtcgtcggtggtgacgccgtgaagccgaaagaggataccgttgcccattacggtcgcatcgccaatcccaccgtgcatatcggcctgggccagcttcgtcgcgtcgtcaacgcactcgtcaaagcctatggcaagccggaagagattattgtcgagctcgcgcgcgacctaaaaatgaacaaggaggataaggacaacgcgcgaaagacgaaccgagagaacgaggtcaaaaataggcggcgcgaggagcagatcagagcatccggcggcgtaccgtccgcacatctgttgcgcaaattgcggctgtgggaagaacaggccttcggctctatcaatgtgtgtcctttcactggcgacgccatctcgtttgcgatggcgatttcggacattaccgagattgaacacatcttgccctttgccaagacgctcgacgactccatggcaaacaaagttctctgcctgcgcgacgccaaccgggccaagcgtgatcgttcgccgttcgatgcgttccatgccaatcctaaaatcggtaagtaccaatacgactatgcagccatcttgctacgggcagagacattgccgcccaacaagcgctggcgcttccacgcagacgcaatggaacggtttgcgaacgaacaggagtttctcgaccgccagcttaacgagaccaaatatctgtcgcgcattgcgcggacctacctggcgcatctttacaacgaaaagaccgaaggccgtctgcgtgtgcgcgccatccccggcaagctgacagcgatgctgcgcggtaaatggggtttgaatgccctgctgggtgaccacaatcggttgggcggggaaaccgacgatggaccggcgcggaaaaatcgtgatgaccaccgccatcacgccatcgacgcatttgtgatcgcaatgaccgatcagcggttgttgaaggcgatctccgatcttaattcggaagccgaccgtaaacgcttgatcgaagcggtaccgctgccgtgggatgactttacacccgatgtgcttcgtccgcatttagaacacattgttatttcgcacaaaccggatcacgggacgttcggcgataagggaaggacgtccggctcacttcacaatgataccgcgtacgggctgatagcgccgggcaagggcggcaactggaaagttgtctcgcgtagtgcgttgaaaggcgtaactaagaaatcggaacttgaaagtgttcgcgacgctgccctgcgcgtagcgcttgaggcgctatgggacgaggtagaaaagtcgggtggcaagccgggggactttgcaaagcgtgcggaggaggagggtgtcgtgctcggcgggcgcaagatgaaagtgcggcgcgcgcgcatgaccgaagaactcaatgtggtccaaatcaaggatcgcaagaccggtttaccctacaaagcgtacaagccggacggcaatgcctttgccgatatttaccaactgccgaacagacgctggacagccgtcgtcgtccagcggttccatgccaaccagcccgatttcaacccgggggaattacgtccgcatccggcagcgaagaaaatcatgcgccttcatatcgacgatatggttgcaatggaggacggcggacgccgccggattctgcgcgtggtcaaaatgagcggtcagacaatcacgatggccgatcatctggaaggtggcgccctgaaggcgcgcgatgccgacagagacgacatattcaagtacgtctccaaatcggcaagcagcttgaaggatgtcggatttcggaaagttggcgtcgatgaaatcggccgcttaaccgatcctggaccacgtcgagcgagcgccggatgatagggcgcgtcgttgaggtcgcgagcgacgggcgccatctggcggtgtcgcgcggcttcatgacgatctcggcagacggcgaggaagtcgcccgcgtgcctctcgacgatatcggcgtgctgctctgtcacgcgcacggtctgacctattccaacaacttgcttgtccagctttcgcagcgcggcgcagcggtagtcttgtgcggtccgaatcatatgccacttgcctgggtctggccgctggacggcaaccacgtgcaggcgctccggatgcgccatcaacttgaagcggacgaacctctccaaaagcgcctgtggcaagggctcgtccgcgccaagattatccagcagggcgcagtcctgaaacgtctcggcaaagaggacggcgccttcgaaatgctggcgcgcaaggttcgctccggcgatccggaaaacatggaagcgcaagcggccaggcgttattggccgctgcttatgggcgatgaattccggcgcgaccgtcagtccggcggcactaacgcaatgctgaactacggttacacggtcttgcgcgcgggcgtcgcgcgcgccgttacctcgacaggactgcatccttcaatcggactgcatcattccaatcgtggtaatccgatgtgtctggtggacgatctcatggagccgttccgccccctaattgactatctggtggtgaggctggcggcaaatggtgaagtggatgttaccccttcggtgaaggccaacttggccctcgcactcagtctcgacatggcgaccgcgcgcgggactaccccagtctcaacgtgtctggagcgcctcgcgatatcgctggccgcagcgttcgaaacaggcaagccggaacttgatttacccgaaccgcttttgccactcgaattgccggagttggggcgcaaggaacagcaagagagctaagaggcaatgcttacgggttatcgtcttatgtggatgatggtgatcttcgaccttcccgtaggaaccaagcgcgagcgccgcgcagcaacgaagtttcgtaacttcctactcgatcagggtttttccatgagccagttctcggtctatatgcgcttttgcggtggcaaggatcaggcggagagctacaacaagcgaatcgaaaaatctctgccgaaaacgggccttgtccaaattctcaacttcacggacaagcaatatgagagcattatctcatttgacgggcgcacccgtgcccagaagaacgagaatccgcagcaatatgctctattctgaagaattagacgcggaacgtttggcgaaagggaccccgccaaacccttttcaatcaagggcttggcggaacatccactttagccgataggaaatcgcgc

SEQ ID NO: 3616 - DNA, 12836 bp, synthetic construct
  misc_feature 1..12836: note = Synthetic
  source 1..12836: mol_type = other DNA
gagcaagaaccagatgtgcgacggcaggatggcccacttccagccttgcaggaagagcacggcgaagatggcgcctgccacgacggtgttcgtgaattccgcaagcatgaacacgccgtacttcatgccaccgtactcggtcatgtaaccggcgaccagctcggactccgcctccgtcacgtcgaacggagcgcggttcaactccgccgagatggccgcgaggaagatgagcgcgcccagcggtgtcaccagcaggaacggcagcgcctgcgcttcgacgattgagacgagcgacatggactgcgcgagcaccgtgacgcccagcagcgccatcaccagcggcacctcgtagctcaccagcatcgccactgcgcgcatgctcccgaacagcgagaagctgttgggggaggcgtaccccgccatcatcacggcaatggtcgagatgccgcttaccgccgcgatgtacagcacggcgatgttcaggtcggccagccacgaacccgcgccgaatgggatgacccccagcacgagcagcgtcggcgcgagcatgaccaccggggcaagcgtaaacacgatgcggtccgcgcccaccgcgatgatgtcctctttcgtgatgagcttgatcgcgtcggctatcggctgaagtacgccgaacggccctgcgcggttcggccccagccgtccctggaagcggccgagcagccgccgctcgaaccacgtgtacatcgccccgatggccatgaccgcgttcgtcaccagcaggatgatcgccatccccgccgccgcgtacgcgacccacgaccactcctcgcccagcaggtcctgcacgaactgatagacgttccggtagatgacgtttcctgcgagcgtctcgcccatcagcggtcaacctcgcccatgttgaagtcgaggctgccgagcgtgacgattgcgtccgccagcttccaccccacgagcatctccctgaacagcgtgaggctcatgaaggacggggagcgcacgtggcagcggtacggcgctatcgtgccgtcgctcaccaggtagaaccccaactcacccttgggcgcttctatgggcacgtacgactcccccggcggcgggcggaacagcatcgccatcgtcgtccgcaccggccccggctcaatctgctcgcagcactgttcgatgatgcggagcgactgccgtacctccagcatccgcacccagaaacggtcatagttgtcgccgccctcgcacgtcggcacgtcgaactcgacgcggtcgtacacatcgtagggcgcagccttccgccagtcccactcgacgccggacgcgcgcaggatgggacccgtgaacgacgccgcgatagcgtcctccgccgagaccggtgcgacccctatcgcgcggctccgcacgatctcgctgtcgaagaccaacgcctgcaactcgtcggcgtagcccggcatgtcgttcaggaaggagcgcagcgcgggccagaactcctccggtgcatcctgtagcacgcctccgatgcgcatgtaggagagcgtgatgcgcgctccgcacagcatctcgaacatgtccaggatgcgctcgcgctcgcggaatgcgtacatcagcgcagtccccccgaacacgccaagctcctgcaggaagaaccccaccccgataaggtggctcgcgacgcgctgcagctccgctgcgatgacgcgcaggtacatcccgcgctcgggaggctcgatgcctaccaggcgctcgcacgagagtacgtacgcctggttgttcgtcatcgacgcgacgtagtccagccggtcggtgagcgtgatgacctgcgtgtactgtcgctcctccgccagcttctccgtgccgcggtgcagatagccgatgactggctcggcatcgaggatgttctccccgtcgaacgtcagcttcatgcggaagacgccgtgggtgctggggtggtgcggccccacgttgacgacgaccggctcggtgcgcatcgtcatcgctagcccccctgcggccacgtgtagggaagtgggggctctaggtagtcccgccgaagcggatgtccctggaacccttcccatgtgaggatgcgcttcatgttcgggtggccgtcgaagcccacgcccatcaggtcccatgcctcgcgctcctggagcgtcgcgccgcgccacacgttgcagacgctcggcagcgagacgtcgtcgcgcccgtacacccgggccttgaggatggcggtcgcgttcctgctgatggaggtgaggtggtagacgacctcaaagtattcgacgtagtcgaccgcggtcagcgaaccgagcattttgtagtcgtgcgcggcgtcgtcccgaaggaacgcgcacacgtccgctatcgcgcttggctccacccacaccgcgctctcatccgattcgacgacggcgtccgggaactgggagcgcagcgactcggcgagtgcgttgcctgccgtcgcggtcgtcatgcgcggttcactccagcggcgtcctgtccgacgctgtaccgcttgatcttctcgtgcagctgcatgatgccgtagagcagggcgtctggacgcggcgggcatcccggaacgtacacatccactggcacgatatggttcacgcccggcacgacgctgtagccctggtagtaaggcccgccgctggtcgcgcagacgcccattgcgatgacccacttcggctctgccatctggtcgtagatgcggcgtacggcgggcgccatcttccacgtgagcgtcccggacacgatgagcagatcggcctggcggggcgtcgcgcgcatcgcctccatcccgaagcgggcgaggtcgaagcgcgacatcgcggacgcaatcatctcgaagacgcagcacgcgagaccgaatgccaccggccacactgccgaacggcggccccagttgagcagcgcgtccacggacgtgacggctacgttgttcgcgatgtcttccggcacctggatggcggggtcggggaacgcttcctgcgcgttccacttcaactgctcgaccgcttcgccctcgatgcggtcgatgtcccagccgggcatcgcctgcccgtagaccgtgccgtgcacctccgctcccgtcaggagagagggcgcggacagagacgcgtgctcgttagggttgaccatggcctactcggcagactcctccccggtgggttaaaccctgcccgatctgggggtgaccacgagcgcgagcatagcacagcaggagggtaagtgaaacgctgcacaatcctttccgtcgctcctgtgaaaggcgccgcgcccacgattcgtcattcccgctccggcgggaatccaggtgcgcgggcagcgcacgcgggtgggggcggggagtggcgctgcacccctcgtcttcatccccttacacggcctgacaaagccccgtcgttcctgcggcgccacacgcgctttagcgcgccctcgcccccaactctccttctgctaggctatgccgcatggacaacgcaaccggcaacatgcagtcccgcatcgacgagatagccgcccgttcactcgacgagtttcgcgccaagcacgaacggcgcgagcaggccatccgcgtctcccgcgaggtcgtgcggacgtcggcgaacgccatccgcgccatccatcgcaacgaactcgacgaggcgcgcgaactcgttgcggcagcaggcgcgctcgtccacgagacccagcagaccctcgagggccatgcagacctctacttcaccggctacacccaggacgcccagaaggaatttgcggaggcgtgcgccgtcttcgcgttcatcgctcgcactgaactcccgctgcccgcggacatcggcgtcgagacgccctcctacctgaacggtctcgccgaggccgcgagcgaactccggcgctacatcctcgactccctccgtcgcgacgacgactcccgcgccgaggagctgatgcgctacatggacgatgtctacaacatcctcgtcgtcatggacttcccggacgccctcacctccggcctccgacgcaccaccgaccagctccgcggcgtgctcgaacgcacccgaggcgacctcaccatgaccatgcgccagcgccgcctggagcgcctcctcaacgaccgctccggcgcgtagcggcgcacgagtgcccgggtgtcgctcgtttgacctggagacgctctggcagagacaatagcctactgccgggttccggcgagaatcacatgtgcggggcagtggtgggccgtgcccatgcccccaggaggtagatgctgatggaaggcctcatactggccatcgttgcgggcgctgtggcgctcgcttttgctgcttatctcgcagtgcgcgtgctcaaggccgacgaaggcaccgagcgcatgcaggagatcggcgcggctatccaggaaggcgccaacgccttcctcaagcgcgaatacaccgtgttggcgggattcgtcgtcatcgtgttcatcgtcctgctcgtgctcggactcgctcgcgaggaacaggagccggctacggcgatcgcctacatcgtgggcgcgattacctctgcgctagcgggcttcatcggcatgcgcatcgcagtcaagtccaacatgcgcacggcgtccgccgcccgcatcgggctcaaccgggcgctccgcgttgccttctccagtggtggtgtcatgggcatcaccgtggtcggcatcggactgctcggcgcggtcattctctggctcatcttcaatgacaaggacatcgtcgccgggttcagcttcggcgcgtccagcatcgcgctcttcgcccgtgttggcggcggcatctacaccaaggccgccgacgtgggcggtgacctcgcgggcaaggtagaggccggcatccccgaggacgacccccgtaacgccgccgtcatcgcagacaacgtcggcgacaacgttggcgacgtcgcaggcatgggtgcggacctcttcgagtcctacgtcggctccatcatcgcgagccttgccctcgctgcgacgggcacagccgtcctgctcggtgtggacgagtcccgcgtcaacatcgaggtcgactccgctcttgcggtcctcccattcctcatcgccgctgtcggcatcgccgcatccatcatcggcacgttcctcgtccgcacgggcgagtcgacgagcatcggcagcctgctctggtcgcttcggcgcggcatcttcgccgcgggcttcctcgcgctgatcggttccttcggcgccatctactggctgttcgaagtggacggcgggttcggcatggacaaggtctggcagttctggggcgcggtcgccgtcggactcgtcgcgggcgtcatcatcggcgtcagcaccgagtactacaccagctacgaatacaagccgaccaagggcatcgccgcccggtctgtcactggcccggctaccatcatcatcagcggcttcgcgaccggcatgctgagcaccgctatcccgctcatcgtcatcgcggcggcagtcatcggtgcgcacgagctcgcagggctctacggcatcgctatcgccgctgtcggcatgctctcgaccctcggcatcacgcttgccaccgacgcctacggccccgttgccgacaacgcgggtgccatcgccgagcaggcccatctcgaccccgaggtgcgcgagcgcaccgacgcgctcgactcgctcggcaacaccaccgccgccaccggcaagggcttcgccatcggctcggcagtgctcacctcactcgccctgatggccgcctacgccaagatcgtcggcctcgaggccatcgacctcctggaagtctcgacgctcgtcggcctgctcatcggcgcgctgatgccgttcatcttcagcgcactcacgatggaggccgtgggacgcgccgcacaggacatggtcgaagaggtgaggcggcagttcaacgagattcccggtctgcgcgagggcaaggaaggcgttcgcgccgaatacgcccgctgcgtggacatcagcacgaagggcgcgctgcgcgagatgatcatccccggtctgctcgccgtcatcgtgcccattgccgtcggcgtcaccccgttcctcggcaaggaagccgtgggcggactgctcatcggcgccattgcggctgggtcactgctcgccatcaccatggcgaactccggcggtgcgtgggacaacgccaagaagtacatcgaagcgggcgcacacggcggcaagggcacggacgagcacgccgccgccgttgtcggcgacacggtcggcgacccgttcaaggacacgtccggcccgtccctcaacatcctcatcaagctcatgtccatcgttgccgtcgtcttcggcaccgtattcgccggataggagcggagagtcatcgagcatcatcggggcggttgcgcgtgcagccgccccgattgttctaaccacggaggaggaaccatggacttcggcataaccggcaagcgagcgctcgtaaccggaggcacgcgcggcatcggctacgccatcgcctgggaactggcgcgcgagggcgtcgacgtagcgctctgcgcccgtgacgaatccgcagcccacgaagccgccgctgagatcgccgccgggaccggcgtgcgggtcgtcggcttccgcgccgacaccggcatagcggaggatgtgatgcgcctcgtggcggatgctgccgacacactcggcggactcgacatcctcgtgaataacgccgctcgcgtcggcttcgcgggaggcccggacaccctcacgcagctgaacgaggagatgctgcgcgacgacttcgccgtgaagatcatgggctacctccgctgcgcccagcaggctgctccccacatggagcgcgccgggtgggggcgcatcgtcaacatggacggcatggccgcgcgcaacgccgcgggcatcagcggaggcctgcgcaacgccgccgtgatgaatttcaccaaggtcatgtccgaggagctcggtccgaagggcatcaccgtcaacgcggtccaccccgctgtgagcaggacagaagctcttgtcgagcgtctcgaacgcaccgccgagcgcgagggcatcacgctcgcggaggcagagcagcgcgccgccagcagcaacgccatacgccgcctcgtgaccgtggaagaaatagcgtccgtcgtcgtcttcctctgctcggagcaggcgggctgcatcaccggtgaggccgtcgcccctgcgggcggcaactcccgcgccgtgttctactagccgccatgccgcgcacgaacgtcagcggcaacagcccctacgaaggctccatcggcttctcccgcgccgtgcggatggggaacgccgtctacgtatccggcaccgtcgcgaccgcagccgacggctcagtcgcgggcgtcggcgacgcctacgctcaggcggtgcagacgctccgcaacatcgaggccgcgctgcaaaaggcgggcgcgtcgctctctgacgtggtgcgcacccggatgtacgtcacggacatcgccaactgggaagcggtcgcccgcgctcacggcgagttcttccgcgacatacgcccagcctccacgatggtcgaggtgagccgcctcatcgaccccgcgatgctcgtcgagatcgaggccgacgccctgattgggctgtaggggcgccccttgtgggtgccctggtccggggagtctcctctactgcaacggcagcggcggctgcaaccacgctccggtcgtgttgacctcgatccgcgtgatccacttcacccactcgaacccgcgcttcccagggacgacgagccgcaccggcgcgccgtgaccgtgcgacagccgctcgcccccaacgtgcgtagcgagcagcagcccctccgcgtgccggagcccgaagcgccggtagtaccccgtcgccgacgtcacggtgatgctcgctgctgcggtctgcggtctggcctgcgccagcaactccccgagtcgcacgccccgccacgtctgcatcgagtgccacccgcccgtgcaatcgagcaccacggtgtcctcttccgtgcccgtcaggtcgtcgtagccgatggtctgcggagcgtcgaccgcgccgtctatcgtgagcgtccacgtctcgcggtcgatcggttcgagcctgtcgtccagccacgacgtggtcgggaaggcgttgcccgtgaagtcgcccgccgcgtaggagccggtgaaacgcttcgcctgcgcgatgcccgtcacgccgtcgatctgcgccccgatctgccacagcaccgtcccggcgaccgccagcccgcccagccgcagcaccgagcgccgctccgcccagtaccgcggacgcagcagcttccggtagcgcgccaggtgccacacgatcatcggcgcgatgaggaacaccagcagcgcgtgccacgtcataccggacgaaccgaggtaggagaactgcccgatgtgcgaccacgccacgcccagcgtgatgtccgtcagtagcagtgagagcgcccccaccgccacccagtcctgccccgtccacgcgccccagcgccgcttgagcggccggatcagatttggcaccttccagaccagcacggccaccaccgccagccctgccgcccggtgtgcgctcgtctgccacgcctgctccggttcagccgcgacgaatgcgtagtagcccgtcacgaccgagcccgtggcgatcagcagcacgaacatgtttgcccacggatgcttcatcgcgcgctccgcctgtccccgtgtctatggtacgcccgccgcgtcgccacggctctctctgtctctccgcatacggtgcgtccgccgctgctagaatggcgcttcgccgcgtgggaacggctgtatggccccctctccctacaaggggaggtaacgcgcttcagcgcgcggtgagggtactctgggggtgggcctgggggtgcctccgaggagagacacagatgacggttctcagcgaccggacgatacgtgaggaattgaagagcgggaacatcgtgatagacccgctcatggagggctgtatccagcccgccagcgtcgacctgcacctcggacgcagcttcctcgtcttccgcaacaaccacgtgccgtacatcgacgtccgcgccatgaacgagacgctcacggagcaggtcacggtgggcgacgacgtacccttcatgctccaccccggcgagttcgtgcttggcagcaccctcgaacacgtcgaggtgcccgccgacctcgtcgcgcggcttgaaggcaagagctccctgggtcgagtcgggctgctgatccactccaccgccggctacgtcgaccccggatggaaaggacgcctcacgctggagctgagcaacgtctccaacctccccatcacgctctactaccgaatgaagatcggccagatatcgttcctgcgcctctccaccccggcggagcacctctacggttcggcggaactcggctccaagtaccagggccagcaggagccaacgcccagccgcatccagatggacttcgacccgccctccgcctgatccccacaatccccgccgttcccccgccattcgggccgtccccgtcattcccgccttcccccgtcattcccgcgaagcgggaatctcgcagccctgcggcttgggtcgggcgcctggtcccctctcccttgtggagacccttgcataactctcgtcccgctcatggtgaacctaaggttaccgtactgcgaacttttcagtgggaagtcgacctgtagtgcagccttcttcccaaactagcgcacggcatcctctacaggcgtcagagcaatgcactcatgccccagtccgtcaggtcgctgctaccgtgagccatcactatgtacgcttgacagcgtagcccgcggatagcacagggagcgagcccgtagctcgctccctcatttggtgcccttcggcttgttaacggttccacacacagccacaaggactgcgtgccccgatctcccaatccggtgtccgttcagaagccttcggttgggtggatagtatactcgtagcctcacggatgcaagcacacggagacgctgaggatgaactaccggcttggcttggacttgggcacgaactctatagggtgggctgttgtccgcctcgatgaaaacggagatgcttgcggcatcctggacatgggcgtccgcatctttccagacgggcgtgaaaactcccaatcactcgatccgctgggtcaatcgcttgcggtgaaccgtcgcatcccgcgcggtcagcgcaggcgccgtgaccgctacctgaagcggcgcagtgacctgctggacaagctcaccgcctgcgagctcatgccgcaggatctagaaacccgcgctgccatcgccgcgctcgatccgtacccgatcagaaaacgggcgctcgaggagccgctcagtccctacgacctcggacgcgcgctcttccacctcaaccagcggcgcggcttcaagtccaaccgcaaggcgcaaccgaaagacgatgagaagcagtcacgcgagaacctgagcgctctcgatattgctctcaaagagagcggccagacactcggcgaattcctcgctccgcgccacgaacagagcgagcctgtgcgcttccgccccggagtgggcctctatccggaccgcgccatgtacgaggcggagttcgaggccatcaggaaagcgcaggaactccatcaccacttgcaccccggccagtgggactcgctgagagacatcatcttcttccagcgtccgctcaagccggtcgaccccgggtggtgcctgctcgaagacggcgaacggagagcggcgcgtgccatgccgtccgcgcaggagttccgcatgacgcaggaggtcaacaacctgcgtatccgggtggacatcgaaccggagcgctccttgaacgatgcggaacgagagcgcgttctccaacgcctgcgggagggcaaggacatcgatctccagaagcccaccaagagcttgcagctggagggctccttcaatcttgcgcgcggtgggcgcaagaaactccagggcgaccagaccacagcgcgcctggcgaaaccggaactgttcggcaagcgctggtttgacctcccgctcgaagaacgcgatgccgtcgccgcgcgcttgctcgatacggaagaccccaaaaccatccggcaggtagccgttaacgagtggaggctgaataaggagcaggccgccagggttgctgacgtgaccctcccggacggccatacgcatctcagcctcaaggccatccgcaacatcctgccgcatctggagaatgggatgcggtatgacgaggctgtgcaggccaggtatccgcaccattccgacttccgcaacgccgaggcgcacgaccgcctgccgtattacggcgttgttctggagcgcgacgtggtcggcgcggacccgaacgcacccgacggcgacgagccccggcgctacgggcgttttcccaatcccaccgtccacctcgggctgaaccagcttcggcgcgtcgttaaccggctgatcgacgtctacggcaaaccggccgagaccgtcgtggaactcgcgcgcgacttgaagtcgaacaaggaacagcgcgagcggtacgtcaggcaacaacgcagtaacgagcatgagaacgaccgccgccgggaagaactccgggagtgcggtgttgagccaaacgggtacgtgatggagaagctgcgcctctgcaactacaagccgcacagggcgcttatcgtcatcagtttatccgatgggagatcggggaggaaccgcaacccgtcgtgctgctcctctcgctcaccctgagtttatccgatgggagatcggggaggaaccgcaacccgcgttcactgcgaacgctgtcacgttggagtttatccgatgggagatcggggaggaaccgcaaccgatccggtcgtcgcggcggggagcgtgagtttatccgatgggagatcggggaggaaccgcaacacggcctaccatgaccaccttgaaccgacagtttatccgatgggagatcggggaggaaccgcaacggatgatgcgcatctgccgctcgtagtagtagtttatccgatgggagatcggggaggaaccgcaactgtgcggtacagcgtgaggacgacggtcttagagtttatccgatgggagatcggggaggaaccgcaactggatgaactgcgtggagaggatcaggtcgagtttatccgatgggagatcggggaggaaccgcaacccgcgtacagcgcatcgatgaagtccttgaagtttatccgatgggagatcggggaggaaccgcaactatcgccgtctccaggtcgatgttgcccaagtttatccgatgggagatcggggaggaaccgcaacaagcacatgcgcgtcaacctgtactcgtgcagtttatccgatgggagatcggggaggaaccgcaacttgagaatcctctgccaccgcctccgctcagagtttatccgatgggagatcggggaggaaccgcaactactcctccatcggtactgaccgcgtgctaagtttatccgatgggagatcggggaggaaccgcaactacctcgtggctggtagcaaccgtgctctcagtttatccgatgggagatcggggaggaaccgcaactgctcacggcgtccacgtcctatacggctcttctactggctggtgaagacggtggagggagtccccgagttcgacacgcagcgcgcgaacaagaaggattgacttttggcttctgtgtgtgtaattgtattacacaaacatggttcgactagagggcgacatggccagagtgcagttggtaatgccagacgctgatcgagatcgcttcgtagatcaggcgaggcgagaaggcatgtccctgagcgcatggctgcgctcagccgc

SEQ ID NO: 3617 - DNA, 12517 bp, synthetic construct
  misc_feature 1..12517: note = Synthetic
  source 1..12517: mol_type = other DNA
agcttcctgacccgctggaactcctgttgggagacgatggcggggaaggcgtcctccacccgcaccgggtcctggccgtccttggcattgattccccagaccaaggtgccggtgtaggcttcgttgacgaggattttgtggatgacggtcttggtccaccggtttccgtgagaggagggaatgccctcggcgttgagggtcttgaggatgtccagggtggtcctgccctggagggtgaggtcgaagatacggcgtaccacggcgtcgtggggcgggttgagttccaggcgagggcgcttcttcacgccgtcctggacgtagagccgccggtagccgtagggggcgtaggtggtcatccagaagccccgggaggcggcttcccgcattccccgcgtgacctcctgcgctaagatatacgtcatccaatcaacaccaaaaagtgcgatactcttggagtgtgggattagaagccaaatgacggttggcacaatagccactcttgatgtccggtcgggccatagcgccggaaaattatcacttctggccttgcaaaaccagcaaacccctgcctttggtgtgtttttcgtgggataatgattatgcgcttctgcctttggacggcgctgtgagccagcgttagcgggggcgaaagagaaacttcgtacccgagcgaataatcgtgaccactcccgagatgaaggcaagggccaacattgaccggctgctgcaacaggcagggtgggcggtgcaagatgttgacgtcctgagcgttcacgccgcctgcggggttgcggtacgggagttccgtttgcgggcgggccacgggatggccgactatctgctctacgtgggaggaaaggcggcgggagtcgtggaagccaagccggaaggccgcaccctaaccggagtggaagctcaatcggagaaatacgggactggcttgccggacaatctcccggcttacgttcgaccccttccattcctgtacgagagcaccggcgtcgaaatccggttcaccaacggaattgatcctcagccccgcagccgaaacgttttctcctttcacaagccggagacgctggcggaatggttgggcgcgtctgaatccttcaaaaaagccggggtggttgagacgcaacgggtctcagaccccggcggggctggttatcgcatcaggcacagcctccgccgccaactgacccaaatgccctccttggacgattccaacctctggccggtccaggcccaggccattcggaacctggagcagtcccttgcggaagcccgaccgcgttcgctggtgcagatggccaccggcagcggcaagaccttcatggcctgcaacctggtctaccggctgattcgttacgccggggcgaaacgggtgctgttcctggtggaccgcagcaacctgggccggcaaaccctccgggagttccaggggttcacggtacccgacgacgggcgcaagttcagcgaactctacaatgtccagctccttcagtccaacagcgtcgacccggtcagcaaggtctgcatcgccaccatccagcgggtttactccatactcagaggtgaagaactggaccccgaaaaggaggagaaatccggcttcgacgcatccgcaggacggcaatccctccagacggtggagtacagcccgtcttttcctatagaggagttcgatttcatcatcaccgacgagtgccaccggtcgatctacgacctgtggcgccaggtgctggaatacttcgacgccttcctcgtcggcctgaccgccacgccttccaagcagaccatggggttcttccaccagaacctgattatggagtacaaccaccggcaggccgtggcggacggcgtgaacgttccctacaacgtgtaccgcattgagacgaggatcaccgcgcagggttccagcatcgaagccgggatgaacgtggaccggcgagaccgccgcacccgcagggtacggtgggaagaactggaggaggaactgccctactcacccggccaactggaccgcgacgtggtggcggtggaccagattcgcaccgtcgtccaaacttttcgggacaaggttaccaccgagatattccccggcaggcagcacgtgcccaagaccattatcttcgccaaggacgacagccacgccgacgacatagtgaacatagtgcgggaggagttcggcaggggcaacgacttctgccggaagatcacctaccggacgacgggtgccaggccggaggacctgatccaggagttccgcaacagtttcaacccgcgcatcgtggtcaccgtggacatgattgccaccggcaccgacatcaagccggtggaggtggtgttcttcatgcgcaacgtgcgcagccggaacttcttcgagcagatgaaagggcggggcgtccgcaccatatccgccaccgaattcaacgcggtgacgcccgacgcggccgccaaggacagatttgtcatcgtggacgccgtgggcgtaaccgagggcgaacttggcgaatcctactccttggaccggcatccgtcggtgccgttggacaagctgctggacctggtggccatgggaaaccgcgacccggacacgctgtcgtcgcttgccagccgccttgcccgtctggaccggcgcctgtcgtccgaagaccggcgggaggtggaagccgttgccggtggcgcatcgctcagagacctggtatccgacctgctgaaggccgccgaccccgacgccgccttggaagcggcaaggctgtccacagggcaagccgaaccgccggacgaggccgttgttgaggctgagcgtcaactgttggaggcgtccgccctcccctttgccacaaacccggagctgcggcagcggctgattgaaattcaccgcgcttacgagcagaccatcgataccacatcacaggatacggtaatccgcgccgaattctccggggcggaggctgaagtattaacgcggtcttttcgggaataccttgacgaacatcgggacgagatcgccgctctccaagtcctgtaccagcggccctaccgccagcatctgagccacagcgacatccgggcgttggcagaggagttgcgaagccctccccgctcctggacgccggcgactttgtgggaagcataccggcgcctggaaacgtccaaagtgagaggttccagccagcgggtgctggccgacgtggtgtcgctggtgcgttacgccctcggccaagaggaagagttggcccctttcgccgatggagtcaatcaacgttttgaaggctggctggccatgcaggaggtggccggccgaacgtttggcgaagagcagcggcagtggctgggggacatcaaggaccacatagcgggcaacgtcagcatcgaggccggcgacctacagtacgcgcccttcgcacagcggggcggcatcggcaaggcgtacgacctttttggcgatgagttggcgggccttcttgaagaattgaacgtggcattggcgggctagttaggaagggactggggattcactggcaacgtcgagagaagaggatttgaaatgcagaccgtatcggaaatcaagcagactatcatggccctgcccgaagctgaattttcccaattgatgaagtgggtatgggaccatgactgggagcggtgggaccgtcagcttcaagaggacatcaaagctggaagactggattctctcaaagagaaagttctggaagccagaaagcagggtgccattcccaatcctgacacggaaatagtcttccgggtaaaggcgtctcccgatggtggctactcggccagtgctgtggggcacagcataatcactcagggcgatgattgggatgaattgatctacatgatgcgggacgccgtgctttgctacttcgacgacggcgaagcgccccaggcgattcgcgtccatctggtccaaaatgaggtcatacccgtgtgagaatgccccgaaatctatccggggtgcagctcgcagcgctgttgcgccggaggtatggctacaatttcgtccggcagagaggcagccacatgagactggtctctaccattatgggctatgagcatcatgtttctgttccgcgtcataacccggtaagggttggcacgttggacgaaattattggccaagtttccgaatatcttgggattggtcaagacgagttgatgcaggaattgttcggcagatgaaccagcaaaaccttcctgaaggctgggctgtcactacgatgggcgaagtggccaccatcgtaggcggcggtacgccaaagacgtcggaaccgagcaatttcgaaggtggggagattccctggattacccccgcagatctttcgggctatggaggcaagtctatttcacgcggcgctagaaatatcaccgtccgggggctaaagaattccagcgcaagactcctgccagagggctctgtattgctgagcacccgtgcgccgattggctacgtagcagtggcatctcaacctgtagccacaaaccaaggtttcaagagtttcgtcctagctgatggtctggagagtggattcgtatatcactacctgctcagtgccagacaattgctcgaaagtcttgggggcggcactacattcaaagaattgtcgggcgcagatgcagccacaatccctttgcccctaccacccctggccgagcaacaccgcatcgtggccgccatcgagacgcagctcacgcggctggacgcgtcgatggcggcgctgcggcgggcgcaggccaatctgaagcgctaccgggccagcgtcctcaaggaagcctgcgagggccgcctggttcccatcgaggcggagctggcgcattccgaaagccgcgagtacgaacccgccgccgtcctgctggagcgcatcctggcccagcgccgcgcccgctgggaatcgcaggagaagcggcgaggcaagtaccgggaaccctcctcccccgacacatccgccctcccgcaactgccgaaggggtggacgtggacgagcttggaagcgatttcagagcttaagggaggcgttaccaaggggcaacgttacacgagcgagcagatgctccgagaagtcccgtacttgagggttgcaaacgttcagagaggctttttggatttggaacgaatcaccaccatcgagacctccgaggagaacatagagcggctgcggctaaatcctggtgacgttctattcactgagggcggcgacagagacaagctcggccgtggctgggtttggaacggtgaaatcgaagaatgtatccatcaaaatcatgttttccgggctcgaccgctctcagacagcgttattccggagttcgtgtcatggtggggaaactcgttcggccaagatttcttttcgcggttcggaaagcaaaccacaaatctggcctcgataaacctgacggttctttcgcaatttcccatcccccttccacccctagccgagcagcggcgcatcgtggcggaggtggagcgaaggttgtcggtggctcagcaggcggagaccgcagtggaggccagcttggcccgggcggagcggctacgccagagcatcctcaagcaggcgttctctggcaggctggttccccagaaccccaacgacgagccagcgtcggtgctgctggagcgcatcaaggccgagcgcgaggctgaagcccaggcgtcgcttgcggccaaaagcaaggccgggcgacgtagcaggagtaaatcggcagcatgacgacctcggttgacatcgggcagaagctctggaactactgcaacatcctgcgagacgccgggctgtcctacggcgactacctggagcagctcacctacctcatcttcctgaagatgatggacgagcgcagccgcccgccctacaccctgctgccggactaccagccgccgcccatccccgagggctaccgctggcccgacctcctgtccctcgaaggcgccgaattggagtcccactaccgccgcaccctggagacgctgggtgggcagcccggcaccctgggcgtcattttccgcaaggcccagaaccggatccaggaaccggccatgctgacccggctggtgcgggagctgatcgacagcgagaactggctgtcaatggacgccgacgtgaaaggcgacgcgtacgagtcgctgctggaacgcaacgcccaggacgtgaagaccggcgccgggcagtacttcacgccgcgcccgttgatccggaccatcgtggacgtgatgcgcccaggccccgacgataccgtatgcgacccggcctgcggcaccggcggcttcctgctggcggcccacgactacatcgttgaccagaatcggtccatggaccgggagcagaaggagcggctacagcgagaagccctatacggctgggagatagtggacggtgccgctcggctctgcgccatgaacctgtacctccacggcatcggcggcgacgagacgaccatcaccgtggacgacagcctgcggacccatccgggcgtcaactatgacctggtgctgaccaacccgcccttcggccgcaagtcgtccctgaacttcgtcaacagcgaaggcgaaacgaagtcggagacactgacagtggagcgttcggacttctgggccaccactagcaacaagcaattgaacttcctccagcacgtgcgcacattgttgaagaacacagggcgggcggccatcgtggtaccggacaacgtgctgttcgagggcggcgccggggagacggtgcggcgtcgtctgctggacgagtgcgaggtccacaccctgctgcggctgcccacgggcatcttctacgcccagggggttaaggccaacgtgctgttcttcgaccgcaagccggccagcgagacgccgtggacgaaagaactctggatctacgacctgcgcaccaaccatcggttcaccttgaaggcgaacccgctgacccgcgccgacctggacgacttcgtggcctgctacaatccggagagccgcgtccggcgcgaggagacggaacgcttccgcaagtttacctacgacgagctgataaagcgcgacaaagtcaacctggacatcttctggctgcgcgacgagagcatggaagacaccgccgacctgcctccgcccgatgtcatcgccaatgaaatcctgtatgaccttcgcgccgccttggagcaactggaggagattgccggagacttggaattgcctgccccgtgagcatactggcagcctgacggaactttccttcggatgagttcctgtctccgcgcgttgcgctgatgaagatggtgacggcaataaatggatctctgcaatcaggttcaaattgtgggactgggccattgggccgggtgccggtgcagaccagccttgaatgggccggtagagggtaatcacgtgcctttccacggaaggcgcgtttggcacattgtgaaccattcgaggagactatagggcgcaggcaagcgtaccgaaaaggcccaattgcttcagttctcaagcacgtatgatagaccttggaaacttgcagctgtcacgccaactatcaagacaggcaggtaggataatggcaactgtggggttggctgagtaacccagggagaaaccctgcacccactctgacatctcgagcgatataatgttcgcccgaccatttagcaacccccacatcctctgaaaattcccctcggagcgccagtgatggttaccaacagagccaattaccgactcggtttagacctgggcaccaattccataggttgggccgctgtgcaacttgacgacaacggcgaaccctgcggccttctggacttaggtgtccggattttccccgatggacgcgaccgtcagtccaagcagtctaatgccgttgaaaggcgggtcgctcgcggacagaggcgtcggcgcgaccgctacctgatgcggcgtaacgacctgatgcaatccctcatcgaattcggcttgatgcctgatgacgaggcgttgcgcaaacaattggagaaggtagacccatatgcactgcggtccaaggctttggatgaaccgttgcggccctttgaattggggcgtgcgctcttccacctgaatcaacgacgggggttcaaatccaaccgcaaggcgagcgcggacgagaaagaagatggccaggtaaaggccgccatcagcgaactgcgccggcgcatcactgtgagcggagcgcgtaccttgggggagttcctcgccaggcggcatggaaagggtgaagcggtccgggcccgcccggaaaagggcttgcgcgccgacagagcgatgtatgaggacgagtttgatgcgattcgatgcgcgcaggaaacccatcagagcctgtctgccgatcagtgggagagcttgcgcgacatcatcttctttcaacgggacctgcgaccggttgaaccgggctggtgccagtttgagtttgagagccaggaaaggagagcggccaaggctttgcccattttccaagagttccgaatgatgcaggaggtcaacaacctacgagttcgcgttggccttgaacctgaacgacgcttaagggccgaagagcgtgatagggcaatgaaacgtctgcgttcggggaatagaatcgacctcaacaaaccgccgcgcgacctgggcttgccatcgggcgcaattttcaacctgtctgctggagggcgcaagtcaatcaaaggcgacgaaactgctgtccggttggcatcgactggcaagaaagctactgcaaaaaaacctgaggaacccgcactgttcggcaaacggtggtttgacttttctcccgacgagcgcaacgaaatcgtccggtttctgcttgacaccgaggaacaggaactcgtccgccaaagggccgtcgctgagtgggggatgaacgcggaacaagccgactccgtggccaatgtttcgctgccttcaggatatggcaatctgagcgagaaggctatccgaaaaatcctgccccatttggagaacggactggtgttttccgatgccgtccgggaagccggctatcggcatcattccgctcttggcaacgcggaggaacacgacacgttgccctactacggccaagccttgccccgtgacgccgtgggcggcaacctgaataaagacgcaaaactgcatggggagccggtggtttatggacgcatcgccaaccccacagttcatattggcctcggccagcttcggaaggtggtaaactggctcactgaagcctatggcaagcctgatgagatagttgtcgagctagcccgggacctaaaaatgaacccggaacagaagcggaatcatgagcagcagcaacgagcaggtggaaaacgcaatgatgactttcggaagatgttggaggagtcggggcgaaacgttaccgccgatgcacttcgtaagctacggctttgggaggagcagaagttaggcgcggtgaaggtctgtccgtacactggcaatccactttcttttgagatggtcatgtcggcccagaccgaggttgaccatattttgccattctcgcgcacgctggataactcgatgggcaatctcgttgtttgcctggccgacgccaatcgcatcaagggcagtcaaacgccatacgaagcccatggcgaccagtgcctggagtacgttaaggacttcccatcaaacaaacgttggcgtttccaagagaacgctatggagcggtttgaaggcgagcacgactttctcgaccgccagctcaacgaaacgcagtacctctcgcgcacagcgcgaacttacttggcctacctatacgacgagcggggcgagcataggcaacgggttagcgttgtgccgggccgtatgacggcattgctcaggaggggttggggtttggaagggctgttgaacggcacggcggaaggtgaaatcccgcgcaagacaagggacgaccaccgacatcacgctgtcgacgcttttgtggtggcaaatactactcaaggactgctgaaaagattcgccgatgccgccgggtcaggattgagggctgcggaggaaagattggcctcgctggttccaccgccctggccgtacttcgaccgtaggcaggtgaaggagcgtctcgaccgcatcgtcgtctcgcacaagcccgatcacggcacacatggcgccacgggaagcacctcagggcgactgcacgaagcaaccgcatacggcatcgttgaacccattgcagacggtcggcatagggtggttcttcgcaaggacctgtccgcattcacagagaaggacctggaccaagtaaccgactctgctttgcaggaggggctgcgccgcctctggaagcaacatggcggtaaaccggcggagttcgccaagcacgccgctgacaccggagtatgtctcaacgatcgtctccagcgagttcgtagagttcgcatttattcagagcgccgcgtcatacccgtcaaagatgctgagggcaaggcgtacaaaggctatctgcccggcggcaacgagttcgcagatatttggcgactgcccgatgagaattggcaaaccgtggttgtgtcaacctttgatgccaaccaggtagggtctgaccccaacgcctttcgtccacatccagccgctcggcgtctaatgcgcgtgcagattgacgacatgggagcgctgggtgaaggcgcaaatcgtcggatagtgcgagttaggaaaatcaacaatcgaagtggaagacctcctaccatagtgttggatgaccacaatgaggccaacgcagccgaaggtaaggacatagaattttctgccaagcaaatgaaggaacaggacttccgttgtgtgcgcgtggacgaagctggccgagtcttcgaccgggggccgttcaatccataaacctctcgtcctgcgtcttgcatcaaattcgtcaaacttgagaagaaccaaacaggcagacctcggcggcgtcaccatacaataaagcaagtcaggctttgttgtggggaaggtgatgattggtcgggttatcgaaatcgccagcgaaggacagcatcttggccgcaaacgcggcctgatgacggtgtcttgcaacggggcggaaacggggcgtgtccccttggacgacatcggcgttctcctgtgtaacgcccggggcctgacctactccaacgaccttctggtccaattagcgaagcgtggcgccgccgtggtgctctgtggcaacgattacctgccggtggcgtggctctggccgctggatggtcaccatgtccaagcgttgcggatgcgttgtcagttggaggctccgctgccactgcgcaagcggctatggcaggcaacggtccgggcgaaaatcgctcagcagcgcataactctggagatgctaggtaaacctaacgtcggtttggacgagttggcccggcgggtaaagtcgggagatccggaaaatatggaagcgcaggcagcccggctctattggccatcgctgttcggtcgcggtttccagagggaacgtttcggcgaaatgcccaacccgttgctcaactatggatatacggtgttgagggcggccacggcacgggcagtcgcgggggtcgggttgcacccgtctctcggcatacaccaccacaatcggtatgacgctatgtgcctcgtggacgacttgatggaacccttccgtccggctgtggattatagggtagcgaagttggtccagtcggggtccaacgatgtgacgccggaggcgaagcagaccttggtgggagtgctggcggcggatatgctgaccgagcgcgggacaacgcctctcgaaacgtgtttggaaagggcggcgcaatcgctggctcaatcctttgagaataaacaggcgtctctgtcgttcccggagcgcatgacgccgaaatagcacggagaatcggcgatgctctcgggataccggctgatgtggatgatggtgctgttcgaccttcccgtgctgaccaagcaggaacgaaaagccgccgcaaactttcgtaacttcctgctggatcagggctttgagatgtgccagctatctgtgtacatgcggttttgcgcaggaaaagaacagtcgcaggtatatacccggcgggtccagtccgcgctaccgccgtctgggaacgtgcagatcatctacttcacggataagcagtacgagaacatcgtaagtttcaacggcgcgacgcgagagcaggcacacaagaatcctcaacagtacaccctgttctgaccccgcacggaagggtgagggcgggccgtagcccgcccctgatttggtgatctcacccgcaaattacggatgatgcttgttaacggttgggtgaaatatcaccctgcggcctccgctctcccattggctagaatttccgacccagtttcggttggtccggggatccctttcttgaaaaacttgattggtcagtgtcatttggccacttcggacgccagttttttggcgtcccgaaaccaagttttgtattcacctccatactgaacgggttagcatcgattttagccgatgggagaacgggggccaaccgcaac

SEQ ID NO: 3618 - DNA, 10383 bp, synthetic construct
  source 1..10383: mol_type = other DNA
  misc_feature 1..10383: note = Synthetic
gtccggcgtcacgccgaagcgttccgccgccgaagggctacctcaagcggctgcgcgacctgtgcgacaagcacggcatcctcctgatcttcgacgaggtcatcacgggcttcgggcggctcgggcatgcgacggcggcggaacgcttcggcgtgacgccggacatcatgacgtttgccaagggcgtcacctcgggcacggtgccgatgggcggctgcgtggtgcgcaaccacatctacgaggccttccagggtggccccgatcatgtgatcgacctctttcacggctacacttattcgggccatccgctcgccgccgcggcggcgctcgcgacgctcgacctctatcgcgacgagggcctgttcgagcgctcgaaagagatggaaccgaagatggccgccgccgcgatgggcctgaaggatcacagcctcgtgcaggacatccgcaccatcggtttcgtggccgccttcgacctcgcccccgtcgagggactgccaggcaagcgcggcttcgacgccatgcgcgtcgccttccacgaagagaacatgatggtccgcgtctcgggcgacaccatcgccttctcgccgccgctgatcgcggaagagaagcatctcgaggaagccttcgacaagttccgccgaacgctcgacaaggtcgcataagaaaatccgcgggcggatgaaacggacaagggacgagcttcagctcgtccctttttcgtatccgtggaggcccacttatccctgaaacggggataagtacgcccgactgtcacacgaacgtcatcgaaccgttacatggagcgcggttatccctgggtgtttaatatcctgtgaaatccccggacggggataaccgggagggagcgcgcggccggcgcgcgccccgaaccctatttcgcggcgacgtgctttccttccgcctgctccagaagttcggccatcacggtcttcgccttgcccgggtgggagaccttcgcggcttcggccaggttcgcgccggcgtcgccgacaacgaccacgccgaccatgcccatcgcgtaatgcggcaggcatttgtagccgtagacgccttccgtctcgaaggtgacggtgacgggcgcattcatcttgcccttgaagggttcggccccctccggcgtcatgtccttgaggctttcggcattgtggctgcggtcggtgggcacgaaggtgacggtgtcgcccttcccgacctgcaggaaggccggctcgaagaccatggcgcccgcctcgccgcgattgagcatcttcacctcgaactcggccgcttccgccggcaaggccccgaacaccgcaagcagggcggctgcggcgaggatcttgttctgtatacgaactttcacttcatatcactcctgtattcctgaaaccggagacctcgcgggcgggacgaacccgcccgcgagccccctgcgacgccccaccgccatgccggagctcagtgcccggccatgctcagatcggcgccatacgtgtcgaagatcgtgctgtcggcgggcccatccaccgcgatctgggcgacgaggccgcgctccatgcgggagagggcgtggtcgacgacgatgtagcggcccggcacctcgaaagtgaggtcgacgacggtcgctccgcccggtgccaccgtgacggtctgcacgtcctcggaagcggggctcgtcagggagccatgggtatagaccttgtcgaagatctcgccgatgacatggaagctcgaggtcttgttcgggccgccgacgccgaaatagatgcgcatggtttcgccgacatgggcctcgatcgcattgtcgcccgtgatggcgccgaccgtgccattgaagacgtagtattccggcttctcgtcgaggagcttgtcgtagtcggtgaaggcctcgcccttctggccgtaggcaagttccgtatagacctcgccctgcatgatatagatctcgcggtcgaccgcgggcagcccgccttccggctcgaccaggatgaggccatacatgcccgcctgaatatggtccgctaccatcggcgtcgcgcagtgatagacatagatgcccggcttcatcgccttgaagctgaagcgggtttcatgaccgggctccgtctgcgtggcgaccgcgccgcctcccggccccgtaacggaatggaagtcgacggagtggaacatcatgctgtcttcggcattcttcagcgtcacctccaccgtgtcgccggcgcgcgcgcgaacaaagggaccgggcaccgtgccgttgaaggtccagaagcggaaactcgtgccgtcggcgagcaatgcttcgcgctcaaccgtctcgagttcgaccttcacgaccgcagcgtgatcgcgcgcgatgggcgcgggaacggcagcgggatcgagggcgatcgacgcgagggcgtcggcatcctgcgcctcttcggcagcagcggtaccggcgccaagagagagaccggcgaggagcgccattgcgcttgccgttccgatgagagcttgcctgaacctgctcatttgcgttctccttgacgctcttgttggggacgctttctgtttcgtccatgacggaaagataggcacgccgcagaaacgcgatttgcgctgcaacaactcggcagcgaatggaccaggaccactcacacggaaagcaggggaagatggacaggcagcggcgcgtggaactcgtcagaccggtcggcctgttttcgcgtctcgacgacgaagggctcggcgccgtcgcggatgcggcgctggaactgcctgtttccaaaggggaaaagctcttcgagcagggagatgacgccacccatggctatgtcgtcggatgggggcagatccgtctcgaccaggtgacgccggacggacagaacgtggtgctgcgacatatgggcccaggcgagatgatcggcatcgtcgcggtgttccggcgcattccctttccggcgacgccggtggtgctggaggacggactggtgttccggtggagcgcggcacggctctccgacctcatggcgcgctttccgctgatcgcgcagaacgcgctcaacgtcgtcggcggccggatcgaggaattgcagcggcggctgcaggaagtggcgacgcagcgcgtggagcagcggatcgcctcggcgctgctccgcctcgccaatcaggcgggccggcgcgtggaggagggcatcgagattcccttccccctgtcgcggcaggacctcgccgagatgacggcgacgacgctgcacacggtgagccgcacactttccgcctgggatcaggaaggagtcgtggagtcgcgccgctccagccatctcgtcatccggcggccgcaccggctggtggaaatcgctggtcaggcatgagcggctcgccgcgggcgatgcctcttcatctcatgctggaaaagcaaaagggcaggccgtagcccaccctttgattttgtgccctaaaggcttgttaacggctgctcggcccggaggccttcgctgacggtccacgatttcctatcggctaaatattcaatcgattggctgttcaccttagcaaacattgattcccataacaacatagttttgactgatggcgttggggggctcaccgatgcgctacagactaggactcgatctcggcaccaactccatcggctggtggatggtgcaactggacagcgacggacacgcatgcggctctctaggcggcggtgtccgcatcttcagcgacgggcgcaatcccaaggacgggacatcgctcgccgtccagcggcgcgtgccgcgcggcatgagacggcggcgagaccgctatctcggccggcgctcggacctgatgaaccacctgatcgccttcgggctgatgcctggcgacgaggcgggccggaaggcgctggaggcgctcgacccttacgcgctgcgcgcggcggcgctcgaccgccctctccttccccacgaactggggcgggcgctctttcatctgaatcagcgacgcggcttcaagtcgaaccggaaaacggacagcggcgacgacgacaaggaaacgggcgtcgtgaaggagcggatcggcgaactgcgccgcctgatcgacaagtccggtgcgcggacactgggcgaattcctgcacaagcgccaccggaagggccgcatggtgcgggcgcggccggaagccggcttctatcccgagcgagccatgtatgaggacgagttccgcctgatccgcgaacagcagcagacacaccagacgctgacggacgaacaatgggaggcgctgcaagacatcgtcttcttccaacggccgctgaaacccgtcgatcccggctggtgcctgttcgaggcaggcgagaagcgcgcccaccgggcgctgccgctcacccaggaattccgcatggtgcaggaagcaaacaatctgcgcgtgacctcacccggcgagcccgcgcggcggctgacgatggaggagcgcgacaagatcctcggacacctgcgcaagaagaaggaactgaaactcgactccatgctgaagctgctgaagctcccttccggatcgagcgtcaacctgttcgacgaccaccgcaccacgatcaagggcgaggagacggcggcgcggctgtcgcacaaggacatcttcggcgaggcctggttttcgttttccttcgagaagcgcacggagatcgtgcgtaccctgctcgacatcgagaagcccgaagagatcgagcggatcgcgctggcggaatgggggctttccgaggcggcagcgaagaagctcgccggcaagtcgctgcccgagggctattcgcggctgagcgagaaagcgatcgcgaagctgctgccgatcatggaagatcaggggctcaactatgccgaggcggttcaggaggtgccggactatgcgcaccattccgacttccggcccgacgaggcgcgcgatgccctcccctattacggcgaagtgctggcgcggcattgcgtgggcgcggacccgtcgaagccgaaggaagacgaggtggcgcattggggccggctcgccaatccgacggtgcatatcgggctcaaccagatccgccgcgtggtgaaccggctgatcgaggtatacgggaagccggaagaaatcgtgatcgagcttgcgcgagatctgaagatgaacaaggaggagaaggacaaggcgcgcaaggcaaacagcgagaacgaagcggcgaaccggcgccgggaagaacagcttcgttcggcagggacggcgccgtcgccccacctgctgcgcaagctcaggctgtgggaagagcagaaagtcggaacggcccatctctgccccttcaccggcgatcccatttccttcgagatggcgatttcggaggcgaccgagatcgaacacatcctgcctttttcgaagactctggacgattccatggcgaacaaggtggtgtgccttcgggaagccaaccgcgcaaagcgcgaccgtgcgcctcacgacgcctttcacacggacccggccatcggcggacggaaatatgtctacaacgacattctcttccgcgcggacaacctgcccgccaacaagcgctggcgcttccacccggacgcgatggaccggttcgagaacgaggagcgggacttcctcgaccggcagctcaacgagacgaaatatctctcgcggatcgcgcggagctatctcgccaatctctataacgagaaggcggagggccgcatgcgcgtgcgcgccattccggggaagctgaccgccatgctgcgcggcaagtgggggcttgccgcgctgctgccagggcacaacatggccggtggcgaggacgcaccgcgaaagaaccggaacgaccaccggcatcacgcgctcgacgcattcgtgatcgcgaatacgacgcaggggctgctcaaacgcgtggccgaactgaacgcagatgcggacaggaagcgtctcgtcgacgcggtccccgacccgtgggagggtttcgaccgcgaggaactgcgaacgcagcttgcgcgcctcaccgtggcgcacaaggccgaccacggcacgccggggcacaagggaaaaaccaccggcgcgctgcacaatgacacagcctatggcatcgtgggtccgggcaagaatggcaacaccatcgtcgtgtcgcgcacgccgctttcgcgcttcgcaaacccgaaggacatggacaggggactgaccgctatccgcgacaaggcgctgcgcgaggcgctcaccgccgcctgggaagccttcaaggcggctccgccggagctttcgaatccggacgacgaggacagccggcgtaagccgaaaaacccggccatggcttttgccgagatggccgcgacccaaggcatcgaacttggcgggcgaagagtgaaagtgcgccgggcgcgcatgtgcgaggaactcggcgtcgttcccatcaaggaccggaagaccggcaaggcctacaaggcttacaagccggacggcaacgccttcaatgaagtttatgaacttccgaatggaaactgggtctctgtggtcattcgcagattcgacgcgaaccaagcgggctttaattccggcgatttccggccgcatcccgcagcgagaaaggtcatgaggcttcacattgacgacatggtggccgtggatgacggcgggcaaaggcgcgtgctgcgcgtggtgaagctgagcggtcagaaaatcacgctggccgatcacttcgaaggcggagcgctcaagacccgcgacgccgacaaggaagacccgttcaagtacctcgaaaaatcggcaaacgtcctgaaaggcatgggactaagaaaagtcggcgtcaacgagatcggacggctgatcgaccacggagcgccgcgcatcgagccgagcggaaatgccggatgatcggccgggtggtcgaggttgcggctgacgaccggcatctcgccgtctcccgcggctttctgaccgtctccaccaagggcgaggaagtggggcgcgtgccgctggacgatatcggcgtgctgctcgcgcatgcgcacgggctgacctattccaacaatctgatggtggaactcgcgcagcgcggcgcggcggtggtgctgtgcggggcgaaccacatgcccgtggcctggctctggccgatggacgggcatcatgtgcagagcctcaggatgcgccagcaactggaggcgggggcgccactgcgaaagcgcctgtggcaagggctggtgaaggcgaaaatcgaacagcagcgcgccgtgctggaacggctgggcaggccggagggcgccttcgacctgctcgcacgcaaggtgaaatcgggcgaccccgaaaacatcgaggcacaggcggccaggcgctactggccgcttctcatgggtgaggattttcgccgcgaccgaagcgcgggcggcgcgaacgcgatgctgaactatggctacaccgtcctgcgcgcgggcgtggcccgggcggtgacctcagcggggctgcatccctccgtcggcctgcaccacagcaaccgcaacaatccgatgtgtctcgtggacgacctgatggaacccttccgccccatcgtcgactacatggtgacgcggctgacggcttccggcgagaaagatgtgaacccggagacgaaagccgttctcgcgcagatactcgccttcgacatggcaacagatcaggggacgacgcccgtttcgacctgcatcgagcggctcgccttttcgctcgcgcaatctttcgagacgggcaaacccgcgctcgcgctcccccggacgctgctgccgctcgaaatgcccggcttcgaacttcgcaaggacagcggataggacccatgctgacggggtacaggctgatgtggatgatggtgattttcgatctgcccgtgggcacgaaaaaggaacggcgggcggcgacccgattccgcaacgatctactcgatcaaggattcgagatgtgccagttctccgtctatatgcgcttttccggcggcaaagagcaggtggagacctatacgaagcggatcgagagggcgctgccgaagacagggctcgtccagattctctgtttcacggaccggcagtatgagaccatcgtctccttcgacgggcggacgcgcgaaaaggccaaggagaatccgaagcaatatgtgctgttttgaaggatgtttcagacggattccgaccggatgtggcgccaaatccctttatgaatcagggacttggcacaacaccgagtttagccgataggaaatcgcggaccagccgcaacgccccctgatatgggctatactgagggatgagtttagccgataggaaatcgcggaccagccgcaaccggcggcggcggccatcgccgtgctggtccagtttagccgataggaaatcgcggaccagccgcaacgtcttgatcttgtggcagtggtcgcaaagcagtttagccgataggaaatcgcggaccagccgcaacgttatgcacccggtgcacgttcggattcaagtttagccgataggaaatcgcggaccagccgcaactcacgggaacctatctgttacgcggtcggagtttagccgataggaaatcgcggaccagccgcaacaagatgaaccgcgctatcatggcacgcatgagtttagccgataggaaatcgcggaccagccgcaactgtttgggcgcacaggattatgttggaggcagtttagccgataggaaatcgcggaccagccgcaacctgaggcacccgctcacctactcctccgacagtttagccgataggaaatcgcggaccagccgcaacaccgggcgtaagagagcggcttattcgggcagtttagccgataggaaatcgcggaccagccgcaactcaccgcagcggcgcaaggccagaaccttgagtttagccgataggaaatcgcggaccagccgcaacatcgacgaagtgatcgatgtgccggcctatagtttagccgataggaaatcgcggaccagccgcaaccagaccggctcgtcttcgtcgccggtgttgagtttagccgataggaaatcgcggaccagccgcaacaagacgaggacgcggtcgcgttgctggttaagtttagccgataggaaatcgcggaccagccgcaacacgagctgacggaactgctcgagaagatcgagtttagccgataggaaatcgcggaccagccgcaactcgatgtagaccttcgatcctttgcgcagaagtttagccgataggaaatcgcggaccagccgcaacactattagcgcgcgcactaaaggcggtggcagtttagccgataggaaatcgcggaccagccgcaacccttcgtttcctcgggcgcggcagcggtcaagtttagccgataggaaatcgcggaccagccgcaactgcggtcgaaggcgtgtccgtctggcgacaagtttagccgataggaaatcgcggaccagccgcaacttgttccgcgcggtcagcgccaccgtcccgagtttagccgataggaaatcgcggaccagccgcaaccaaccggggattacactgtcagtgtcacgaagtttagccgataggaaatcgcggaccagccgcaacatgccctgcgcttcgcgtgagccaatgcgagtttagccgataggaaatcgcggaccagccgcaactgcgttctcaagtggccaaactctcgctcaagtttagccgataggaaatcgcggaccagccgcaacttttgcaggcgcgcaggcatcgccccgaacagtttagccgataggaaatcgcggaccagccgcaacacaactgggccaagggccggtatgagaaggagtttagccgataggaaatcgcggaccagccgcaacacgcggaatacgttcagaacgcggaacattagtttagccgataggaaatcgcggaccagccgcaactgatcgggcggcgtcctgtgctcggccagcagtttagccgataggaaatcgcggaccagccgcaactacagcgctttcgcctgtgccggggtgaagagtttagccgataggaaatcgcggaccagccgcaacaatacggccgagcgcgacacatcgccaaagagtttagccgataggaaatcgcggaccagccgcaactagatctcgggcttgtggttgcccgacagcagtttagccgataggaaatcgcggaccagccgcaactgatcgggcggcgtcctgtgctcggccagcagtttagccgataggaaatcgcggaccagccgcaactacagcgctttcgcctgtgccggggtgaagagtttagccgataggaaatcgcggaccagccgcaacaatacggccgagcgcgacacatcgccaaagagtttagccgataggaaatcgcggaccagccgcaactagatctcgggcttgtggttgcccgacagcagtttagccgataggaaatcgcggaccagccgcaac

SEQ ID NO: 3619 - DNA, 9252 bp, synthetic construct
  source 1..9252: mol_type = other DNA
  misc_feature 1..9252: note = Synthetic
tggtcggcaattcgctttctgaacatcctcctattgtcgccaatgtgtcagaatagatcaaacgtcaacgagccctagatgaccccagcacgctggccatcaagagtttcggccagctccaggagttcccggtcgagttcgatttccgcagcctgattgacaactggcacatctctgactttcatatcgccgacgcgcggcccagcgtcgaggtcggttacgccagcatctgtccacgcgcggggacaatgtcgctttggtggcgcaatatctctatgagaaccaccccccccgcagttcgagaaggttctccgcgctatgcgcgagcgggtcccaggcgtgagcgatgtagaggcgaagccgaccgaggacggccggctcgttctccgattccaggacggcagtttcaaggatccgttcatcgcccaccatgtatccgacgggacgataaagatgtttgcctacctcgtcctgctctacgacccaaacccacacccgctgctggcggtcgaggaaccggagaatcaactctatcccgcgttgatacggcaactggtggaggagttccgcgcctacgcccagcgcggcggccaggtgttcgtatccacccactcgcccgatttcctcaacggggcggagcttaacgaaatacgctggctggtcaaggaggatggcttcactaccgtccgccgcgcgtccgagagcgagcttctgcagtccctcccgccccttatcgaccgactccagcaaatgctctccagttcggagcgggccgacatcgcagtcggctactttttcgtcagcgggttccaggccgcggccgaccaactgccgcccctgcaaaaggcgcgagtcctcgtcgagcgcaccgaccggcgcgtgctggaggaggtggcgctgggattgcagaagacccagggctggcgtctcaactacgagcgggatgaggtatacaaaggggtaacggaactggtcgagaatcgccgccgccgcgcacagagcgtatgaaaaaggtgtcatttgttgggaccggacatctgagggatttgacaatacagggaaggcataggaacatatgtgcctgaaatgatcatggactagtcgaagtattcctgacgccgaagttcctctagggaggcccgtcatgccatcctcaatcgagtggacagacgaaacctggaatccggttacaggttgtacccgtgtgtcaccaggctgcgaccactgttacatgtacgccctttatccgcgtctaaacggaatgtcagtccgcggctacgagaccaagccggatgatgtgcgtctgcttcctgaacgcctgcagaccccgctgacctggaagaaaccacgacgcgtctttgtcaatagcatgtcggacgtattccaccctagggtaccgttcgacttcgtgctcaagatgtttcaagttatggacgaggcggccgcgcagcgcggccatatatttcaggtactgacaaagcgaccgggccgggccgttgcctggtggttgcaacataaagagcatttccctgccggctggccggcccgaatctggatgggcacttcggttgaaagtcaaaaatatgctccccgactgactgtgttggcccgtctgcctgcccccatacgctttgtatcggcagagccgttgttggatcggctggacctggccgaatggctggagcaaggcgtattgcaatgggtgattgtcggcggcgagagcggcgccggcgcaagggcgatggatccggattgggcgcgggcactgcgtgatcagtcagtcaatgcaggtgttgcctttttcctcaaacagctagggggtgtgcgcaacaaacgcggtggcgaagctgcgactatagacggtaagcattggtgtcaaatgcccatcatggagtaagacacgagtatgactgacagttcttttggtggcccttggactcaacagaaactgcaaatcctcaacctgtatctggacgcgtatacgactgccttgaagaatcaaccgttccggctcatttaccttgatgcctttgccggagaaggttcttggcatcctagctcagcatacgataccgactatgacgactttcgagagttgcatgaaggttcgccgctcatcgccttggaaataacagataaaccttttgacaagctcatatttatggaaaaagatccccagcgttgtgaatcgctcgggaagctgcactcaagatttcctcgccgttgcattgagattcttaatgaagatgccaatgtcgcgttgcccgtgttctgcgaaaacttgagaacacacgaccgcgccgtggtctttctggacccgttcgcaaccgaagtttcctggacaacggtagaagaactggctagcacacaaaaggtggactgctggatattgttccctctaggtgccattgcgcgaatgatgccaaagatgagcgaaccatcggaggaactagccgatcaactcgacaggattttcggaggacgtgagcattggcaggatctgtacagcgcttccgcacaactttcgcttttcgacgatcaacccggacaagaacgagcaggcggtagcgagcaaatcgcccgtcagtatcgcttacgtcttcaatccgttttcgcaaaagtagcgccagcaggacgggaacatagaaactccaaaaactctccaatgtttcagctgtttttcgcggcgagcaacccaaaaggcgccaatattgcggtagatatagcgaaacacattattgataactggtgacgtttgaacatatctgcatcgggtatatgtatcattacaactatgagacatccggttgaatgcaatctgaccagccgagcgattcccctggtacacagatccccggaacaggagctatgcagacgttatccacacagaacggctttaccgtcagcctggatgaactatttcgcttcggcccctgagtaggcgcgccgcaggagcagttcatatgccaaactccatgcagatcgaaagcatagccatcaacaattattgctgctttcgcgactccgtgctgaacgacctgtcacgcattaccatcttggtcggcgcgaacggatcgggcaagtcatcgctaatcgacgtgttcgccttcctgaaagatgccttgacgcagaacgtcgccgccgctgtggcacagcgcggcggatatcatgaattggtcagccgcggacaggcagggccaattgaaatcactgtgaagttccgcgaacggggcgggcagttggcaacgtactggctgaaagtcaaccaggatgaagggcgcagcgtcgttggctgggtcctattgggacttctctttggagttttcagctttctcgttctgatttttctgcccgagaaccggcaggcgatggaggcgcaatccctccagggcggccggtccaagcgctgcccgtactgcgcggagctggtgaggcgggaggcgatagtgtgccggttttgcggcaaggatttggaggtacggcgcgccagctgaaccgcggtcagttcccgttccaatcgccggcattggaaacggcttcactctctcctttctccgctctctcctcgctaagttacagatgttgaagatattgacacgatattgccacgaaaccggggcacaatgacacgccaatgacatatgaatatgatataataggtgattatgccgccttcgtcatcagtgaggagaaccgcgaatgaggttaccgattgtacggaccgtgttggcattagcctaggtcgccgtctcatgggtagcctggggtccaggatgaaagtataactctcaaaggcttgacggaagccgtcgctcagaccactgggcgtgtcgataggcatgacgactgcattgccgccgtcgaaacggctatcgctccaacgccaataccgacaccaacacagacagatacgatggtcagccctcccatgtccggatgaccggatttccggccgttgacacgagccaggacagggcgcctcgaacggggatatgaggtatagacaagggactggcgacaatgccgatatgaatgagacggagagacttgcctatcttactctgaacgtggacgcgagtcagtcgccctttttgacattcattacgcggctgacaactctgaacctggtctcgttggctcatgtttcaccctttgattcctatccttttgatttgggcatccaaaagaaagagacgagccgtagctcgcctcctcatcttttgcaaaagcttgttaacggaaactccccgatctcccatcggctacaaggcaaccgcaacaaactcttggtcaaatcttgcaacattgaaactgtatcacaacccccttcttcacgcaaagaggaataccatgagagctacgaatcatagaaaataccgtctcggccttgatcttggcaccaactcgattgggtgggccgcaatcaccctcgatgatcagggacgcctttgcggcatactggatatgggtgtccggatttaccctgatgggcgtaacccgaccgacaagacttccaatgccgtagctcgacgtgtcgcccgcggccagcgccgccgtcgggaccgatatctggcacggcgcggcgaactgatgcaggcactcatcgagtttggcctgatgccgcctgatccggaagcgcgcgaagaactgcagaggctcgatccttattcgctccgggcgcgcgcccttgcggagcctcttcatcccttcgaattgggccgagcgctttttcacctgaaccagcgacgcggcttcaagtcaaatcgcaaatcgggcggtgaagaggaggaggatcaaaagaaactgggcgccgcaattgaaggactgcgcttgcgtatccaagaaagtggctctcgaacgttgggagaattcctggcgcgtcggcacgcgcagaaagagacggtccgcgccagggaggcgctgggactctatcccgaacgggcaatgtacgaggaggagttcgattcgatccggcaagagcagggggaacatcataatctgtcctcggaacagtggaataagcttcgaaacatcatctttcaccagcggcctctgaaaccggtggatccgggctggtgccagtttgagtttgaaaacagggagagccgggcagccagagcgctgccggtatttcaggagttccgcatcctccaagaggtcaacaatcttcgagtgcaggtcggatcgggacaggaacgcccgctcgcaagagaggaaagagaaggtgctctgaaaaggctgcgatcaggcaaagacatcgacttcagaaaaccgaccagggacctgcggttaccttcagatgtcagcttcaacctggcacgcggcggacgccaaaaaatcaagggagatgaagtcaccggcagattgagcaaacaaggtctcttcggtagtctctggcacagactttcgctagaggaacgcaacacgactgttacatttttgctggacacagaggacccggagtcagtcaagcacaaagccatggaggaatggggattgactgagtcacaggccaaagccgttgccgccgtctctctgccatccggctacggcgacttgagcgagaaggccatccgcaagattatgccgcatctggaaaggggacgtctgtactcggatgccgtaagagaggctggttattcgcaccactcggacttccgcagcgacactgctcttgatcgcctgccctactacggcgagattctgcagcgcgacgcagtcggcgcagctccagaaaaagatccgcttgaggatggagaagaagctcgttatggtcgctttcccaatcctaccgttcatatcggcttaaaccagctgcgccgcgtcgtcaaccgtttgattgaggtctacggcaagcccgaggagatagcggtcgagcttgcccgcgatctgaagtcgaatcatgaacaacgccgcacgtaccagcggcggcaacgggaaggcagagagcggaaccagcgcttcactgaaatgttggaatcagcggcacaggaatcgtcccctgacatcttgcgcaagctgcgtctgtgggaggaacaaggaccgcctcaggctcgcgtctgcccctacactggccgtaacctgtcgtttggcatggtggtctccagccagaccgaggtcgatcacattctgcctttttccaaaacattggataattcgatggccaataaggtcgtctgcatagccgccgctaatcgcgacaagggcgaccgcgctccttatgaagcattcggtcacagcccgccaggatatgactaccggaagatcctggatgtaaccgccaaattcccgccgaacaaacgctggcgattccgggaagacgcaatggaccggtatgaagatgaggctattttcctggaccggcagttaaacgagacgcgctatctttcccggtctgcccgcgcctacctggcgcacctgtatgatgagaagggcgagggacgtcgacgcgtcatggcaacgccagggcatctgaccgctctgttgcgccaagcgtgggggctggaaggaatgctgcgcgccgctcccgatacaggtgagattatccgcaaacagcgcgacgaccaccgccaccacgccatcgatgcctttgtcgtagccaatacgacagaggggttgcttcagcggtttgcccgtgccgccactaaccatcatttcgatgtggaaaggctgggctccctggttccggacccttgggagggcttccacggcgaacatttgcggtcagtcctggatcgccttgtcgtttcctataagccggatcacgggatacgcggcgttcagggcaagacaaccggccagctgcacaacgacacggcctatggcttggtggagttgtcggaggagggcccgtcacgggttgtgcggcggaaaaagctgtccacgttgaagaggaggagcgaactggacgcggtgcgcgattgcgatatgcgtaaggctttaattgagttgtgggagcaggtggagtcggagctcggagcgaaggacggcaagagatccgaagctcctgccagattcgccgaacgagccgccagtgaaggggtgcttctgggtggacggcgccagatcgtgcgacgcgtacgcgtcctggagaaagagactgtcataccaattcgagatcggtcggggaggccgtataagggctataagcgcggcggcaacgagtttgcggatgtatggcgaatgcgcgacggaagctggaagatggtcattgtccctacattcgaggccaatcaacccgacctcgacctggaaaaatttcgtcctggagacagatccggcaggaaagatcctacggccaaacgactgatgcgtcttcatcgcgatgatatgggcgcaattggcgatgggccgggccgccgtatcgtgcgcatacggaaaatgtggactgagagaggggggcgtagccttgtcgttatggacgcccacaatgaggcgaatgttgacaagcgggccagggataagggggataagatgaaagaaagcaagtactccgcccgtcaactccagcatagcggctttcgtaaagtgggtgtggatgaaatcgggagagtactggatccggggcagctcagatcatgatcggacgggtaatcgaaatcgcaagcgcggggcgtcacttggcccgcgaacgcggcgcaatgacagtcttccatgaagatgttgaggagggtcgcgtgcccctggacgacatcggcgtcctactctgcaacgcgcacgacctgacctattcaaacgatctgatgatcgaactggcacgccgcggcgcagccgttgtactttgcggtgagaattatcttccggtggcctggatttggccgctggaaggcaaccacatccaggcgttacgaatgcgacgacaactcaatgcgtcgttgccgctatgcaaacgactgtggcagtctcttgtaaaggcgaagattacccagcaggagaacaccctggaattgttaggagtatcttccgagagtttgggtgagttggtcaaacgggtacggtccggagacccggacaatgtggaagcgcaggcagcgcggcgctactggcctttgctgtttggcgacagtttccgtcgcgaacgtttcggacctatgcccaatccgctcctcaactacggttatacggtgttgcgggcggcgacggcgcgtgccgttgtgtcagccggtctgcatccttcgctaggcatccaccaccgaaaccgtaccaatagcatgtgccttgtagatgatttggtggagccgttccggccgttggttgattatacggttgccgggcttgttgcggcggggcggcaagacatgagccgtgaggttagacgggatctggctgcggtattggcgatggacctggacgccgagcgagggacatccccgctgcaaacctgtttagagcgcgccgctcaatcgctggcccagtctttcgaggtcgggaaaccggatctgattctccccggcgggccactcttcagcgcagcagacgcaatgaacgcctgaggaacgaatcttgctttccgggtacaggctcatgtggatgatggtgctgttcgacctgccgacacttacggagaaggagcgtcgggctgccaccaagtttcgaaactttctgctggatcagggtttcgaacgatgtcaactgtcggtctatttgcgtttttgcgcggggaaggaacagacgcaggtctacagcaaacgaattcagaatgcactgccggattcgggcaatgttcagattctctgcttcaccgacaagcagtacgaaaacattgttacttttcaaggcccgaaacggcagccagctaacgaaaatccggtgcaatataccttattctaacactgccagtgccactttttcgtcggttgccatcggttgatctgaacctgtcaccaagccagatcgaccgacatctattgtagccgatgggagatcggggagcaaccgcaactccatcggcaccattacctggacgcttcgattgtagccgatgggagatcggggagcaaccgcaactgggcaaacagcggctacgcttcgtccttattgtagccgatgggagatcggggagcaaccgcaactctcgatctgatcgatacgatcagggaggattgtagccgatgggagatcggggagcaaccgcaactggcgaccgcctgtcaagcccctgcttgattgtagccgatgtgagatcggggagcaccagcaacacccacacctcggattcggggtgcggcggggattataatagacggctgcgcg

SEQ ID NO: 3620 - DNA, 7315 bp, synthetic construct
  source 1..7315: mol_type = other DNA
  misc_feature 1..7315: note = Synthetic
tccagccagaagatcatcgccgggtcgcgtgacagctccatcaggatcgtccgcatgtccgtcagtcctacctgcctgaacatttcgatctcagaatacagcgacggcccgtgctcactcttcccccacgccaccgggaagatgtggtgcaggaacagactcatcttctcctcgagcggcctctgcgtgttggccatcctgtacagccacttgccaacgtggacagccaccggctcaccgccgtagtacctgtcgatgtacgactgatccaactcctcgaatcgctccggggtgaccaggtcgtcaatgatctcctcgtacgtcttctcagccgtcaatctgtccagctccgacggcgtcgcgccaaatccggcacgcctcatcaggtgtgcgacaagcccccgatccgatttcatctcgacatcctcccgccttgaagtttcactacgtcagcgacactttctccatcgtatctgatggtctcgtattataaccccaaaccagcacggcgtgtgcacttttgcactgcccactgcgatgatacggtgatacaatgctagtaatatgatagccgtcggtttctaacctcaacaatgggacggttagtcaaatgattgagatgattttcgcgatgctgggaggtgggttcctggctgcgctggtggcactcgtgataagagtcgcagtccgatacagcgggcgagggatggggaccgttaaagctggacgtcgggtcactcggacggcctccggcgcgtacacggacggagactatatcggcggcggcggatacgcgcggggggattacgtcggcagcggcagtttctgaagctggcggcgctctgaaactcttctattcgcccaagaacctcaagcataccggcattgggatctctgtaacgttccctgttggcgtcagcgctcccgacttcccgtcgatcctgaacgacacgacagtatccgtgtcctggttcgccgcaagcaggaattcgcccgaagggtcgattgcgaagttgcggggcgtccagccctgtgttgactggtgacccacctcggtcagtcgtccagtctcctcgtccaccgagaatatcgcaacgctgtcatggccccggttcgacccgtacacgaacctgcccgacggatgcacatggatatcagccgtcgtgttcgacctcccgaatcccggtggcagcgtcccgacggtctggaaaggggtcagcgcgccgctgtcgctatcgtactcgtagccagtgatcgtgcttcccagctcgttgattacgtaagcgcgccgtccattgggatgaaagtcgaagtgacgtggccctgccccgggttcagtcccaacgtacgctggatcgttctccactagatcaccccgctccagatccagcctgtagataactaccttgtcctgtcccaagtccggcacgtaagcgaaccggttctgcgcgtccaggtttatcgagtgagcgtgcgcctgctcctgccggtccgggttgacgctcgacccctcgtgctgaatgaagcacgacagcgcctcaaggctcccgtcgtcgctgatcggagcgacgcatacgctcccgccgtggtagttggccacaagcagataacgccctgtagcatccacgctcacgtgacacggccccgcgccacccgaaccccggacgtttatcaaggtcagccgacccgcgtccgcatcgatggtgtatgcgtacagcgcaccctgccgctcgccttcgaactcctcgatctccgaagtggcgtaaagccaccgtccgttcggatgcaccgcgagaaaagaggggttctccgccccgctggccgacgccaccggctccagatcccccgtctcccagtcgaaactgcacacatatattccatccgaagtcgtcctcgtgtatgtgcctaccgctaccaggttcgtttgcgtcatcgctctctcctgatggtcacaattcattcgccctgagcttgccgaaggacggtccgcaaactgtcacaactatatgtacagtccactagctgcatgatgcaattgtatgccttgggatccaaattgccaggcagagcgcaaacaaagagaagacaggccgtagcctgccttcttatcttgtgccgaggcttgttaacgggtctccccgatctcccatcggttacaataccgttgaatccccttggcccctaaagaataccagcagtggaatcgcatggcaatgttggtcctccatgacaaatcctaactacagcaaataccgactaggtctcgatctcggcaccaactccatcggctgggctgccattagcctcgacactaacggtaatccctgcggagtcttggacatgggcgttcgcatctttccgtatggccgcaaactcaccgacaagacctctaaggcggttgaccgccgtctggcgcgcggccagcgccgtcgccgagaccgctacctgaagcggcgatcagagctgatggatactctggtcgaatacggcctgatgcccccagataaagacgagcgtaaggcattagaacggcttgacccatacacgcttagggctcgcgcgctcgacgaacctctcagtccatctgagctgggacgcgctctctttcatctcaaccagagacgtggattcaagtcgaaccggaaagcggcggccgacgacgaaaacgaggccaagaagacacgcgccgacattagtatgctgcgccagagcattgaggagagcggagcgagaacgctcggcgagttcctcgcgcggcggcatgaggagcgtgagacggtgcgcgcccgacccgatatggggctgtacccagacagagcaatgtatgaagccgagttcgacgccatcagagaatcgcaggagtcgcatcataacctgacctcggaacagtgggaaaggctgcgcgacatcacctacttccagagaccgctgaaacccgtcgaacctggatggtgtcagttcgagttccaaagcagagaaaaacgagcgtcccgagctctgcccgtcttccaggaattcagaatgctccaggaggtcaacaacctcagactctgggaaggtaacgggcctgaccgtcccttggacgacgacgaaaggtcgcgagtgctgaagagactccgctccggcttggacttgaacctgcaaaagcctcctatgagagcgctcagacttccgtctggcgtcacgttcaacctgtctcgcggcggtcgtacgaaaatcaatggcgatcagacaaccaagaggctcaagaacagatctctcttcggcaatcgctggctgtccctccctctcgaccagcgcaatgagatagtgaagtttcttctggaaaccgacgaccctgagatggtccaccaagaggctgtccagaaatggggactcgatgccgagaatgccgccgccgtcgccaacgtctcactggtcagcggctacggcaatctgagcgagaaggccatccgcaagctcattccacacatggaaaatcgcctgggatactcggacgcggtcgtggccgcaggatacggccaccactcggacttcggtagcgccgaagctcgcgagaggctgccctattacggtgaggtactccaacgcgatgtcgtgggcgccaatcccaagaaagaccctgcggaacacggtgaagtggcccactacggccgtatccccaaccccacggtccacatcagcctcaaccagctctgtcgcgtggtcaatcgccttatcgaagcctacggcaagcctgaacacatcgtggtcgaattggctcgcgacctgaagatgaacaggaagcaaaagcagaactatgaacgtcagcaggggaagggaaaacagcgtaaccaacgctttaaggagatgctggaatcagcgaaggtctccgaagtgaccccaagcctactctacaaactcagactttgggaggagcagggtcctccccaggctcgcgtgtgtccatacaccggcgccatactctcgtttgaagaagtagtatccgccaagaccgagatcgatcacatcctcccattctcaaagacatgggacgactctcccgcaaacaaggtggtctgcatagctgaagcaaaccgatataagggagaccggtctccctatgaggcattcggacacagtccggccgaatacgactaccaggagatcctcgaccgcgccgccgagctgccgggcaacaagcgttggcgatttcaacccgatgccatgcaaaagttcgaggacgaggaccatttcctcgaccgacagctcaacgagacccgctatctgtcacgcaccgcccgcgcctacctcgcgcacctctacgatgaaagcgccgagggcagacagcgggttcgggtgataccgggccggatgaccgccctgctcagatgcggatggggtcttgagggcatactgcgggtcactgagaccggcgagatagcgcgcaagcagcgcgacgaccatcgacaccatgctatagacgccttcgtcgtcgccaacaccacccaaggcctgctccagagatttgctcacgcttccggctcccatcacgacccggagagaaagctgaccgccatcgccggacaggtccgcccatgggaggggttcgaccgaagccagctgcaaccgttccttgaccgcatggtcgtctcctacaaacccgaccacggcacacgtggcagagctggcagcgccaccaccggacagctccacaacgagacagcctacggtcttgtcaaactggctgagagcggcccatcccaggtagtggtccgcaagaacttggacgatctcaagagaagcgacctcaagcccgcccaggattccgggcctcaaaaaggggtgcgtgatgtcgcactccgggcggcgttgctggaattatgggatgaggtcggtggtaagcctgccgaattcgcacagcaggcggcagccaaaggaataatgctgaatggccgcaggcagatcgtgcgccgtgtgcgagttctcgacagacagaccgtcatacctatcaaggacaggtacggaaagccctacaagggctacaaactggacagcaacgcattcgctgacgtgtggcgtatgcctgacggcagatggaagatagtcgcagtaccgacattccatgccaatcagggagaaaagttctatatcaataggttccgcccccatcctgccgccaagaggcttatgcgaatctataaggacgacatgggtgtattggatgaagggacaaatcagcgtttcgtgcgtgtccgcaaatttggggacggctacgttgtcttggacgatcacaatgaagctgacgtcgacggtagagagaggcgcaaagagatgaaacgcaataatggccatagcgccacaagactccgccaacagcgtttccgaaaagtcagcgtggacgaaataggccgcgtccgagacccagggcctcgaacataatgattggccgcgtaatagaaatcgccagtgaagggcgccatctggcccgttaccgaggtctcatgacggtctcccacgatggcgttgagtatggtcgtgttccgctcgatgacatcggcgtcctgctctgcaacgcgcgtggcctcagctactccaacgaccttatgaccgaactagccagccgcggtacggcagtggtgctgtgcggtcccagctacctcccaacggcgtggctctggcctcttgaaggccatcacgtccaggcgctgcgtatgcgacgtcagcttgaagccaagcttcccctgcgcaaacggctgtggcaggctgtggtcagggccaagattcatcagcaggcgagcgtactcgaactgctcgacatgcccaccgatgacttccggagattggcgcggcgtgtgaagtccggcgatccgcacaacgtggaggcgcaggctgcgcgacgatactggcccatgctctttggcagagacttcagacgagaacgctacggccccatgcccaacccattcctcaactacggctatacggtgctgcgagccgccgtagcgcgcgccatagtggccgcaggcatgcatccctctgtcggaattcaccacagcaaccgagccaacgtcatgtgcctcgtggacgacatgatcgagccgtttcgaccactagtggactacaccgtgttccgtctcgtatctgacggccacagtgagctaaccactgagaccaaggctgcgctcgcgggaacgctcacaatggacatggccacagatcgaggaaccacgccgttcgagacgtgtctcgaacgcgctgcccagtcactcgctcgatctttcgagactggcgaacagtcgctggttttcccagcccgaccactagtggcctggacccaaacggcttactgaagaacgtcccgctcaatgctctcaggctaccggctaatgtggatgatggtgatgttcgaccttccggtcctcaccaagaccgaacggcgcgacgccaacaagttcagaaagttcctgctcgaccaaggcttcgacatgtgccaactgtccgtctatatgagattctgcgccggaaaagagcaggcccaagtttacacacgccgagtccagctatcactgccgccatccggcaacgtccagatcatctacctgaccgacaaacagtacgctaacatagtgagcttcaatggccgcagtaagcagccggccaacaaaaatccggcgcagtacacgctgttctgagcccgccattgttggttttctgcggtttccagcctgcccaaccagctttggtttagctatggtcaggctggcggtcgattatagccgatgggagatcggggaggaaccgcaacagttgcagaagtcgggggtgatactgccgattatagccgatgggagatcggggaggaaccgcaaccgacgctgagcgcgtcgaaatcggaattgaattatagccgatgggagatcggggaggaaccgcaaccaacgcccctgaacttgcctccgtcgatgtaattatagccgatgggagatcggggaggaaccgcaacgtaggcgaacgatggttcactttcgatactattatagccgatgggagatcggggaggaaccgcaacagcagatcaattcggccatggaacgccttgaattatagccgatgggagatcggggaggaaccgcaacactatggcgtgaaattggcacgtcctagaattatagccgatgggagatcggggaggaaccgcaacgggtgcagggtctggggtcgtcgtgctgggattatagccgatgggagatcggggaggaaccgcaacaatctgattcgttgaatgttttcgactctgattatagccgatgggagatcggggaggaaccgcaac

SEQ ID NO: 3621 - DNA, 4972 bp, synthetic construct
  source 1..4972: mol_type = other DNA
  variation 292..301: note = note, n is a, c, g, or t
  misc_feature 1..4972: note = Synthetic
acatactcttcactcagaccctcgaacagcgagtgtattcccaagttctccgttgaatctgcggacttgttcgtcatgtgtcttgcctccttggttcatggaacgtgaatcgtgctttctccggttctcacactatatcctacatgtcctccgcaacggacgtggcacaggattgaaaacggaaatccgttaggacggaaaggtgcgctggcaggaaggccgaacaaagcaaaagggacgagccgtagcccgcccctcattttgtgccataaaggcttgttaacggttgggnnnnnnnnnngaaatatcggctcggcctggatatgggcaccaactccatcggctgggcggccatcaaactggacgacgatggccaaccctgcggaatactcgacatgggcgtccgcaacttccccgacggacgcaacccgactgacaaacagtccaacgccgtgaaccgcagacttgcacgcggtcagcggcgacggcgagaccgctacctcaagcgacgcgaagacctgataaatgcgctcgtcgagtacggcctgatgccggaggacgcggaagaacgcaaaaagatcgccaacgacaacaagctgttcgatccctacaaactcagagcgaaggcactcgatgaaccgttggacccattcgagttgggacgtgccatcttccacctggaccagcggcgcggtttcaagtccaatcgcaagtcggatggcgataacgagaatgaggcgcagaagacacgctcggacataaacgaactgcgccgccgtatggatgaaagcggagcgcggacattgggtgagttcttggtaagaaggcgcagaaggggcaagagcgtccgagcgcggccagacatgggactttaccccgaccgagcgatgtacgagaaagagttcgacaagattcgcgcggcgcaggaacctcatcaagacctgagcacggaacagtgggacaggctccgcaactacatcatattttaccagcgcgacctgagacccgtggatcccggctggtgtctgttcgaggatggggagaaacgcgctgctaaagcgctgcccctgttccaggaatttcgtatgctccaggaggtcaataacctgaagatacaggttggtagggaagaccgcgccctgaaaccggacgaacgcgagcgagttctgaacaggctgcggtcgggcagcgacgtcaatctcaagaaacccgtgagagcgcttgggctaccgtcgggcgccgaattcaacctggcgcaagccggtcgaaccatggtcaagggagacgaggccaccgcgaggctgactgccctcccaaagaaggccacagccaatagaccggccaccccgggactgttcggaaagaagtggctggatttttctctcgatgagcgcaatgagatagcaagatttctcatagaaacggagtccccggaaattgtccgcgaaagagcgctcacagagtggggcctgagcgaagcccaggctgacgcgctctccaacgtctctctcgtgagcggctacggaaacctgagcgaaaaggccatcgccaagatactgccccacatggagagaggactgagatactccgacgcagttatagcggcaggatacccgcaccattctgatctccgaaacgatgaggctcacgaaagacttccctactatggccaggtacttacaagcgacgctgttggcgcaaaccgcgagaaaaaccctgaaattgacggcgaacccgcccgctatggccgcatcgccaaccccaccgtgcatatcggcctcggccaactgaggcgcgtggtcaaccggattatcgaggttcacggcaagcccgaagagatggtcatagaacttgcgcgcgacctgaagatgaataaggaggataagctcaactaccagcgtagtcagagagacggcgcggaacgcaacgagcgtttcagaaaggacctggagtcggcggaagaagaagtatccccggaaatactcagaaagctccggctttgggaggaacagggtcctccacaggcgcgaatctgtccgtacacaggaagacaactctcttttgaaatggtcatatcggcgcggacggagattgaccacattctgcccttctcgcgcacgctgcacaactcgatgaacaacttggtcgtgtgcatggcagaggccaatcgcgcaaagggcgacaggtcgccatacgaggcgttcggacacaacccgccggggtacgactatgacgatatactggcaaacgtagagaggtttccgtacaacaagcgacgaagattccaaccagacgcgatggaatggttcgagaacgatgacgccttccttgatcgccagctaaatgaaactcagtacctctctcgtaccgcgcgaacatacctgtcccacctgtacaacgagaaggccgagggcagcaaacagcgggtacgagccatacccggtaggatgaccgcgctcctaaggcgcggctggggtctgaacgggattctgagcgagtcaggagaagaccagaccgagcgcaagcagcgcgacgaccaccgccaccacgccatagacgccttcatagtagctaacaccacccaaaggttgctccatagattcgctcgcgccgcaggctcatcctggcaggacgccgccgagaatctagcccggcttacgccaaagccctgggacggattcgaccggaacgacctgaaaccgttcctggaaaagatcgtggtttcctataagacggacagaggaacgcgcggcgtcaagggcaagaccaccggccaactccacaacgacaccgcatatgggataatcgaactggtggagggcggtccttccaagttaaagagaaggaaggtactgtccggtattgataaagttggcccccttgaaaagactctgaacgacattctggatccaccattgaagaaggctctcatagacctgtgggacagggtcaaagcggagggagggaaatcggctgagttcgcttcgcaagccgccaaaggtgtgatggtgaacggacgtcctcagaaggtgcggagcgtcagagtagaagaagctgagactatcgcgcctatcaaggacagtgcagggaaagtatacaagggttacaagctggacggaaatgaattcgttgacgtatggcagatgggagacaaaaacaaaagttggaaaatagtagtggttcccacgttctatgccaaccagtccgacttcaatattgaggactttcgacctaaaacgtccagaggaaggtacagagggaaacccgaccctaacgcaaaacatctcatacgactctataaagacgatatgggagcgttgggcaagggcgatgatctccgtatcgtgcgtgtacggaaatttggagacgggtacgtagtattggatgaccataatgaggccgacgtagatggcagagaaagacttaatacggacgatcccagaaagataaaacgcaacaacggacatagcggcatcagactccatgaacaagacttccgcaaaatccgagtagatgaaatcgggcgggtgcatgatccggggccgttcaaaccatgataggccgagtgatagaagtagccaacgacggacgccacctgtccaagtcgcgcgggttcatggtcgtatccggtgacggtgtcgaggacgggcgcgttcctctggacgacataggcgtcctgctttgcagcgcgcgaggactcacctactccaacagccttatgaccgaactcgcaaagcgcggtgtcggcgtcgtgctctgcggccccaactacctgcccgtcgcgtggctctggccgcttgaaggcaaccacgtccagacgctccgtatgcgctgccagttggaagcatccaagccgctcaacaagcggctctggcaggcgataattcgcgcgaagataattcagcagcacaacccgctggagtttctgggaatacccaagtccaagctctagtcacttgttcggcgcgtaaggtccggcgatacgggcaacatggagtcgcaagccgcccggcgctactggccgatgttgttcgggagcgatttcaggcgcgaacgcttcggcgatatgcccaaccctctcctcaactacggctacaccgtcctgcgttcagccgtcgcgcgcgccgtcgtctccgctgggttgcacccctctctgggtatccaccaccacaaccgcaataaccccatgtgcctggtggacgacctgatggaacccttcaggcccgtggtggactataccgtcctgaaccttgtcgggtcaggatgcgaggaggtggacaccgaggccaagcgcgcgctggccggagcgctgacagttgatatgaacaccgataggggagtctcgccgctgcaaacctgcatcgagcgcgcggcgcagtcactcgcaatatccttcgaggacggcatcccatcgctggactttcccaacggcctgatcacagactcgcttccggtcgcgtcctgagaaggccggacaatgctgagcggctaccggctcatgtggatgttggtcatgttcgatcttccggttctcaccaagaaggagcggaaagacgccaccaagttcagaaaattcctgctcgaccagggattcgatatgtgccagttatcggtatatatgcgcttctgcgccggcaaggagcaggcgcaggtatatacccggcgagtggaagccgcgctgccgtcgtcaggcaacgtccagatactctacttcaccgataagcaatacgagaacatcgtgagtttcagcggacccaagcggaaatccgccaacaaaaatccgcaacagttcacactgttctgaagtcgccaacgccagttttctgcggttctctgccctccctgccagctttgcttcagctatggcggagagggcgaagtattatagccgaggggagatcgggggccaaccgcaactattacgcaggcgacatcgtggaccacggcattatagccgaggggagatcggggg

SEQ ID NO: 3622 - DNA, 23405 bp, synthetic construct
  source 1..23405: mol_type = other DNA
  misc_feature 1..23405: note = Synthetic
catggaatacggccacatcagcctggctgagcagcgacgctacaagaccgatatcgtccgcacccaaatcaaccgtctgggcggtctgcccctcgaatcgcccctgctgaccaacctcatcgttgaagagcttcccctgcgcgataacaacgagggcctgtcctggcgtacccgtgtgcgctacaacgtgaccaaggtccgtacccagcccggcgataagccagacagtcagaagaacagcggcaaggagagccccgccgtcacctggcgcatcggcatgcacccctaccgcgcctcccagcccgtaccggtcatcgactttcccctcgccgccaccgaactgcgcaacctggagcttgagaagctgaacctgcgcggtgtacgcgaagtcgaggcgaccgtctcctcccgcggcaggatcctgctacagttcatcgttgacccgcgcttttccatcgaagaggtcgccaaggacatcgaacagcaggcatccgacgcctggggactgctcgccaagcgcaaaatctccctcttcttcaccccgcagcccagctccaacggcaagcccaagcgccgccgccccggctcctcccacagcccctaccgccgcgtacccgaaggcgaccagctgctcggcgcgggcctgcgctccgtcaccgaagaagtcatcttcggctcccgccgattcagctaccaggtgtccgccggcggattctggcagattcaccgcgccgccccctccaccatggtcggaaccatgctcaccatgctccgcccgcaggaaggcgaatgcaccctcgacctgtacgccggcgcgggcctgttcaccgccgcgctcgcggacgctgtgggcgcgacgggtaccgtcgttagcattgagggttccccggtgacccataaggatgcgcgctcgaacttcgcgccggatggttgttcccgcaccgataactcggcgaacacccgcattgaggtgattcgcggcgacgtggcacgccacctggtggatttgaagaccgcccttgagtttggtgaaattcccgccatcgatgcggtggtcctcgacccgtcccgtgagggtgcgaaccgaaccaccctggaacgcctggatgcgctggaccccaagcgtattctgtatgtggcgtgcgacccggcatccctggggcgtgacaccggtattttgcgtgagctgggttgggatatggtgcagcttcgggcgtttgatatgtacccgaatacgcatcatgtggagtcggtggcgctttttgagcgtgccccggcgaagcctcgtccgcgccgccgccgcaccacgtagcgcgtagctagttgccgtaacaaagaagcaaataatcgctgtgttgggcgggttgggttgttcaccagcctgcccactagggggttatttcaggcggttttcgctcaacccggtgcgtcttgctctgcgggcgcataaatctgctttttggcactgtaaacggtagaatcattgaagaaccaacgcacggaatgagccgtgccccgaccttgaggagtgtgggtgtatgtccgctgaaaacgcattgccgcaggaggagaccccgaatagcgccgccggtggcgcacccaccgccgactacagcattggcgatggtgccactgccaagttgctcccgggtattcagtctccggcggacctgcagaacctcagctacgagcagctggaggagctctctaaggagattcgccagttcatcgtgacgaacgtatcggcgaccggcggtcacctgggcccgaacctgggcgttgtggagctgaccctcggtattcaccgtgtcttcgaatctcccaaggacaatattcttttcgataccggccaccagtcctatgtgcataagctggtgactggtcgtcacgcgtttaagactctgcgtcagaagggcggcctgtcgggttacccggatcgtggcgagtctgagcacgacattattgcttcttcgcacgcctccagctcgatttcgtgggctgacggtatttctcgcgcgcacaagctcaacggtgaagatgaccgctacaccgtggttctcattggcgacggcgcgctgaccggcggcatggcgtgggaggcagtgaacaatattgctgccgaccgcacccgcaaggtcgtgattgtggtcaacgataacggccgctcctacgcgccgaccattggcggttttgcgaaccagctctctgagctcaagcacggtgtgcagcaacaggtggatcgtgtgcgcctcgatcaccgctacgaccacgccctggatgcggtgcgcatcggtctgcagcgtggcggccccgtcggtcagatggtgtaccgcggcctgcacggcatgaaggcgggcattaaggacgtcgtcgtacccaagggcatttttgaagacctgggcatgaagtacgtgggccccattgacggccacgaccagcaggctgtggagaacgcactgaccgcggcgaagaactacgccggcccggtgattgtgcacgccattaccgagaagggccacggctacgcgcccgcccgcgccaatgaggacgaccagttccacgcggtgggccagattgacccgctgaccggtgaggacgtttcgaccagcacctccgagtcgtggaccggtgtctttggtcgcgaaatcgcagatattgcggatgagcaggagaacgtcgtcggtattaccggcgcgatgctcattcccgtgggtctgcgcgaattccagaagcgccaccccgagcgcgttattgacgtgggtatcgctgagcagcacgccgtggcgatgagtgccggcctggcgtacggcggcatgcacccggtggttgccctctacgcaaccttcctgaaccgcggctttgaccagctgctcatggacgttgccctgcataaggcgggcgtgaccgtggtgctggaccgctccggcattaccggcccggacggcgcaagccaccacggcatgtgggatttggcgatgctgcagttcatcccgggtctgcacctggcggctccgcgtgatggcgcgaccctgcgcgaagagctgcgtgaggctgtagctatcaacgacgcaccgaccgtgattcgctacccgaagggctccgtgggcgaggacatccctgccctggagcgtcgcagcgacggtgtggacgtgctggcacgcaccggtgagccccacccggagaccggtcagcgtgacgtattgttcgttgccgtgggcgcgatggctcgcgtggctctggaagcctcgaaggtgcttgccgccgagggtatccagtccaccgtggttgacccgcgctgggtgatgccggtgccgtcttcggttattgagttggctcgtgatcaccgtattgtggtgaccattgaggacggcgtgcgttccggcggcgtgggttcgcgcatccgccaggaaatgcgtgcggctggcgtggataccgcgctgagcgagctgggtcttcctgccgagttcattccgcacgcttcccgcgagcagattcttgaggaagtcggcctgaccgcggagaccattatcgcggatctgcgtgcgcagctggctggcgataaggttccgtttgctcgtgaagagggccagaagccgcgccacacccgctaagcggtcgtacctgagatgtgccgcctgagcttctctcagtagcgcgccgcaatagcaggcgctcaatgacaagctgctcaatgacaagcacagtatagacagacagaagccccgcccattgtgatgggcggggctttgccgtacgtcttctgaactacaggttttaggaatccttattggtgtgggtgacgaaaatcttgccgcccttcacctgtaccgggtagctggtcagtgcctcctcagcggggccgtgaatgaccgagccgtcagctacggcgtattcggagccgtggcaggggcatacgatgcggttggagtcctgcacctgcacctggcagccctggtgggtgcagacggtgctgaacgccttgtattcgcccgaagagggctgggagacgataacggtcgtggagccgtgggtcagcttagccgccttacctacgcccactgcggaggcggcgcccatctctacgctgccttcgggtacggtgacggcggagtcaccttcagcgcaggaggcgagcagcgcaccggatgcgacggcaccggtgataagggttgcgcggcgggaaaagacgcgagcagaagattcaatctctgcggtatcgactgcggtgtcgacggcattagattcggtagcgttagattcgacggcggcagatgcagtgggggaggcgcatgccttctgagagcggcagcatccgttgggtgcgggcatggtggttcctttcgtgtactctctccacactatgccggtttgggataaaaatcgaatgagagcaggctaagctttgttcacatttgctcccgagacgactcctgaggcaactcccgaggtacacaaaatgccggtcgggtggtcgcatcagcaacacacccaaccggcacacgtctatttagcgttagtgaaatctaccccaggtggcgggcaaaaatcggcgcaatcacgggggcaaccagacccgtctgccacgaacgcgcaccgtactcggcgagcgcatcccgcagggtctgctcgtcaaaacgagccggcggctcccagcagaggcggcgaacataatcggtcgtgatcaggttctgcgccggaatggtcagcttctcagagagctcatcaattgcctgacgaacctcggtgaacaacgccaagttttcggggcgcttagactcccatgccttcaacggcggcggggcagtcgacggcaaagtgaacggtacggcgttctcaccgcgtgccgccgcggcaatagcacgcacccagcgcgggccctcacgacgcaaaccgcgcgtctgaaaaccaggaatcgacatgatagcgggcacgttacgcggcatggtgcgtgccgcctccacaatcgcggaatcgggcagcagacgcttcgcgtcaacgtccttcttacgcgccagcaagtcacgctcaagccacaggttacgcagcgccgtcagctgcttgaccgaacgcaacatcgtgcggcccttcgtcttacgccaacgctccggctgatccgtcggatccttcaccggggtcttgcacaggtacgcgaactcctccaaggcgtactgcaacttaccctgctggcggagcaaatcctccaacgcgtcacgcaaatcaatgagcacgtcaacgtccagcagcgcatagttcagccaggactctggcagggggcggcgcgaccagtcttccttcgagtgcttcttcgccagcttatagccgagtagctcctcaacggtcgcacccaggttcacgcgctccagaccggcaagacgcgcaccaagctccgtatcaaacaggcggttcgggcgcataccgagcatgtccaggctcgggaagtcctgaatcgcggcgtgaataacccactcagcatccgccagggcatcgttaataatgcgcaaatctttgaacgcctcagggtcaatcaggtacagctgatcttcacgcttaagctgcaccaaaaaggcacgcgaaccgtagcggatgccctgggcacgctccgtatcaacagccaccgggccggacgctgccgccaactgctcagcggcacgacgcagaccgctctcagtggtgatgagagtcggaatcggtgaggaaggggcctccagaggaacaacctccggaacttcgataccgtgaagggtcagctgaggggtgcctgcggcattctgttcagctgcggtactcatgcactcaatccttttcctctgtctggttcgacgcgcccatacgatgcgccagatgcccgggtaggcgtacgcccgagcaaacacgagcccgggcggggtggcgtgcccgcgaaggtactacgccattctacccgcccgagcctaaagcctcgaatttagagagactcacaataaggggttcaccggcgtgcccgctggggtcatcgccggggtctattcggtggattccgcctcgtcaaccggggtatcgttatcgccaggttgtgcttcgccatgctgtgcttcactagcgggggtcagcgtcaggcacaccgaattaatgcaataccgcaaatccgtgggagttgggtaaccctcaccctcaaacacgtgacccagatgcgaatcgcaggcggcgcaacgcacctccacgcggcgcataccgaacgtcgtatcctccaggtagcgcacgcggtcctcagccagcggcgcgaaaaacgacggccaaccacaatgcgaatcgaacttctgatcggaacggaacagctccgtaccgcaggcacggcaagaatacacaccctccgtgtgggtgttccagtactcgcccgtgaacgcacgctcggtgccgccctcacgcagaacagcgtactcttcaagcttgaggacttcacgccagttcttggcgatagcacccacgccgggtagcgagttgcccatcatgactccttcactttgctcttttgcccaggctcttacagctcacataacgcggtggcagagcgggttattcccgctacgcgcggatatcagcgtacttgccgttggtgagcttcagcaggtcgtccggggcgagctcaacatccaggccgcgcttaccgccagaaaccatgatcgtgtcaaaaagctgcgcagactcatccagcagggtgggggagggggtcttctgacccagcggagaaataccgcccaccacgtagccggtacggcgctcagcaacctttgggtcgcacatggaggcgctcttccaacccagcgcagcggcggcggccttaatgttcagcttgccagacaccggcacgatcgcgaccgcgaaatccttctcgtgcacaatcagcagggtcttgaacacctgctcctcggaggcgccgaggttcttcgcggcctcttcaccgaaggaggtgacaccctcaacgtgctcgtattcacgcatctggaagggggtgttcgtctcggtcagcagtgctacggcggcggttgccgcgccgctcttcttacctttagttttcttagccatagacaccattttacggaagtcaccatgcgccgaaacacatgtggcttctcaaaggttatggggttatttcagtagccctttttccttcagctgctcttgagaaagcgagccaacgacagtccaaaatccttctgatttgtctacgttctgaggtagcctttaggctcccttttttcttagtaaataccgatgagtaattgcatgccaagactagtcaggatgatagcaatccagcaaagggctccaagaagaatggattttccactggatttgatcatagcaatgaggttggttttgagaccaatagcactcatagccatgatgatgaggaatttggagagctgtttgagaggtgaaaagaagctattgctgacaccgaaagatgtgagaagagtagttagcagagaagctaggataaagtagagaatgaaaacggggaagatttttttaagcttcactccttggttgttgccttgttgacggctttgccaataggagaggaagagaacgatagggataatagctagagtacgtgtcagcttgacaatagttgcaggctcaagagtgtttgcattgtaaagactatcccaggcactagcagtagctgtcacagaggaagtatcgttgaccgcagtacccgcaaagagagcaaaaccttcgttggaaagatggagccaagaacctagagttggaaagataagagctgccaagacattgaagaaaaagataacagaaatggcttgggctacttctttttccttggcgtgaataacaggagcagtcgctgcaatggcagaaccgccacagatagaagatccaactccaatcaaggtagctagctttgtatcaaggttaaaaaagcgttggaaaaagaaagctataatcaaagcgatagaaatggttgaaaggataacagggagggaagattttccaactgcgaaaacttgtgagatattgagcccaaatccaagtaagacaacagcatactgaagcagttttttggagctataagtcaagccggcttccagttgtgtataggaagtgagaaagggatggagaatcattccgataaaaatggcgaaaacaggtgctcccacaacaggcagaaatcctcctaaaacccaagagatgatagaaatgatcagacagactgacagccctgcccaattttttgatagaaatgacataaaaacctccgaaaataaacactctttattataatcttattttgataaaatagaaagcaggaatacagacccagcccggggagcgcaccacctcagcctccgcacccgaacgcccatgccctcgcattcccgcccagccccctccccatgcccgtaatgtggcgggcaactcatgccgctcacgcggggtgttagacagtactacacttaaagcggaagtcacatcgccgtcactgaagaaaagagtttttgtgcccaccacgaccgtacacttgaccgaccgcatccctcgcgtttctgctgatgagttgctggcgggtttccgcccctctgagcgttttggtgaagtgtcttttgatagctacattcctgatccgaatcagccgtcgcaggctgaggctgtgcagaagctgaaggattttggcgacaagattaatggtggcggcgctggtgccggtttctttggtcgcctgtttggtggcaagaagaaggattcgacgaaggctggcctgtaccttgacggcggttttggtgtgggtaagactcacctgttggcgtcgctgtggcattatgtggatggcccgaaggcgttcggtacttttgtggagtacacgaacctggtgggtgcgttgacgttccgtaagacggttgaggcgttgagcagctacaagctggtgtgtattgacgagtttgagctggatgatccgggtgatactgtgctcatgtctcgtctgatgcgtgagctggcggatgctggcgtgaagcttgtggcgacgtcgaacacgctgcctggtgcgctgggtgagggccgtttcgcggctgaagattttaagcgtgagattcaggtgcttgcttcgcagtttgaggtgcaccgtgtggatggtgaggatttccgtcaccgtggcctgcctgctgcgccggagcctgttgctgatgatgcgtttgatgcgaaggttgaggaagtgttcggcggccagactgttggtgttgataacttcgctgacctggtggagcacctggcgaaggtgcacccgtcgcgttaccgtcagctgattgatggcctggatggtattgcgtggcgtgatgttcacccgattactgagcagtcggtggcgctgcgttttgtggtgttggctgaccgcctgtatgacaaggacttgccgattgtttcttcgggtgtgccttttgacaaggtgtttactgaggagatgctggctggtggttatcagaagaagtatttccgtgcggtgtctcgtttgactgcgttggctcgtgagggcatgctcggcgaatctgagtagccgccgcctgacgcggcgaaaccgcgcagcgtgaatgcgtgaactgcgccgaaaagtttatagagaagacccccgccggatgctccacgagaggatccggcgggggtctttgtttgtcttggctcgtatggtctgcgggctcataaatacctgcagtagatagggaagttaaaaacataccgcccgttcctaagaggagccggacggtgagaagtcagcatcggaaggatgccttattaagaatctttcgttactgattctagcacaggggcttactacttctgcaagcgcttcacataaaaatttttttgcgcttttgggggtgtgaatgacggttttgaatgcatatatggcgtagtcaggttattgttagtctcagatgagcgcaatgatgcttatcaagagtgcaatgtctgcacttgattgcaatcactcacaaaggagtatgacatgtccacggacatgaagaactaccgtatcggtgttgatgtcggtgaccgctctgttggtcttgccgctatcgaatttgatgatgctggtctccctattaagaagttggctttggtaactttccgccatgacggcggtttggatccgacgaagaacaagaccccgatgagtcgtaaggaaactcgaggtattgctcgtcgtacgatgcgcatgactcgtcgccgtaagcagcgtctgcgtgaccttgataaggtgcttgagaagctgggttacaccgtgccggagggccctgagcctgagacttatgaggcgtggacttcgcgtgcactgttagcatccatcaagctggctagcgctgatgagctgaatgagcatttggtgcgcgctgtgcgtcatatggctcgtcaccgcggttgggctaatccgtggtggtcccttgaccagctggagaaggcgtcgcaggagccgtcagagacttttgagattattctggctcgtgcacgtgagctgtttggtgagaaggttccggctaacccgactttgggcatgttgggtgctcttgccgctaataatgaggttcttctacgtccgagggctgaaaagaagaggaagactggatacgtacggggcactcctctgatggatgctcaggttcgtcagggagaccaactggctgagcttcgtcgtatttgcgaggttcagggtattgaggaccattacgaggttcttcgtatggctgttttctatcacaagcccccgtatgtgccgaaggaccgcgtgggtaaagatccgctaaaccccgatgaaatccgagcaagccgcgcctctctggagttccaggagttccgcattcttgattcggtggcgaatctgcgtgtgcgtaccggttcccgtaccaagcgcaagctctccgaaagcgaatacgataccgcagttgatttcctgatgtcgtacacgggtaaggagcagccgagctgggccgatgtggctgaggagattggcgttccgggtaaccgtctgattgccccggttcttgaggaagttcagcagaagactgcaccgtttgaccgttcgtctgcggccttcgagaaggcaatgaaggcgaagaccgaagcgcgcaaatggtgggaatcgaacgatgacgaccagctgcgcagcctgttcattatgttccttgctgacgcaacggatgacactaccgctgctgctgaacaagctggtctgtatgatttgtttgcgagctggcctgaagaggaacgcgaaactctttctaatatcgccttcgaatctggccgcgcaggatacagcgcgacgaccctatctaagctgagcgagtacatgcatgagtaccgtgttggtcttcatgaagcccgtaaggctgtcttcggcgtggacgatacctggcgtcccccgttggataaattggaggaaccgacgggtcagccggcggttgatcgcgtgctgacgattctgcgtcgttttgtgctggattgtgagcgtcagtggggccgtccgcacgctattactgtggaacatgcccgtaccggcctaatgggacctacccagcgtcagaagattctgaatgagcagaagaagaaccgtgcggataatgagcgtattcgcggtgagctacgtgaatctggtgtggataatccgagccgcgcggaagttcgtcgccatttgatcgtgcaggagcaggaatgtcagtgcttgtattgcggcacgatgattacgacgactacttctgagctggaccacatcgtatcgcgcgctggcggcggttcctctcgtcgtgagaatttggcggcggtgtgccgtcgttgtaacgggaagaagaaccgggagctgttctatcgttgggctggtccggtccggttgcaggagaccattgaccgtgtccgccagttgaaggcctttaaagaccccaagaaggcgaaaatgttcaagaatcagattcgccgcctcaagcaaaccgaggctgatgagccgattgatgagcgctcgctggcttcgacttcgtatgctgctgtggcggtgcgtgagcgtttggaacagcactttaatgagggtcttgcccccgatgataagagccgtgtggttctagacgtgtatgcgggttcggtgactcgtgagtctcgccgtgctggtgacattgatgagcgcattcttctgcgtggtgagcgtgataagaaccgttttgatgtgcgccaccacgcaattgatgcagcggtgatgactttgttgaaccgttcggttgctttgaccctggagcagcgtagccagctgaggcgcgcgttttatgagcaggggctggataaactggaccgtgatcagctgaagccggaagaagattggcgtgactttatcggcctgtacccggcttctcaggagaagttcttggagtggcgtaaggcagctactgttctgggtgacctgttggctgaggctatcgaggatgactctattgcggtggtgagccccctgcgtctgcgcccgcagaacggagcggtgcataaggacaccattgctgcggtgcagaagcagactttgggttctgcgtggtctgctgatgctgtgaagcgtattgttgatccggagatttacctggcgatgaaggatgctctgggtaagttgaagaagcttcctgaggattctgcccgtacgcttgaattgccggatggccgctttgctgaggctgatgatgaggtgctgttcttcccgaagaatgctgcatcgattttgactcctcgtggtgtggctgagattggtgagtcgattcatcatgctcgcttgtacggctggctgacgaagaagggcgagctgaaggtcggtatgcttcgcgtgtatggtgcggagttcccgtggctgatgcgtgagagcggtagccgcaatgttttgagtatgccgattcaccggggttctcagtctttccgggatatgcaggacacaacgcgtaaagctgtggaaagcggtgaagcggttgagtttgcttggattactcagaacgatgagttggagtttgatccggatgactacattgctcatggcggtaaggatgagctgaggcaattcttggagtttatgccggagcgccgctggcgtgtggatggttttaagaagaactatcagatacgtattcgccctgcaatgctgtcacgtgaacagttgccttctgacattcagcgtcgtctggaatctaaaactctgacggaagacgaatccctcttgctcaaagctctagatacagggctggttgttgcgattggcggtttgttgcctctggaaacgttaaaggttatccgccgcaataacttgggtttccctcgttggcgcggcaacggtagcctgccgacttcgttcgaggttcgttcttcggcgttgcgcgctctgggtgcggaaggctaggagagcgtgatggatagtaagtggcgtgttcttgatttcactgcctatgagggcttcctgtcgtatgagagggggcgaatcgtggcgggggagcggagcacgccacttgctgaggttgattttattctccttggcatggggtgctcctggggctacggtctggtggctggtctggaacgttttgatgttgctgctgcgatttgtgattggcgtaatcagccgatttctacgttgtatcactggtctgagaatacgaaggtgtttactcgtcatgaggctcaggctgagttgagtgtgccgcgtgcgaagaatgcgtggatgcagattgtgaaggctaagcttcgtggtcaggcgaattgtcttgaggctatggggcggccgggtgctacggatattcgtgcgttggctcgttcggtgcgttctggtgacccgtcaaatgctgaggctcagggggcgcgcctatattggggagcgttccttccagaacagggattccgccgtcaacagctctcggatgacgtggtaaatggcatgttgaactatggatacacgattcttcgcgggagggttttgactcgtgtgatttctgcgggtttatgcccgacgctgtcgctttttcaccgtcatcgttcgaatgcttttgcgttggttgatgatttggtggagccgttccgccctgctgtggattatgcggtgtatcagttgatttctgctggttctactgagttgggtcggcaggagaaggttgctctggttcaggtgttgtctgatgcagtgaatggtgattcgccgtttaagctccgtactgtgatggaggatttttgttctgagtttgctctctatgtcgagggtaagcgtgataggttgtcggttccggtgtgggagctggctactgccgaggagtcgtgtgaggatggctgatcctgtgtggttgatggtgatgtttgatttgccggtgaagacgaagaatgagcggaggctggcgaatcgttatcgtcatgttctgctggatttgggttttgaccgtatgcagttgagtgtgtatgcgaagtactatctgaacgggaatgcgacgggttctgatttgtttcggttgcaggttgaggttccaccgggtggtgcgattcgtattatgcgttttacggatgctcagtgggctgggtcgattcgccatttggggccggaggtgcagcagatggaggagaagccggaagcgttagatattttctagctgggcttcacaaaaatggaccggtgggtagcagccaaacgtggctgctacccaccggtccatttttcctttcggatcttgcctagagatgagctccgaggcaggtatggggcagtttttctcttgaaaaactgccccatttatgcccctgactaggggaaatgcttgattacttaagtatatcaaggtgaataatgaaagattctcaacttcttcatccgctcgaacgtctcgcgagtaagtatatcaaggtgaataatgaaagattctcaacgcaacttcaggcatgaagacaacactgttaagtatatcaaggtgaataatgaaagattctcaacgcaccgtcgatgaccttcacggtcattttaagtatatcaaggtgaataatgaaagattctcaaccgagtcctccacgtaaacacccgggccgtaagtatatcaaggtgaataatgaaagattctcaacaaaattgtgtcgcgttcaatggctggagtaagtatatcaaggtgaataatgaaagattctcaaccgagtcatacgcataattacgccgcctttaagtatatcaaggtgaataatgaaagattctcaactgacgctcaagggcatcgcgggggagtttaagtatatcaaggtgaataatgaaagattctcaacacatcgcgcactgtaccacggtgggtattaagtatatcaaggtgaataatgaaagattctcaactttacatacaaggtgtcgccagcgatagtaagtatatcaaggtgaataatgaaagattctcaacacatcagcgccgcatgggtcgcaaccgttaagtatatcaaggtgaataatgaaagattctcaaccgtgtagtaccgcaaaaatcacggtctttaagtatatcaaggtgaataatgaaagattctcaacttcatcaggaataccatcaccatctgaataagtatatcaaggtgaataatgaaagattctcaaccctagatgggatacgcgccggtgcaatttaagtatatcaaggtgaataatgaaagattctcaacatgtccaccatgtcccgcgctgaatacataagtatatcaaggtgaataatgaaagattctcaacctgcgacaccacacgagccgaaacgctctaagtatatcaaggtgaataatgaaagattctcaacaagtttggtacacgtcatctgctggttttaagtatatcaaggtgaataatgaaagattctcaactgagcctgagcctggagcatgagggcattaagtatatcaaggtgaataatgaaagattctcaactgggcattgtcgagggtggtatggatataagtatatcaaggtgaataatgaaagattctcaactcatgagacagcggagcgggcgcattattaagtatatcaaggtgaataatgaaagattctcaacctaacttccgtgcaacacacgcaggatgtaagtatatcaaggtgaataatgaaagattctcaacctgctcgggaatcgtgatagtgcgtcgctaagtatatcaaggtgaataatgaaagattctcaactactcgttctcgatatgtgcggcgaggctaagtatatcaaggtgaataatgaaagattctcaactaggccagctgaaatacgtcctcgaaaataagtatatcaaggtgaataatgaaagattctcaacactcacccgagctgttcctcgcctcccttaagtatatcaaggtgaataatgaaagattctcaactgggccggggccttgagcgagtggattctaagtatatcaaggtgaataatgaaagattctcaacacgaggccagtgccaggctgcgcatacataagtatatcaaggtgaataatgaaagattctcaacaaggggtcctgatctgatgattggccagtaagtatatcaaggtgaataatgaaagattctcaacctgaggtgcggcgggtgtcgtgggtgcttaagtatatcaaggtgaataatgaaagattctcaacccacggcgcgacgaaaaggcccgcaccataagtatatcaaggtgaataatgaaagattctcaacgccccgcgcgaaccaaccgagaggaacgtaagtatatcaaggtgaataatgaaagattctcaactgtcgattcttttgctcatgggcgtgagtaagtatatcaaggtgaataatgaaagattctcaacataatgtcgattccccggcttataatcctaagtatatcaaggtgaataatgaaagattctcaacggttttctgaccgaccggcatgtcgatctaagtatatcaaggtgaataatgaaagattctcaacagttcggtgtcgataacgttattctgactaagtatatcaaggtgaataatgaaagattctcaacacaaagcgcgtggagcgtttctcacccgtaagtatatcaaggtgaataatgaaagattctcaaccgaacgcagacaagcccgacctggacataagtatatcaaggtgaataatgaaagattctcaacccgagccggacggcgcgcaccgcatcgataagtatatcaaggtgaataatgaaagattctcaacgattcggcaaccggggtatcccaatgcctaagtatatcaaggtgaataatgaaagattctcaacctggtaaacaaggctttctagtcttgcgtaagtatatcaaggtgaataatgaaagattctcaacctgatcgtagtatcgaccagggcacgcgtaagtatatcaaggcgaataatgaaagattctcaaccccgcgtctggtggtgcatcctcgacattaagtatatcaaggcgaataatgaaagattctcaacaaagaactagagctagaccccgcgaatttaagtatatcaaggcgaataatgaaagattctcaacacatggtgggcgacttcctagctctctataagtatatcaaggcgaataatgaaagattctcaaccaagcccgcgtggtggtcatctttcaggtaagtatatcaaggcgaataatgaaagattctcaacgcgtggaagtgcgtgaatgcaagaagcgtaagtatatcaaggcgaataatgaaagattctcaacttagaaagggtggaagtctccaccgcaataagtatatcaaggcgaataatgaaagattctcaacccgcgaaacaccttatgcatggcttctataagtatatcaaggcgaataatgaaagattctcaacacctgcacgaccatctggtgatttcaaataagtatatcaaggcgaataatgaaagactctcaattcggtcggtcgcgtcggtcagtcggtcataaaaatatcaaacaactattgaaagattcttagtcctcaatgaaagcccctccagtctattcattttagcaaatgtgcgtactgctgggtacaaatagtgaaaacattaaaataagcccctcgacccgtaaccataagctacaggtcgaggggcctctcattatgcgttagtaactaagctgcagagtggcgctgtcaccgcccgggggagtacccctacgccaccgccacggcacccttggcggaggtgccgtttcgggtccagagcaggagcgctgccacgctgttgatgatgtagaaaatgtacttgccgacgttcgcgaagttgccctgggtcagcgccttgatgcactgtacgctgttgtacaggaaccagaactgccactgcatcgtcagcttgagcgcgttcagaatgttcgctgacagggacaggccgaacactacggtcgtgatccagaacaggaatgaggtctggccgccgtagccaatgtagttcgttaccagggagaacgcgaacgaacccgctacaataccgccgataatcagctggcccttcgtgccggtcggcggttctagagccttgccgcgttcggagttctgccacctacgaatcgcgaaggtgtacacgatgaaggtcaccgggtaggtgatgattgctgccttgttgcccagaatgtagtcgattgctccggacagtgccgtgttaataatgccgagcacgttgccaacgttggagaggcggccggtcaggcgggtagacatcattgaaatacccacgttaatcacggaaatcacgccgaggggaatgaagctcgtaatcgggccccagtcaacgtacttggcgaggttggtgctcaggtatcctgaggcgattgcgatggcgataaccagtgccacgccgaagaggtcggcgtacttggacttggcgaaaaagaggagggccttctcagagaattccttggcctccatgggtaactcctttgttaggatatagaaacagtgatagggtaccaataactataactctttgaaaagggtttgaaacggcgtgtcgcacacaaaacctcagaaccccacatattccatatcccggaacacctcggcgtagagcggttcaaagccaccccatcaagaacccatgccaacttccggcaaacgttgccagataacgcccctacttcgttgaataccgaaaatgggcgtaaaatcaccgccgtttcgtcttcgctttaaacgggaccttaaggtacgctagatgactgggtcagggaactcgtgccggtctcactcaccgcgcatccgcccgacagacacccgcaccccgtacgctgcgtctcactcacgcacacaggggagggaaccaccgtatcggcctcactcaccgtttacgccgctgtccgcgcgtcctgccacccgtaactcactcaactcaaacaagaactgaataggacaatcatgcccttgcttacccatcgactctcacgacgattcttcgtaaagggtgcttctgccgccgccgctgcaggcgcactgaccctgcaggcacaggccgctcaggcagacgaagcccccgcaaaccttgccccggcaaccgaggaaactaaaggcccgcgcctcgtcattcagcgtgccaccatcaccgaaaccggtatgaccgtcaactacactgcacacggtctgcgcgaattcctcaccgaaggcaccaccctgaccgtacgccacggctacgttcgtaacggctctttcgaaactctgcgctcctggccgctcacccccgaatttgacggtgacgctgacagcttcagcggtagcgaccagttccccatcgagctgatgcagggtgagggcgttgaccacgccctgcagctggatatttgctccgacccgtggggtcaggagatcacccgccagattgctgcgcgcatccccgtggctgagaccaagatcctgaagacttctttcgaggatgttccggataaccacccgttcgctgaggatatccgcatggcgaaccagaagaagtggctgatgccgaacccgcagactggcgcgtttgagccggaccgccctgtgacccgtgaggagcttattgctctgctgaaccacgctgctggtcacgctggcgtgagcgaaaactcggatgttgcacccttcgcggatgcggcaggccgcccgaccgcgaacgcgctgcactgggctcgtgaccgcaagatcaccgagccgctcaccggtggcgacaagattgacccgaccgcaccggtttctcacgaggagctggcggctgtgctgttccagtacaacgcggaggttcagctgaccgagatgaaggagggcgctggttctcgtttccgcgacgtgctcggtgcgggtactctgcaccgttacgttgcgtgggctggcgcgaacgacatcgtgctggatgcttcgggtgtgttcaacccgaccgcgccgactactcgcgcggagctggctcgtttcattcgccgctacaagctgcagaacctgctgttcactgacttctcgtatgtctcctaatttttagtcaccccggcaccgtgtcaccccggcacagtgtgttggggtgcatggaacccccgtcttctggctttgctggaggcgggggttttgtcatgccctgtcgtgtctcgctgctatattgccgcacctcggggagttttagtgacaggctgtgcctggcatatgaaattttgcgtcatatatacctaaaatcttgcaaaatcctgtgcgctaagtaagtattacctagaaggtaagttaatggttgccttactaaatactgtgtgaagactagtttccttcctcgtgggcccacgaaacccacaccagagagcaggaaaaacgcggcgcctcaccacccatcggtgggggagagacgcacctccacacaccacccacgaaaaaggacatacatatgaacctcgcttcgagcaaggcattcaagggcctcgccgttggatcgctggcactggcaatctccggcgttgccgccatccccgcatcgttcgcggcagactccaccccggcagcaagccagagcagcgaagctcgcaccatcaccgacaagacgatggcaaagatcacccagggcctgcccggtcagttccaggtcgcatactccaagaagaccaacaagatttgggttgctggcactgcagaccgcgacgagcacgtttctacgattgctcgcattgacgcaaactccctgaagattgaggcagttgccgagctgcccattatcaagggggactcgggctactcctacgagggtgcgtacggtatcaccgtcgatgacgaggaaggtaccgtgtgggtgaccagcacccgcgataactccgttgccgtatacgatcaggcgaccatgaagcagctgtggaccaatgcgggtctgagcaaggacgacccgaactggattgagcacccccgcgaggtgcgtgtcgatcacgagtcgggtaaggctttcgtgaccggtcgcttctttgtctcggctatcgatctgaagaccaagaaggtcgagaagattcagcttgagggtgcacccgatggcggtacccgctacatcagcatgaacattctggtggacggcggtaagctgtacgtgcccgaacgcaccggcggcaaactcttcgtaattgacaccaagaccttcaaggtcgagaagaccatctctgtgaagggcgataaggacggcgaggttcgcccctccgacgtggctattgaccactcgcagaacgaaatttacgtctcttcgcagggcgtgaagggcgagaactccggtgtatccgtgtatgatgcgaccacctacgagttcaagaagttcatccccttcggcacccaggcgctctcgctcgataacgatgaggccaacgacctggtgtacgtctctgacttcggcaccggcaagatcggcgtgattgacggcggtgcagcggacaagctgattgccgaggtcgccatgaatggcggcaaggcaaacgacctggtcgtactgcccaacggctccgtaatcgctgtggacaagcaggctggcgcaaccgcaaccgtgccctacgtcctcgacggcaccaccggcaccgtcagcacctccaacaaggtgaccagcaagccttctaaggacaagcagggcaacgaggttcccgccaagacctccgacattcaggcgaactccatcctgaagttcaaggtcaccgcaaccgcaggtaataactctgaggtcaagcaggtcacccccgaaacccgtgagttccagggctacccggcaaccgctaccaagaccaaggcagccgactctaccgccccctccactgaggcacaccgcaccgtggatgcaaacggtagcgttgcgaacatcattcagggtctgcccggccagttccaggtcggctactccaagaagaaccacaagctgttcgtacccaccgtgggtgcgcgcggtggcctcgcttcctccctggcacgcgtggatgcagacaccctgcagaccgaggcattcgccgagctgcccgtgaagaagaacgacaagggccagtacggttacacctccgcgtacggcgtgactgttgatgacgtggacggcaccgtctgggtcaccaacactatcgacaactccgtggcagtgtacgaccagcagaccctcaagctcatctggactaacgagggcgtgaaggaaggcgacccgaactggattgagcacccccgctccgttctggttgaccacgagtccggtaaggcgttcgtgaccggccgcttcttcgtctccgcaatcgacctgaagaccaagcaggttgagaagattcagctcgagggcgcacccgacggcggtactcgctacgtgagcatgaacctgttcctggacggcggcaagctgtacgtgcccgagcgcaccggcggtaagctcttcgtcgtggacaccaagaccttcaaggttgagaagaccatccagactcagggtgaggattccaccgttgaggttcgcccctccgacgttgctgtggaccactcgctgaatgagatttacgtttcttcccagggtgtgaagggcgtcaactccggtatctccgtgtacgacctgaccactggcgcgttcaagaagttcgtcaagttcggcacccaggcgctcgcactggagcacgatgaggatcgcgacctggtgtacgtgaccgactttggcaccggcaaggtggctgtctttgacggtcgcgctgacgaggtcatcggcgaggtcgagatgaacggggcagccgcgaacgacgtgaccctgctcaaggatggctccgtgctggttctcgacaagaaggaccgcgacgagaaggtgaccctgccctacgtgctcaacggcaccaccggcgagatcaccactgccagcgagtacaccaccctgcccggcaaggaccgccagggtaacgacgtccccgcatcggttcagcagctgaaggctaactc

SEQ ID NO: 3623 - DNA, 23405 bp, synthetic construct
  misc_feature 1..23405: note = Synthetic
  variation 15481..15580: note = note, n is a, c, g, or t
  variation 5839..5938: note = note, n is a, c, g, or t
  variation 14973..15072: note = note, n is a, c, g, or t
  variation 16499..16598: note = note, n is a, c, g, or t
  variation 15863..15962: note = note, n is a, c, g, or t
  variation 16881..16980: note = note, n is a, c, g, or t
  source 1..23405: mol_type = other DNA
  variation 17328..17427: note = note, n is a, c, g, or t
  variation 16182..16281: note = note, n is a, c, g, or t
  variation 17774..17873: note = note, n is a, c, g, or t
ttcgtgtactctctccaccctatgccggtttgggacaaaaatcgaatgagagcaggctaagcttggttcacgtttgcaccggagacaaactgctgaggcaaaataccgggacaaactaccgtgtcaaactcccgaggcacacaaaatgccggtcgggcggtcgcatcagcaacacacccaaccggcacgcacatctattcaacgttagagaaatctaccccaggtggcgggcaaaaatcggcgcaatcacgggggcaaccagacccgtctgccacgaacgcgcaccgtactcggcgagcgcatcccgcaaggtctgctcgtcaaaacgagccggcggctcccagcagaggcggcgaacataatcggtcgtgatcaggttctgcgccggaatggtcagcttctccgacagctcatcaatcgcctgacgaacctcggtgaacagcgccaagttctcggggcgcttagactcccacgccttcaacggcggcggggcagtcgacggcaaagtgaacggtacagcgttctcaccgcgtgccgccgcagcaatagcacgcacccaacgcggtccctcacgacgcaaaccacgcgtctgaaaaccagggatcgccataatagcgggcacgttacgcggcatggtgcgtgccgcctccacaatcgcagaatcgggcagcaggcgcttcgcgtctacgtccttcttacgcgccagcgagtcacgctcaagccacaggttacgcaacgccgtcagctgcttgaccgaacgcaacatcgtgcggcccttcgtcttacgccaacgctccggctgatccgtcggatccttcaccgggctcttacacaggtactcgaactcctccagggcgtactgcagcttaccctgctggcggagcaaatcctccattgcgtcacgcaaatcaatgagcacgtcaacgtccagcagcgcatagttcagccaggactctggcaggggccggcgcgaccagtcttccttcgagtgcttcttcgccagcttatagccgagtagctcctcaacggtcgcacccaggttcacgcgctccagaccggcaagacgtgcaccaagctccgtatcaaacagacggttcgggcgcataccgagcatatccaggcttgggaagtcctgaattgcggcgtgaataacccactcagcatccgccagagcatcgttaataatgcgcaaatccttaaacgcctcaggatcaatcaggtatagctgatcttcacgcttgagctgcaccaaaaaagcacgcgaaccgtagcggatgccctgggcacgctcagtatcaacagccaccgggccggacgccgccgccaactgctcagcggcacgacgcagaccactctccgtattgataagggtcggaatcggtgcggaaggggcctccagaggaacaacgtccggaacttcgataccgttaagggtcagctgaggggtgcctgcggcattctgttcagctgcggtactcatgcactcaatccttttcctctgtctggttcgacgcgcccatacgatgggccaaatgcccgggtaggcgcacgcccgagcaaacacgagcccgggcggggtggcgtgcccgcgaaggcactacgccattctacccgcccgagcctaaagcctcgaatttagagagactcacaataaggggttcaccggcgtgcccgcgagggggcttgccggggtttattcggcggattccgcctcgtcagctggggtatcaccgggctgtgcttcacccggctgtgctttattagccgcggcttcaccagcgggggccagcgtcaagcacaccgaattaatgcaataccgcaaatccgtgggagtcgggtagccctcaccctcaaacacgtgacccaggtgcgaatcgcaggcggcgcaacgcacctccacgcggcgcataccgaaggtcgtgtcctccaagtaacgcacacggtcctcagccagcggcgcgaaaaacgacggccaaccacaatgcgaatcgaacttctgatcggaacggaacagctccgtaccgcaggcacggcaagaatacacaccctccgtgtgagtgttccagtactcgcccgtgaacgcgcgctcggtgccgccctcacgcagaacagcgtactcttcaggcttgagcacctcacgccagttcttggcgatagcacccacgccgggtagcgaattgcccatcatgactccttcagtttgctctcatgcccaggctcttacggcatatgtaacgccgcggccgggcggattattcccgctacgcgcggactaagcgcggatgtcagcgtatttgccgttggtgagcttcagcaggtcgtccggggcgagctcaacgtccaggccgcgcttaccgccagaaaccatgatcgtgtcaaaaagctgcgcagactcatccagcagggtgggggagggggtcttctggcccagcggagaaataccgcccactacgtagccggtgcggcgctcagcgaccttcgggtcgcacatggaggcgctcttccaacccagggccgccgcggcagccttaatgttcagcttgccagagaccggcacgatcgcgaccgcgaaatccttctcgtgcacaatcagcagggtcttgaacacctgctcctcggaggcgccgaggctcttcgcggcctcttcaccgaaggatgtgacgccctcaacatgctcgtattcgcgcatctggaagggggtgttcgtctcggtcagcagtgctacggcggcggttgctgcgccgctcttcttacctttagttttcttagccatacaaccattttacggaagtcgccatacgccgatacctatgcgctgatacctatgcgccgagaagccacatgtgtttcgaaaagccacttctttggtggcttttcgaaacacatgtggcttctcaatggttatggggttatttcagtagccctttttccttcagctgttcttgagaaagcgagccaatgacagtccaaaatccatctgaatatttgagaatgtaagcgccgttatcgtccccctcggcagtatttttgtcttcggtgtatgacccgtcgggttcaacatatatcacgaattcccaaatgtgcttcagcatgagagtgtattctttagtttttcatcatagataaaacgccaaaaatgacgtttgtctacgttctgaggtagcctttaggctccattttttcttagtaaataccgatgagtaattgcatgccaagactagtcaggatgatagcaatccagcaaagggctccaagaagaatggattttccactggatttgatcatagcaatgaggttggttttgagaccaatagcactcatagccatgatgatgaagaatatggagagttgtttgagaggtgaaaagaagctagtgctgacaccgaaagatgtgagaagagtagttagcagagaagctaggataaagtagagaatgaaaacggggaagatttttttaagcttcactccttggttgtcgccttgttgacggctttgccaataggagaggaagagaacgatagggataatagctagagtacgtgtcagtttgacaatagttgcaggctcaagagtgtttgcattgtaaagactatcccaggcactagcagtagctgtcacagaggaagtatcgttgaccgcagtacccgcaaagagagcaaaaccttcgttggaaagatggagccaagaacctagagtcggaaagataagagctgccaagacattgaagaaaaagataacagaaatggcttgggctacttctttttccttggcgtgaataacaggagcagtcgctgcaatggcagaaccgccacagatagaagatccaactccaatcaaggtagctagctttgtatcaaggttaaaaaagcgttggaaaaagaaagcaataattaaagcgatagaaatggtcgaaatgatgacaggaagggaagatgttccaactgcgaaaacttgtgagatactgagtccaaacccaagcaaaataacagcatactgaagcaattttttggagctgtaagtcaaaccggcatccagttgtgtataggaagtgagaaagggatggagagtcattccgataaaaatggcgaaaacaggtgctcccacaacaggcagaaatcctcctaaaacccaagagatgatagaaatgatcaggcagactgacagtcctgcccaattttttgatagaaatgacataaaaacctccgaaaatagatactccttattatagtcttatttggtaaaactagaaagtaggaatacagacccagtccggggagcgcaccacctcaccctccgcgctgataaaggcgttcgatatccttgaggaacttaatatccttctcgtaggtatccagcatatagggccatacatactgcatgtcaccggtctgaatggcgtagttatgggagacaagccaatccttcatcatgcggtagaggccttgttcagtctcagggtactgtgcgggttccttgcggggttcctggacgttctgcgcaggaccgtactcgtcggctttgcggtactctccgtcaggagctttagaattacctgaatacccgcgagttactcttggggtagtgcttgccgaaggcgactcagacgccgccgaagaagccgaagcggtctcgctcggagcagtggtcgatgatgccgaggcgctcgcctcgttagcagcctgttggccgcacgccgcaagcagggcaccaatgcccatgagcgcgccgctgcccagcagagcgcggcgggtcaaaagagtggaagtcatggaagtgtattccttatatcggcgaatcaaagctggatggatttatagctcgtgctcgtatttgctattgataattttccagtagccatcagagtatgtgtagagaaaatagaaagtatcgtcacttgtatcggtatttgcccttcttgttatatcgccattcgattcaatgtatatttcagttgaccaaattctgcggactttcatacgatagattttcttagagtcgtcataaaatagggcgctttcgctctgatatgaatctagggaatctacagcccatccgccatttttgtaaagtatttcaatatatttgtagaacccatattcttcagtattttctgttatatatttgaatgcataggagcagtcaccagtctgaattgcgtagttatgggcattgacccaatcctccatcatatgattgaggccttcttcagtttcgggatactgtgcaggctcattgcgaggcttggggacattctgcgcagggcctttgccgtcagccttgcggtattccccatccggcgccttcgagccgcccgagtagccgcgggtaatgaccgggctcggagtagccgatgcagaagcggtatcggatgccgccgccgacgccgaagcggtctcgctcggcgcggcagaggcggtggctgccccctcgttatttgcctgctggccacacgccgcaagcagggcccccaggcccacaaacacgccgctgctcagcattgagcggcgggtcaaaagagtggaagtcatagaggaaactcctcatatcggtgtgaagtgtgaataggtggctggctagaaaccggaagactatccagccgaagggaagaaccccgatagatgagaagccacatgtgtttcgaaaagccaccattatcgtggcttctcggcgaacatgtggcttctcagcgtaagacccacggggggctttacatgtcgggccagtcgcggtgcagtgaatactctgtgtccccgtcaccattgtcgttcagatgccagcgctggccggtgcggatatcggctttgcgtaggcgcgggttcgggttatccttcttacccannnnnnnnnnnnnnnnnnnnnnnnnnnnnnnnnnnnnnnnnnnnnnnnnnnnnnnnnnnnnnnnnnnnnnnnnnnnnnnnnnnnnnnnnnnnnnnnnnnngtaggcgcgggttcgggttatccttcttacccatggtggggtcgttcttgcagccccaacgagtatcgtcttcatcgcaggtgccgccgacacggcccacatcaacccaccacacacgaatcagcaacggatcgacagtttccttcgtcaacacgacatccagagcatgccagtcaccgccgttcacacggaaacgaccagagtaagacaccgtcgcgtaagcgtggaagttgcccgaacgcttatagacataactggtcgcggtcttgcgtgactcttcaccacgtgccctgctaaccggcttacccatcgtgtagaagctaccctcatcaccgttgccatactggatagtcatctgggtggggtaggattccatctccacgtggccaatcatcaggtccccttcccaacgtgcggtgggtgcgtcaacgtagaagttgaccgcctggttcttgtagacgttggggttgtcattaccctgaccagagccaaggttataggactgcttcaacacaggagcctggatatcggttttagcgaattggtcctcaatctcttggagcatttcttcaggagaaggtcccttgggttgttcggggttattcgaggtcagcgttttggtgtcgttgggtacgcagtagtggccgccaacatggttggggattttgtaggcgttatctccctgaggtagagatcccatgacgtagtggccaggacgcttatcttgcgtataacattcaatacctccattggcctgtgcgccgctttttgggaagtacattttttgaccgctgccatctcgcatctcaacggttctctctctaaattcttcttctgcatttttcgtgtcagctacaagagtcgcattgtcagtctgtgaattgcttgtgctggtatctctctcgccttcgcctgaaggtctgggaggaggagccggtgttgaagtttcgccaggaaaccgtacacaatgcccgtcagggttctgacactctgccgcgttagctatagtaaaagagcttagacaaaacaacgcggtacacaataagagattagcaggtttgataagcttgaaaatcatttcttcagaatccctttattgaccagatcgctctgagaaagagtgtttacaattttccagtatccatcgttaaaattaagaataaatgcacaaatatcatcatcatccgctgtatttttattagtggttgtttgcccattagtctcaacatatgtgatgtaagtccataggtggcgtgttatcagcatgtactctttagtatctgagttgaaagtaaaggccccttcctgctggtagccgtcggttccttcgataacccatccaccgcgctggtatagcccctcaagatagtcatagaatttatactcttgtgtattttttcccatatacattcgtgcataactacaatcaccggtctggattccgtagttatgagacttcagccaatcctccatcatgctctgcattccttcttcggtctcaggatactgagcaggctcattacggggcttggggacgttctgtgcagggccgtagccgtcggccttacggtactcgccgtcgggtgctttggattgccctgagtatccgcgagtaacctttggtttaggggtggcgctcgccgaaggcgactcagataccgccgcagacgccgaagccgactcgctcggcgctgcggaggcggtggctgccgcctcattatttgcctgctggccgcaggctgcgagcagggcaccaatgcccacaagtgtgccactgcccaacagggtacggcggttgaaaatggtcgaatccatagaagatacgctcctatcatcggtgacggtgtgatatatgtgcatgtcaggccattattggcaggtcaaactgaccaccggaaggaaaacagccccgtagcgcacccaacaaacgcatcaatgcgtcatggaacactacagttaccaccctaccgcatctttgtgtctatttgcgttgctttgggtgcaatagtatctgaacgtcattattcggacacatcaatgctttatgcatcaaatatctctgcgtccacgaaggcgccacccctgcagaatttgtgccatggtttagtgtcttctgccatggcttttaactacgaccaaagacactaacctatggcacgaatccgtaacccattaccgaatttgggtctgcgtcggatatgtgggcgggggtcggtaatgacttagttttttcggtaatgggttagtgactttgggctgggggttttaaccattaccaaagacactaagtcatgactgaaattgctaagtcatgaccgaacctccacccggtactgagcagcccaaaaaacagagtagcctccgcacccgaacgcccaggccttcgcaatcccgccctccgcgttccagctcagaagcccctcccacatatcccaccccaccccctcctcgtgcccgtaatgtggcgggcaactcatgcggctcacgcggggtgttagacagtactacacttaaagcggaagtcacatcgccgtcactgaagaaaagagtttttgtgcccaccacgaccgtacatttgaccgaccgcatccctcgcgtttctgctgatgagttgctggcgggtttccgcccctctgagcgttttggtgaagtgtcttttgatagctatattcctgatccgaatcagccgtcgcaggctgaggctgtgcagaagctgaaggattttggcgacaagattaatggtggcggtgctggtgccggtttctttggtcgcctgtttggtggcaagaagaaggattctacgaaggctggcctgtaccttgacggcggttttggtgtgggtaagactcacttgttggcgtcgctgtggcattatgtggatggcccgaaggcgttcggtacttttgtggagtacacgaacctggtgggtgcgttgacgttccgtaagacggttgaggcgttgagcagctacaagctggtgtgcattgacgagtttgagctggatgatccgggtgatactgtgctcatgtctcgtctgatgcgtgagctggcggatgctggcgtgaagcttgtggcgacctcgaacacgctgcctggtgcgctgggtgagggccgtttcgcggctgaggattttaagcgtgagattcaggtgcttgcttcgcagtttgaggtgcgccgtgtggatggtgaggatttccgtcaccgtggcctgcctgctgcgccggagcctgttgctgatgatgcgtttgatgcgaaggttgaggaagtgttcggcggccagactgttggtgttgataacttcgctgacctggtggagcatctggcgaaggtgcacccgtcgcgttaccgtcagctgattgatggcctggatggtattgcgtggcgtgatgttcacccgattactgagcagtctgtggcgttgcgttttgtggtgttggctgaccgcctgtatgacaaggacctgccgattgtttcttcgggtgtgccttttgacaaggtgtttactgaggagatgctggctggtggttatcagaagaagtatttccgtgcggtgtctcgtttgactgcgttggctcgtgagggcatgctcggcgaatctgagtagccgccgcctggcgccgcgaaactgggcagcgtgaattgcgcagcgttaactgcgccgaaaagtttatatagtgaagacccccgccggatgctccacgagagaatccggagggggtctttgtttgccttggctagttaaatctgcgggctcataaatgcctgcagtagataaggaagttaaaaacataccgcccgctcctattggaaaacggacggtgagaagtcagcatcggaaggacgccttattaagaatctttcgttactgattctagcacaggggtttgctgcttctgcaagtgcttcacataaaatttttttgcgcttttttggggtgtgaatgacggtttcgaatgcgtatatggcgtagtcaggttattgttagtctcagatgggcgcaataatgcttatcaagagtgcaatgcctgcacttgattgcaatcactcacgaaggagtatgccatgtctacggatccgaagaactatcgtatcggtgtcgatgttggtgaccgctctgttggtcttgctgctatcgaatttgatgatgctggtttccctatccagaagttggctttggtgactttccgccatgacggtggtcttgacccgacgaagaataagacccctgtgagccgtaaaaaaactcgcggtgatgctcgtcgtacgatgcgcatgaaccgtcgccgtaagcagcgtctgcgcgaccttgatatgatgctgacgaatctgggctacactgtgccggaaggccctgagcctgagacctatgaggcatggacttcgcgtgcgctgttggcttctattaagctggctaacgttgatgagctgaatgagcatttggtgcgcgctgtgcgccatatggctcgtcaccgtggttgggctaatccgtggtggtctattgatcggctggaaaacgcatcgcgagaaccctcagagacttttgagattattctggctcgtgcgcgtgagctgtttggtgagaaggttccggctgatccgactttgggtatgttgggtgctcttgccgctaataatgaggttcttctgcgtcccagggatgggaagaagaaaaagactggatatgtacgtggtactcctctgctggtggctaaggtccgtcaggaggaccagctggctgagcttcgtcgcatttgtgagattcagggtattgaagggcagtatgacgctcttcgcagtgcaatttttacgcataagatggcatatgtaccgacggagcgtgtaggtaaggatcctctgaatccttcgaagaaccgaacgattcgcgcgtctctggagttccaggagttccgcattcttgattcggtggcgaatctgcgtgtacgtactgattctcgttcgaagcgtgagttgactgaggcggagtacgatgtagctgtcgagtttttgatgagctacaccgctaatgagcagccgagctgggctgatgttgctgaggtgattggtgttcctggcaaccgtctgattgctccggttcttgaggacgttcagcagaagaccgcgcccttcgaccgttcgtctgctgccttcgagaaggcgatgggtaagaagactgaggctcgtcagtggtgggaatctactgatgacgatcagttgcgtagtctgttcatctcatttttggttgatgcaacggatgatactgaagaggctgcggctgaagccggtttgccggaactgtatatgagctggccggctgaggaacgcgaagtgctctctgatattgattttgagaagggtcgtgttgcttatagccaggagaccctgtcaaagctgagcgagtacatgcatgagtaccgcgttggtcttcatgaagcccgtaaggctgtcttcggtgtggacgatacgtggcgtcccccgttggataagctggatgagcagactggtcagccgacggttgaccgtgtgttgacgattctgcgccgttttgtgttggattgtgagcgtcagtggggtcgtccgcgtgcgattactgtggagcatgctcgtactggtttggtgggtcctgcgcagcgtcaggagattttgaatgaacagaagaagaaccgtgagaataatgagcttatccgcggtgacctgcgtaagtcgggtgtagaaaatccgagtcgcgcggaagttcgtcgtcatttgattgtgcaggagcaggagtcccagtgtctttactgcggtgctgtgatcaggacggatacttctgagctggatcatattgttccgcgtgctggtggaggttcatctcgtcgtgagaatatggcggcggtgtgccattattgtaattcgaagaagaagcggacgctgttctatgattgggctggtcctgtgaagttgcaggagaccgttgaccgtgttcgccagttggaggcctttaaggattctaagaaggcgaaaatgttcaagaatcagattcgtcgtttgaagcagacggaggctgatgtgccgattgatgagcgttctctggcttcgacttcgtatgcggctgtggcggtgcgtgagcgtttggagcagcactttaatgagggtcttgcacctgatgataagagccgtgtggtgctggacgtttatgcaggtgccgtaacgcgcgagtcccgtcgcgccggtggtatcgatgagcgtattcttctgcgcggtgagcgtgataagaaccgttttgatgtgcgccaccatgcaattgatgcagcagttatgaccctcctgaatcgttcggttgctttgactttggagcagcgtagccagctgaggcgtgcgttttatgagctggagctggataaactggaccgtgatcagctgaagccgggcgaagattggcgtaactttaccggcctgtacgaggcatctcagaataagttctccgagtggaagaaagcagctacagttttgggcgatttgctggctgaagcaattgaggatgatgctattgctgtggcgagtccgctccgtttgcgtccgcagaatggctccgtgcacgatgacacgattaatgcggtgaagaagctgactttgggttctgcatggcctgctgatgctgtgaagcgtattgtcgatccggagatttacctggctatgaaggacgtgctgggtaaattgaaggagcttcctgaggattctgctcgctcgcttgagctgtcggatggccgctacattgaggctgatgatgaggtactgttcttcccgaagaaggcagcatcgattttgactcctcgtggcgcggctgagattggtaattcgattcatcatgctcgcctgtatagttggctgacgaagaagagcgaactgaagttcggtatgctccgtgtgtatggtgcggagttcccgtggctgatgcgtgaaagcggtagccgtgatgttttgcatatgcccattcatccgggttctcagtctttccgcggcatgcaggatggtgtgcgcaaggcggttgagagtggcgaagcggttgagtttgggtggattactcaggatgatgagttggagtttgatccggaagactacattgctcacggtggtgatgatgagctgaatcggcttcttcgggttatgccggagcgccgttggcgtgtggatggcttctataatgcgggtactttgcgcattcgtccggctttgttgtctgctgagcagcttccttctgagcttcagaagaaggttgctgataagactttgagcgacgttgaggtcattcttttgagggctgttcagaggggcttgtttgttgctattagcggcttcctgcctttggagagcctgaaggttattcgtcgcaataacttgggtttccctcgttggcgtggtaacggcaatctgccgacttcgttcgaggttcgttcttcggcgttgcgcgctctgggcgtggaaggctaggagagcgtgatggatagtaagtggcgtgttcttgatttcactgcctatgagggcttcctgtcgtatgagagggggcgaatcgtggcgggggagcggagcacgccacttgctgaggttgattttattctcctcggtatggggtgctcctggggttacggcctggtggctggcctggaacgttttgatgttgctgccgcgatttgtgattggcgtaatcagccgatttctacgttgtatcactggtctgagaatacgaaggtgtttactcgccatgaggctcaggctgagttgagtgtgccgcgcgcgaagaatgcgtggatgcagattgtgaaggctaagcttcgtggtcaggcgaattgtcttgacgctatggggcggccgggcgctgcggatattcgtgcattggctcgttcggtgcgttctggtgatccgtcgaatgctgaggctcagggggcgcgcctgtattggggtgcgttccttccggagcgggggttccgtcgtcagcagctttctgatgacgtggtgaatggaatgctcaattatgggtatacgattcttcgcggcagggttttgactcgtgtgattgctgcgggtttgtgccccacgctgtcgctgttccaccggcatcgttcgaatgcttttgcgttggttgatgatttggtggagccgttccgccctgcggtggattttgcggtgtatcagttgatttctgctggttctgttgagttgggtcggcaggagaaggcggctttggtgcaggtgttgtctgatgcggtgaatggtgattcgccgtttaagcttcgtactgtggtggaggatttttgttctgagtttgcgctctatgttgagggtgggcgtgataggttgtcggttccggtgtgggagttgacggctgttgaggagttgcgtgaggatggctgatcctgtgtggttgatggtgatgtttgatttgccggtgaagacgaagagtgagcggaggctggcgaatcgttatcgtcatgttctgctggatttgggttttgaccgtatgcagttgagtgtttatgcgaagtactatctgaatgggaatgcgacggggtctgatttgttccggttgcaggttgaggttccgccgggtggtgcgattcgtattatgcgttttacggatgctcagtgggctggttcgattcgccatttggggccggaggtgcagcagatggaggagaagccggatgctttagatattttctagagggtttttgtaatgaatgagccggtggggtagtggctttatctggtcactacctcaccggctcgtttttcctttcgggcctcgtttagagagggtatctgatgcaagtgtggggcagtttttctttcgaaaaactaccccatttatgcccctgactaggggaaacgcttgattacttaagtatatcaaggcgaataatgaaagattctcaaccgcaccgctaaagataataaccttgaggtaagtatatcaaggcgaataatgaaagattctcaaccgcggtcatgcttatagttgccgcctaataagtatatcaaggcgaataatgaaagattcnnnnnnnnnnnnnnnnnnnnnnnnnnnnnnnnnnnnnnnnnnnnnnnnnnnnnnnnnnnnnnnnnnnnnnnnnnnnnnnnnnnnnnnnnnnnnnnnnnnntatcaaggcgaataatgaaagattctcaactgttcagaccatgcgtgttttcgccatgtaagtatatcaaggcgaataatgaaagattctcaaccacccaattcggagacaaaacgcctgtataagtatatcaaggcgaataatgaaagattctcaaccgttcctggctggcaagcaagaatcgaataagtatatcaaggcgaataatgaaagattctcaacgcgccccgcacggtgcgccgggcgcatataagtatatcaaggcgaataatgaaagattctcaacccgctcttcgtggtgaaatggatcctattaagtatatcaaggcgaataatgaaagattctcaacgacagataggcgttacctgtgaaagatttaagtatatcaaggcgaataatgaaagattnnnnnnnnnnnnnnnnnnnnnnnnnnnnnnnnnnnnnnnnnnnnnnnnnnnnnnnnnnnnnnnnnnnnnnnnnnnnnnnnnnnnnnnnnnnnnnnnnnnnatatcaaggcgaataatgaaagattctcaactgtgctcctgccgactttgaaggtggtgtaagtatatcaaggcgaataatgaaagattctcaacgcggaaaggcggggtacttctgagattttaagtatatcaaggcgaataatgaaagattctcaacatgtgcgcctctaccagcggtgcggttttaagtatatcaaggcgaataatgaaagattctcaactcaaccgtgacggcttgctcgatgataataagtatatcaaggcgaataatgaaagattcnnnnnnnnnnnnnnnnnnnnnnnnnnnnnnnnnnnnnnnnnnnnnnnnnnnnnnnnnnnnnnnnnnnnnnnnnnnnnnnnnnnnnnnnnnnnnnnnnnnnatatcaaggcgaataatgaaagattctcaacgacttcaccggcgcaacgaaaaatgatgtaagtatatcaaggcgaataatgaaagattctcaacgaagttgacggtgcgtacgcagccgtcttaagtatatcaaggcgaataatgaaagattctcaacagtcaggcgcgattacctcgcccagcgctaagtatatcaaggcgaataatgaaagattctnnnnnnnnnnnnnnnnnnnnnnnnnnnnnnnnnnnnnnnnnnnnnnnnnnnnnnnnnnnnnnnnnnnnnnnnnnnnnnnnnnnnnnnnnnnnnnnnnnnnatcaaggcgaataatgaaagattctcaacagtcactgatgcgggcgtacatggcgagtaagtatatcaaggcgaataatgaaagattctcaaccccgtttgtgccgggtgtgaccagcgagtaagtatatcaaggcgaataatgaaagattctcaactaagctcttcgcgtagggtgtcggtttctaagtatatcaaggcgaataatgaaagattctnnnnnnnnnnnnnnnnnnnnnnnnnnnnnnnnnnnnnnnnnnnnnnnnnnnnnnnnnnnnnnnnnnnnnnnnnnnnnnnnnnnnnnnnnnnnnnnnnnnntatcaaggcgaataatgaaagattctcaaccggctcaggcgcaggatccaggggatggtaagtatatcaaggcgaataatgaaagattctcaaccctctacgatgcgagagtcatagggcgttaagtatatcaaggcgaataatgaaagattctcaactggtagtgtagctggtttctcggtcggttaagtatatcaaggcgaataatgaaagattctcaacgcagcgaatcacgcgatgcgggcatcaataagtatatcaaggcgaataatgaaagattctnnnnnnnnnnnnnnnnnnnnnnnnnnnnnnnnnnnnnnnnnnnnnnnnnnnnnnnnnnnnnnnnnnnnnnnnnnnnnnnnnnnnnnnnnnnnnnnnnnnntatatcaaggcgaataatgaaagattctcaacttcgaggattcgtcgttgcagtttttcataagtatatcaaggcgaataatgaaagattctcaaccaacaaaaggactggagcgcatgggcagtaagtatatcaaggcgaataatgaaagattctcaacttacgcctcccgcatccgcaagatgatttaagtatatcaaggcgaataatgaaagattctcaacttgctcatctcggggcggcactcgatgctaagtatatcaaggcgaataatgaaagattctcaacgttcagcgatgctgtatgattcggttgctaagtatatcaaggcgaataatgaaagattcnnnnnnnnnnnnnnnnnnnnnnnnnnnnnnnnnnnnnnnnnnnnnnnnnnnnnnnnnnnnnnnnnnnnnnnnnnnnnnnnnnnnnnnnnnnnnnnnnnnnatatcaaggcgaataatgaaagattctcaaccaagctgccggcatgtatctgggaggtttaagtatatcaaggcgaataatgaaagattctcaacccggtgcgcatgagactataaacgtgtataagtatatcaaggcgaataatgaaagattctcaaccgtgtgcgccgatggtgagggattcgagtaagtatatcaaggcgaataatgaaagattctcaaccggcgttcgcactggcggtggcgatctataagtatatcaaggcgaataatgaaagattctcaactgtaatttttcgggtacttttggacgtataagtatatcaaggcgaataatgaaagattcnnnnnnnnnnnnnnnnnnnnnnnnnnnnnnnnnnnnnnnnnnnnnnnnnnnnnnnnnnnnnnnnnnnnnnnnnnnnnnnnnnnnnnnnnnnnnnnnnnnntatatcaaggcgaataatgaaagattctcaacggtgtacagctcttcatatgcacaggagtaagtatatcaaggtgaataatgaaagattctcaaccactccctcacgccccgggatcgctcattaagtatatcaaggcgaattatgaaagattctcaactcacacctcatgcacccagtaagtcaggtgtggtaagtatatcaaggttggttgtaaaacgctctcaggcaggggtgggcgagagtagggtgtgcattggggtcgaatcaaggtgatttaaggaaaataatataccgaaaaataaatatttgtattttgatatattttggataatgaaacggggtgggctacaagaaatagtccaccccgcaaatattccaagggtgtgcagtgaaatatttaagtaataaaaatatgattgaaagattctcaacattctacaacttatcacatggcacaccgtaattatagcaggagtacatgcagcttttctagttttcatatggttctagacattagttagagactaatatttttatgagaaagaaacttgtggcaattatctgataagtggccagtaaagttcttgcgtgataaataaatctggaaaatatatgaataaagaagtaccgattcattagagtaatctaataaatgcaactataaagaatagagggaggggccctccggtcgtattgccggagggcccctccctctatctattatgagtgcctacatatcgctgggcggatatgcggtagctggtgcgctagggaaccgcccctttacgccaccgccacggtacccttggctgcggtgccgcttcgggtccacagcaggagcgctgccacgctgttgatgatgtagaaaatgtatttgccgacgttcgcgaagttgccctgagtcagcgccttgatgcactgcacggtgttgtacgcgaaccagaactgccactgcatcgtcagcttcagtgcgttcagaatgttcgctgacagggacaggccaaacactgcggtcgtgatccaaaacaggaacgaggtcttgccatcgtaaccgacattgttcgcaatcagatagtaaccgatatagttcgcaatcagggagaacgcgaacgaaccgaccacaatgccgctaataatcagctggcccttcttgccggtcggcggttccatcgccttgccgcgttcggagttctgccacctacgaatcgcgaaggtgtatacgatgaaggtcaccgggtaggtgatgattgcagccttgttacccagaatgtagtcgattgctccggacagtgccgtgttaataatgccgagcacgttgccaacgttggagaggcggccggtcaggcgggtagacatcatcgaaatacccacgttaatcacggaaattacgccgaggggaatgaagttcgtgattgggccccagtcgacgtatttagcgaggctggtgcccaggtatcctgaggcgattgcgatggcgataaccagtgccacgccgaagatgtcggcgtacttggacttggcgaagaagaggagggccttctcgattgagaattccttggcctccatgggtaactcctttgttgagaatataggaacagtgatagggtaccaataactataactctttgaaaaggggttgaatcggcgtgtcacacataaaacttcagaaacccacatattccacatctcggaacaccgcggcattgggtaattcaaaatcaccccatcaagaacccataccaacttccggcaaaccttgccagatatcgcccctacttcgttgaacatcgaaaatgggcgtaaaatcaccgtcgtttcgtcttcgctttaaaggggaccttaaggtacgctagatgactgggtcagggaaccgtgccggtctcactcaccgcgcatccgcccgacagacacccgcaccccgtacgctgcgtctcactcacgcacacaggggagggaacccaacgtatcggcctcactcaccgtttacgccgctgtccgcgcatcctgccacccgtaactcactcaactcaaacaagaactgaataggacaatcatgcccttgcttacccatcgactctcacgacgattctttgtaaagggtgcttccgccgctgctgctgcaggcgcactgaccctgcaggcacaggccgctcaggctgacgaagctcccacaaacattgccccggcaaccgaggaaactaaaggcccgcgcctcgttattcagcgtgccaccatcactgaaaccggtatgaccgtgaactacactgcacacggtctgcgcgaattcctcaccgaaggcaccactctgaccgtacgccacggctacgttcgtaacgactctttcgaaactctgcgctcctggccgctcacccccgaatttgacggtgatgctgacagcttcagcggtagcgaccagttccccatcgagctgatgcagggtgagggtgttgatcacgccctgcagctggatatttgctccgacccgtggggccaggaggttacccaccagattgctgcgcgcatccccgtggctgagactaagatcctgaagacttctttcgaggatgttccgggtagccacccgttcgctgaggatatccgcatggcgaaccagaagaagtggctgatgccgaacccgcagtctggggcgtttgagccggaccgccctgtgactcgtgaggagcttattgctctgctgaaccacgctgctggtcacgctggcgtgagtgaaaactctaatgttgcaccctttgcggatgcggctggccgcccgaccgcgaacgcgctgcactgggctcgtgaccgcaagatcaccgagccgctcactggtggcgacaagattgacccgaccgcaccggtttctcacgaggagctggtggctgtgctgttccagtacaacgcggaggttcagctgactgaaatgaacgaggctgctggttctcgtttccgcgacgtgctgggtgccggtactctgcaccgttacgttgcgtgggctggcgcgaacgacatcgtgctggattcttcgggtgtgttcaacccgaccgcgccgactactcgcgcggagctggctcgtttcattcgccgctacaagctacagaacctgctgttcactgacttctcgtatgtctcctaatttttagtcaccccggcaccgtgttacccaggtaccgtgcgttggggtgtgtggaccccccccgtcttctggcttttgctggaggcgggggttttgccatgtcccgtattgccgcttctcggggagttttagtgacaggctgtgcctggcatatgaaattttgcgttatatatgcctaaaatcttgcaaaatcctgtgcgctaagtaagtattacctagaaggtaagttaaaggttgccttacttaatactgtgtgaagactagtttccttcctcgtgggcccacgaaacccataccaaagagcaggaaaaacgcggcgcctcaccacccatcggtgggggagagacgcaccttcacacaccacccacgaaaaaggacatacatatgaacctcgcttcaagcaaggcattcaagggcctcgccgttggatcgctggcactggcaatttccggcgttgccaccatccccgcatcgttcgcggcagactccaccccggcagcaagccagagcagcgaagctcgcaccatcaccgataaggcgatggctaagatcactcagggcctgcccggccagttccaggtcgcatactccaagaagaccaacaagatttgggttgcgggcactgcagaccgcgacaagcacgtttccactatcgctcgtattgacgcgaactccctgaagattgaagcagtcgccgagctgcccatcgtcaagaacgacaaaggctaccagtacgacgcagcttacggcatcaccgttgacgatgtagacggtaccgtctgggttaccaacaccaccgacaactccgtgtccgtgtacgatcaggcaaccctgcagcagacctggaccaccgcaggtatcgcagagaccgacccgaactggattgagcacccccgctccgttctggttgaccacgagtccggcaaggcgttcgtgaccggccgcttcttcgtatccgctatcgacctgaagaccaagcaggttgagaagatccagctcgaaggcgcacccgacggcggcacccgctacatcagcatgaacatcctggttgacggcggtaagctgtacgttcccgagcgtaccggcggcaagattttcgtcatcgacaccaagaccttcaaggtagagagcagcttcgacaccaagggcaacgctgagggtgaggttcgcccctccgacatcgcgattgaccactcccagaacgaaatttacgtctcctcccagggcgtgaagggcgcgaactccggtgtatccgtgtacgatgcgaccacctacgagttcaagaagttcatccccttcggcacccaggcgctctcgctcgataacgatgaggcgaacgacttggtgtacgtgaccgacttcggcaccggcaaggtgggcgtgattgacggcggcgcagcggacaagctgatcgctgaggtcgccatgaacggcggcaaggcaaacgacctggtcgtactgcccaacggctccgttgtcgctgtggacaagcaggctagcgcaaccgcaaccgtgccctacgtcctcgacggcaccaccggcaccgtcagcacctccagccaggtcaccagcaagccttctaaggacaagcagggcaacgaggttcccgccaagacctccgagattcaggcgaactccatcctgaagttcaaggtcaccgcaaccgcaggtgacaactccgaggtcaagcaggtcacccccgaaacccgcgagttccagggctacccggcaaccgccaccaagaccaaggcagccgacaccaccaccccctccaccgaggcacaccgcaccgtggacgcaaacggtagcgttgcaaacatcattcagggtctgcccggccagttccaggttggctactccaagaagaaccacaagctgttcgtacccaccgtgggtgcacgcggcggcctcgcctcctccctggcacgcgtgaatgcagacaccctgcagaccgaggctttcgccgagctgcccgtgaagaagaacgacaagggccagtacggttacacctccgcgtacggcgtgactgttgatgacgtggacggcaccgtctgggttaccaacaccaccgacaactccgtggcagtgtacgaccagcagaccctcaagctcatctggaccaacgagggtgtgaagaaagacgacccgaactggatcgagcacccccgctccgttctggttgaccacgagtccggtaaggcgttcgtgaccggccgttactttgtctctgctattgacctgaagactaagcaggttgagaagattcagcttgagggtgcccccgaaggcggtactcgctacatcagcatgaacctgttcctggacggcggcaagctgtacgtgcccgagcgcaccggcggcaagctcttcgtcgtggacaccaagaccttcaaggt

SEQ ID NO: 3624 - DNA, 23402 bp, synthetic construct
  variation 15293..15392: note = note, n is a, c, g, or t
  variation 5870..5969: note = note, n is a, c, g, or t
  variation 16954..17053: note = note, n is a, c, g, or t
  variation 16317..16416: note = note, n is a, c, g, or t
  variation 16635..16734: note = note, n is a, c, g, or t
  variation 15612..15711: note = note, n is a, c, g, or t
  variation 15932..16031: note = note, n is a, c, g, or t
  variation 14909..15008: note = note, n is a, c, g, or t
  source 1..23402: mol_type = other DNA
  misc_feature 1..23402: note = Synthetic
gctggtcagtgcctcctctgcagggccgtgcacgaccgagccgtcagctacggcgtactcggagccgtggcagggacacacgatgcggttggaatcctgcacctgcacctggcagccctggtgggtgcacacggtgctgaacgccttgtactcacccgcggacggctgggagacgataacggtcgtggagccgtgggtcaggcgtgccgccttgcccacacccactgccgaggcggaacccacctcaacggtgccttcgggtgcggtaacgttggagtcaccttcagcgcaggaggcgagcaacgcaccggatgcgacggcaccggtgatgagggttgcgcggcgggaaaagacgcgcgcagaagattcagttgctgcggtatcgactgcggtgtcgacggcattagattcaactgcggcagatgcagcgggggaggcgcatgccttctgagagcggcagcatccgttgggcgcgggcatggtggttcctttcgtgtactctctccaccctatgccggtttgggataaaaatcgaatgagagcaggctaagcttggttcacgtttgctcccgagacaaaatcctgaggcacactcccgaggcacaaaaatgccggtcgggtggtcgcatcagcaacacacccaaccggcacacatctattgagcgttagtgaaatctaccccaggtgacgggcaaaaatcggcgcaatcacgggggcaaccagacccgtctgccacggacgcgcaccgtactcggcgagtgcatcccgcagggtctgctcgtcaaaacgagccggcggctcccagcagaggcggcgaacataatcggtcgtgatcaggttctgcgccggaatggtcagctcctcagagagctcatcaattgcctgacgaacctcggtgaacaacgccaagttctcggggcgcttagactcccacgccttcaacggcggcggggcagtcgacggcaaagtgaacggtacagcgttctcaccgcgtgccgccgcggcaatagcacgcacccagcgcgggccctcacgacgcagaccgcgcgtctgaaaaccaggaatcgacataatagcgggcacgttacgcggcatggtgcgtgccgcctccacaatcgcggagtcaggcaacagacgcttcgcatcaacgtccttcttacgcgccagcgagtcacgctcaagccacaggttacgcagcgccgtcagctgcttgaccgaacgcaacatcgtgcggcccttcgtcttacgccaacgctccggctgatccgtcggatccttcaccggggtcttgcacaggtactcaaactcctccagagcgtactgcagcttaccctgctggcggagcaaatcctccaacgcatcacgcaaatcaatgagcacgtcaacgtccagcagagcatagttcaaccaggattccggcagggggcggcgcgaccagtcttccttcgagtgcttcttcgccagcttatagccgagaagctcctcaacggtcgcacccaggttcacgcgctccagaccggcaagacgcgcaccaagctccgtatcaaacagacggttcgggcgcataccgagcatatccaggctcgggaagtcctgaattgcggcgtgaataacccactcagcatccgccagagcatcgttaataatgcgcaaatccttaaacgcctcagggtcaatcaggtacagctgatcttcacgcttaagctgcaccaaaaaagcacgcgaaccgtagcggatgccctgggcacgctccgtatcaacagccaccgggccggacgccgccgccaactgctcagcggcacgacgcagaccgctctcagtggtgatgagagtcggaatcggtgcggaaggggtctccagaggaacaacgtccggaacttcgataccgttaagggtcagctgaggggtgcctgcggcattctgttcagctgcggtactcatgcactcaatccttttcctctgcctggttcgacgcgcccatacgatgggccaaatgcccgggtaggcgtacgcccgagcaaacatgagcccgggcggggtgacgtgcccgcgaaggcactacgccattctacccgcccgagcttaaagcctcgaatttagagagactcacaataaggggttcacctgcgtgcctgctgggggggggggtatcgccggggtttattcggcggattccgcctcgtcaaccggagtatcaccaggctgtgctttatcaggcgcggcttcaccagccggggccagcgtcagacacaccgaattaatgcaataccgcaaatccgtgggagtcgggtagccctcaccctcaaacacgtgacccaggtgcgaatcgcaggcggcgcaacgcacctccacacggcgcataccgaacgtcgtgtcctccaggtaacgcacacggtcctcagccagcggcgcgaaaaacgacggccaaccacaatgcgaatcgaacttctgattggaacggaacagctccgtaccgcaggcacggcaagaatacacaccctccgtgtgggtgttccagtactcgccgctgaatgcgcgctcggtgccgccctcacgcagaacagcgtactcttcaggcttgagcacttcacgccagttcttggcgatagcacccacgccgggtagcgaattgcccatcatgactccttcagtttgctctcatgcccaggctcttacggcatatgtaacgccgcggccgggcggattattcccgctgagcgcggactaagcgcggatgtcagcgtactttccgttggtgagcttcagcaggtcgtcgggggcgagctcaacgtccaggccgcgcttaccgccagagaccatgatcgtgtcaaaaagctgcgcagactcatcaagcagggtgggggagggggtcttctgacccagcggagaaataccgcccaccacgtagccggtgcggcgttcggcgaccttcgggtcgcacatggaggcgttcttccagccgagggcagcggcggcagccttaatgttcagcttgccagagaccggcacgattgcgacggcgaaatccttctcgtgcacaatcagcagggtcttgaacacctgctcctcggaagcaccgaggttcttcgcggcttcttccccgaaggaggtgacgccctcaacgtgctcgtattcgcgcatctggaagggggtgttcgtctcggtcagcagtgctacggcggcggttgctgcgccgctcttcttacctttagttttcttagccatacaaccattttacggaagtcaccatgcgccgatacctatgcgctgatacctatgcgccgagaagccacatgtgtttcgagaagccacaataatggtggcttctcgaaacacatgtggcttctcaatggttatggggttatttcagtagccctttttccttcagctgctcttgagaaagcgagccaacgacagtccaaaatccatctgatttgtctacgttctgaggtggcctttaggctccctttttttcttagtaaataccgatgagtaattgcacgccaagactagtcaggatgatagcaatccagcaaagggctccaagaagaatggattttccactggatttaatcatagcaatgaggttggttttgagaccaatagcactcatagccatgatgatgaggaatatggagagttgtttgagaggtgaaaagaagctagtgctgacaccgaaagatgtgagaagagtagttagcagagaagctaggataaagtagagaatgaaaacggggaagatttttttaagcttcactccttggttgtcgccttgttgacggctttgccaataggagaggaagagaacgatagggataatagctagagtacgtgtcagtttgacaatagttgcaggctcaagagtgtttgcattgtaaagactatcccaggcactagcagtagctgtcacagaggaagtatcgttgaccgcagtacccgcaaagagagcaaaaccttcgttggaaagatggagccaagaacctagagtcggaaagataagagctgccaagacattgaagaaaaagataacagaaatggcttgggctacttctttttccttggcgtgaataacaggagcagtcgctgcaatggcagaaccgccacagatagaagatccaactccaatcaaggtagctagctttgtatcaaggttaaaaaagcgttggaaaaagaaagctataatcaatgcaattgaaatagttgaaaggataacaggaagggaagatgttccaactgcgaaaacttgtgagatactgagtccaaacccaagcaaaataacagcatactgaagcagttttttggagctataagtcaaaccggcatccagttgtgtataggaagtgagaaagggatggagaatcattccgataaaaatggcgaaaacaggtgctcccacaacaggcagaaatcctcctaaaacccaagagatgatagaaatgatcagacagactgacagtcctgcccaattttttgatagaaatgacataaaaacctccgagaataaacactccttattataatcttatttgttagaaaaataaaatagaaagtaggaatgcagacccagccctgggcgcacaccacctcagcctccgcgctgataaaggccttcgatatccttgaggaacttaatatccttctcgtaggtatccagcatatagggccatacatactgcatgtcattgcgcggcgggtaagaaaaacggaagtcgtggaaatgtattcctcatatcggtgtggtgtgtaaaaaggtgaatgctgcttagacgttgaattcttcgaagtctagaattgaccacttttggccgtcatgtttcattttgactttgagagtatcgttagttttatcttcgttatcccatgcagtccatttaccgtctggttcaacgtggatttcctgattccagttacgatacattttccagaaatatgtttcgccgtcttcggaccaaggcgacccatcagctgtaaatttttcgatgccgtcgataacccatccgccgcgcctgtatagttttttgacgctttcgcaggcttctaattcggagctgaaattaggcgagatgaattcttgtgcctttgcatagtcaccagtttggataccgtagtttccccactggacccatgcgtcaaatgttttgcgtaggccttccaaggacttttcgttgtagccatcttcgggcgcagtgggtttgggtacattctgggctggaccgtatttgtcagccgagcggtactcgccgtcaggtgccttggagccacccgagtagccgcgggtaatgaccgggctcggagtagccgatgcagaagcggcatcggaaaccgccgcagacgccgaagccgattcgcttggtgcggtggaggcggtggctgccgcctcgttggtggcttgctggccgcaggccgcaagcagagcgccaaggcccagcatcacgccgctgctcaacattgcgcggcgggtaagaaaaacggaagtcatggaagtgtattcctcgtatcggtgtggtgtgtgaataagagagctggttagaaaccggaagactaaccagctgaaggggagaaccccgatagctgagaagccacatgtgtttcgaaaagccacgaaagaagtggcttctcggcgaacatgtggcttctcaacgtaagacccacggcagagagatgccttacatatcgggccagtcgcggtgcagcgagtactccgtgtctccgtcaccgctatcgttcaggtgccagcgctgaccagtgcggatgtcggccttgcgcaggcgcgggttcggattatccttcttacccatcgtcggatcgttcttgcaaccccaacgagtgtcgtcatagctgcagtcacctgccacgcgtcccacatcaannnnnnnnnnnnnnnnnnnnnnnnnnnnnnnnnnnnnnnnnnnnnnnnnnnnnnnnnnnnnnnnnnnnnnnnnnnnnnnnnnnnnnnnnnnnnnnnnnnnctgccacgcgtcccacatcaacccaccacacacgaatcagcagcggatcgacagtttccttcgtcaacacgacatccagagcatgccagtcaccgccgttcacgcggaaacgaccagaataagacacggtcgcgtaggcatggaaattgcctgaacgcttatagacataactggtcgcggtcttgcgtgactcttcgccacgtgccctgctgaccggcttgcccatggtgtagaagctgccctcgtcaccgttgccgtactggatggtcatctgggtggggtaggactccatctccacgtggccaatcatgaggtcgccttcccaacgtgcggtgggtgcgtcgacgtagaagttgacggcctggttcttatagacgttagggttatcttcgccctgaccagagccaaggttataggactgcttcagtacaggggcctggatatcggttttagcgaattggtcctcaacttcttggagcatttcttcaatagtgggacccttaggctgtgcggggtcattagaggtgagagttttggtatcaagtggctggcaatatgttcctagtcctgttttcggatcgtaatttacctcttcgccactaataggcatctcacggatacggctgtatttaccaggttgtcttcccgctgcaagacattccgcttcaccttgcttgcgcgcattacctttgggaatatacataggctgccccaagttgtcttttacttcgtcataatttctacggaattcttcttccttccgctggttctccgcttctatttcaagggatgatttagcggtaggtgagtctatcctagtatctagggtgcctttcctcgcaaagttttgttgtggagtcttttccttagtgaggcatatagcatggccgttatcgctactgcattcctggctgttcgcaggaggaacgctcataaaaacagatgatgtgataacagcaaaagtgagtatatatgcacttcctatttctctgatatggaacatgctatttcaacgaccctttttccttcagctgctcttgagaaagtgagccaacgacagtccaaaatccatccgaatatttgagaatgtaagcgccgctatcgtccccctcggccgtattcgtgtcttcggtgtatgacccgtcgggctcaacatacattacgaattcccaaatatgcttcagcataagggtgtattctttagttttttcatcataaataaactgaccatcgagctgatatttgtcgagaccattaatgatccatccgccgcgcttataaaggcgctcgacatatccgtagaacttttcttcgtcagtttctggtttcacatatgctttggcgtattcgcaatcacccgtctggactgcatagttgtgggctatggtccagtcgttgatcatgttgagagcgccctcctgagtttcggggtattgtttccggctcgggggcttgggtacgttttgcgcgggtccgtagccgtcggctttacggtactcaccgtcaggggctttggattgtccagagtagcctcggatagtagacggggttgccgaagctgatgcagattcagaagctgccgcagatgccgaagcggtctcactcggcgccgcggaggcggtagctgccgcctcattgttagcctgctggccacatgccgcaagcagggcaccaatgcccacaagtgcgccgctacccagcagggtacggcgattaaagatcgttgaatccatagaagatacgctcctatcatcggtgatggtgtgttgtttagttactggtcgagccattattcgtaggtcaagctgaccaccggaaggaaaacagccccgtagtgtgcccaacaagcgcatcaatgcgctgtggagcactacagttaccaccctaccgcatgtttgcggtcgtttgcattcttttgggtgctacagcgacgaaacatcaccatacgagtacctcaatgctttatgcatcaaataagtacctgcacgcaaagaatttacatgtagcggtgagtgttccccgataaaagaattcccgcagcagaccaggggagagggccgcggaccaaaagaatgaacagcaagctaggggagtagacagtagggtggagaaatagccgataggttaagggaatattcgataggctattgcctcctccgcgggtataaaacccacggcgaagacactaacctatcgaacgcagcaccccgtccgagatagaaccagccaacgacgtccccgcctgaagcaaaccccggcacatcctcaccctgctcgcctccgtatccccgcacagcatttacacacccaacacacccacatcccactccctcctcatgcccgcaatgtggcgggcaactcatgcggctcacgcggggtgttagacagtactacacttaaagcggaagtcacatcgccgtcactgaagaaaagagtttttgtgcccaccacgaccgtacacttgaccgaccgcatccctcgcgtttctgctgatgagttgctggcgggtttccgcccctctgagcgttttggtgaagtgtcttttgatagctacattcctgatccgaatcagccgtcgcaggctgaggctgtgcagaagctgaaggattttggcgacaagattaatggtggcggcgctggtgccggtttctttggtcgcctgtttggtggcaagaagaaggattctacgaaggctggcctgtaccttgacggcggttttggtgtgggtaagactcacttgttggcgtcgctgtggcattatgtggatggcccgaaggcgttcggtacttttgtggagtacacgaacctggtgggtgcgttgacgttccgtaagacggttgaggcgttgagcagctacaagcttgtgtgtattgacgagtttgagctggatgatccgggtgatactgtgctcatgtctcgtctgatgcgtgagctggcggatgctggcgtgaagcttgtggcgacctcgaacacgctgcctggtgcgctgggtgagggccgtttcgcggctgaggattttaagcgtgagattcaggtgcttgcttcgcagtttgaggtgcaccgtgtggatggtgaggatttccgtcaccgtggtctgcctgccgcaccggagcctgttgctgatgatgcgtttgatgcgaaggttgaggaagtgttcggcgaccagactgttggtgttgataacttcgctgacctggtggagcatctggcgaaggtgcacccgtcgcgttaccgccagctgatcgatggcctggatggtattgcgtggcgtgatgttcacccgattactgagcagtcggtggcgttgcgttttgtggtgttggctgaccgcctgtatgacaaggacttgccgattgtttcttcgggtgtgccttttgacaaggtgtttactgaggagatgctggctggtggttatcagaagaagtatttccgtgcggtgtctcgtttgactgcgttggctcgtgagggcatgctgggtgaggaggcggagcgctagttccgctgttcgccggggccgagctttggccggctcgggttttgatgcgctgttctttctagtcccgtgagactcgaagctcgcccggtttgcatggttagcttggttagtctggtttacctgaaccgcgccaacccctctcatacgtgaagaccctcgccgggtcgcttaggaagcacccggcgggggtctttgtgcgtcttggctcgttgcatgctgcgggttcgcaaatgcctgcagtagataaggaagttaaaaacataccgcccgttcctaagaggagccggacggtgagaagtcagcatcggaaggatgccttattaagaatctttcgttattgattctagcacagtggttcacgggtttcgcaagtgcttcacataaaaattttttttgcgcttttgggggtgagaatgacggtttcggatgcgtatatggtgtagtcaggttattgttagtctcagatgggcgcaatgatgcttatcaagagtgcaatgcctgcacttgattgcaatcactcacaaaggagtatgacatgtctacggacatgaagaactaccgtatcggtgttgatgtcggcgaccgctctgttggtcttgccgctatcgaatttgatgatgctggtttccctatccagaagcttgctctggtaactttccgccatgacggcggtttggatccgacagataatccgaagagtcgtaaagaaactcgcggtgaagctcgtcgtaggatgcgcatgactcgtcgccgtaagcagcgtctgtgtgacctcgataaggtgcttgagaatttgggctataccgtaccggagggtcctgagcctgagacctatgaggcgtggacttcgcgtgcgctgttggcatcaatcaaactggctagtgctgatgagctgaatgagcatttggtgcgcgctgtgcgtcatatggctcgtcaccgtggttgggctaatccgtggtggtctcttgaccagctggagagggcgtcgcaggagccgtcggagacttttgagattattctggctcgtgcgcgtgagctgtttggtgagaaggttccggctaacccgactttgggtatgctgggtgctcttgccgctaataatgaggttcttctgcgtcccagggctgagaagaagaaaaagactggatatgtacgtggtacccctctgttggccgcacaggtccgtcagatagatcaggtagctgagcttcgtcgtatttgcgaggttcaggatattgaagagcagtatgagactcttcgcaatgcaatttttgcgcataaggttgcatatgtaccgacggagcgtgtggggaaggacccgctggccccttctaaaaaccgaacgattcgcgcgtctctggagtttcaggagttccgtattcttgattcggtggcgaatctgcgtgttcgtactgattctcgtgcgaagcgtgagctgactgagggcgagtatgatgctgctgtcgagttcttgatgggctataccgctaaggagcagcctagctgggccgatgtggctgaagagattggtgttcctggtaaccgattgattgcgccggttcttgaggacgttcagcagaagactgcaccattcgaccgttcgtctgcagctttcgagaaggcaatgagcaagaagactgaggctcgtcagtggtgggagtctaatgatgacgaccagctgcgcagtctgttcattatgttccttgccgatgcaacgaacgatactgaagaggcggcggctgtggcaggtttgcctgagctctatatgagctggccggctgaggaacgtgaagcgctctctaatattgattttgagaagggccgtgttgcttatagtcatgagaccctttcaaagttgagcgagtacatgcatgagtaccgtgttggtcttcatgaagcccgcaaggctgtcttcggtgtggacgatacctggcgcccgcccctggctaagctggaggaaccgacgagtcagccgacggttgaccgcgtgctgactattctgcgccgcttcgtgctggattgtgaacgtcagtggggccgcccgcaggcgatcacggttgagcatgcccgtatcggcttgatgggtcctgtacagcgtcagaagattctgaatgagcagaagaagaaccgtggagagaacgaacgtattcgtaacgaactgcgtgagtccggcgtggagaacccgaaccgcgcggaagttcgtcgccatttaattgtgcaggagcaggaatgccagtgcttgtactgtggcacgatgattacgacgactacttctgagctggaccacatcgtaccgcgcgctggtggcggttcctctcgtcgtgagaatttggcagcggtgtgccgctactgtaacgggaagaagaatcggaagttgttctatgaatgggctggtcctgtgaaaatgcaggagaccattgaccgtgtccgccagttgagggcctttaaggactctaagaaggcgaaaatgttcaagaaccagattcgtcgtttgaagcagactgaggctgatgagccgattgacgagcggtcgctggcttcaacttcgtacgcagctgtggctgtgcgtgagcgtttggaacagcactttaatgagggtcttactctggacgataagagccgcgtggtgctggatgtttacgccggtgccgtgacgcgtgagtctcgccgtgctggtggtattgatgagcgtattttgttgcgcggtgagcgtgataagaaccgctttgatgtgcgccatcatgcggttgatgctgcggtgatgactttgctgaaccgctctgttgctttgactctggaacagcgcagccagctgaggcgtgcgttttatgagcaggggttggacaagctggaccgtgatcagctgaagccggaagaagattggcgtgactttatcggtctgtatccggcttccaaggagaagttcttggaatggaagaagaccgctacagttttgggcgatgtgttggctgaggctatcgaggaggactctattgcggtggtgagcccgcttcgtttgcgtccgcagaacggctcggtacataaggaaactatcgctgcggtgaagaagcagactttgggctcttcctggtcagctgatgctgtgaaacgtattgttgatccggagatttacctggcgatgaaggacgctctcggtaagttgaaggagcttcctgaggattctgcccgttcgcttgagctgtctgatggccgctacattgaagctgatgatgaggtgctgttcttcccagagaatgctgcgtcgattctgactcctcgtggtgtggctgagattggtgggtcgattcatcatgctcgcttgtacagttggctgacgaagaagggggatttgaaggttaatgtactccgtgtttatggcgcggagttcccgtggctgatgcgtgagagtggtagcagtgatgttttgcgaatgcctattcatccgggttctcagtctttccgagatgtgcaggaagaaaccattgaaatgattgaaggtgggtttgcaaaggagattgcttggattacacagaatgatgagttggaatttgaccctgtggagtacattaatcttcctggaagaagcgataagcttacccgtttccttatctacatgccggagactcgctggcgtgtagatggttttccagagagtaggaatcttaggattcgtcccttgatgctttctcaagaggatctcccttccgagattaagaagcataaggaagagaaacagctgtctgatgaagagaaacttctagtggaagcactagagaaaggactcatcattacttctagtaagctcttgggattgaagagcatcaaggttatccgccgcaataacttgggtttccctcgttggcgcggtaacggcaacctgccgacttcgttcgaagtccgttcttcggcgttgcgcgctctgggcgtggaaggctaggcgagcgtgatggatagtaagtggcgtgttcttgatttcactgcctatgaaggcttcctgtcgtatgagagggggcgaatcgtggcgggggagcggagcacgccacttgctgaggttgattttatcctccttggtatggggtgctcctggggctacggtctggtggctggcctggaacgttttgatgttgctgccgcgatttgtgattggcgtaaccagccgatttctacgttgtatcactggtctgagaatacgaaggtgtttactcgccatgaggctcaatctgaattgagcgttccccgtgcgaagaatgcgtggatgcagattataaaggctaagcttcgtggtcaggcaaattgtcttgacgctatggggcggccgggcgctgcggatattcgtgcgttggctcgttcggtgcgttctggtgacccgtcgaatgcggaggcccagggggcgcgcctgtattggggcgcgttccttccggagcagaggttccgtcgtcagcagctctcggatgacgtggtgaatggcatgctcaattatgggtatacgattcttcgcggcagggttttgactcgtgtgattgctgcaggtttgtgccctacgctgtcgctgtttcaccgtcatcgttcgaatgcttttgcgttggttgatgatttggtggagcctttccgtcctgcggtggattatgcggtgtatcagctgatttctgctggttctactgagctgggtcgccaggagaaggcggctttggttcaggtgctgtctgacgcggtgaatgctgattcgccgtttaagctccgtactgtgatggaggatttttgttctgagtttgctctctatgttgagggtaagcgtgataggttgtcggttccggtgtgggagctgacggctgctgaggagttgtgtgaggatggctgatcctgtgtggctgatggtgatgtttgatttgccggtgaagacgaagagtgagcggaagctggcgaatcgttatcgtcatgttctgctggatttgggttttgaccgtatgcagctgagtgtgtatgcgaagtactatctgaatgggaatgcgacggggtctgatttgtttcggttgcaggttgaggttcctccgggtggtgcgattcgtattatgcgttttacggatgctcagtgggctggttcgattcgccatttggggccggaggtgcaacagatggaggagaagccggaggctttagatattttctagcggagcttcacaaaaaatgagccggtggggcagcgaccatgtttttggtagctgccccaccggctcattttttctttcgaatctcgtctagagacgaaattcgaggcgggtatggagcagtttttctctcgaaaaactgccccaattatgcctctgactaggagaaatgcttgattacttaagtatatcaaggcgaataatgaaagattctcaactcatgcccaagcgccacgtggtcatcattaagtatatcaaggcgaataatgaaagattctnnnnnnnnnnnnnnnnnnnnnnnnnnnnnnnnnnnnnnnnnnnnnnnnnnnnnnnnnnnnnnnnnnnnnnnnnnnnnnnnnnnnnnnnnnnnnnnnnnnntatatcaaggcgaataatgaaagattctcaactctgtcagaaccgaccggcgcacaccgataagtatatcaaggcgaataatgaaagattctcaacaatggcatggcagagaacaagaagaagataagtatatcaaggcgaataatgaaagattctcaacgggggggttgcacaaggggggatgatgataagtatatcaaggcgaataatgaaagattctcaactggcttcttcgagagaatttcagcgcgctaagtatatcaaggcgaataatgaaagattctnnnnnnnnnnnnnnnnnnnnnnnnnnnnnnnnnnnnnnnnnnnnnnnnnnnnnnnnnnnnnnnnnnnnnnnnnnnnnnnnnnnnnnnnnnnnnnnnnnnntatatcaaggcgaataatgaaagattctcaacgagtagatgatgataatgaagttccaaataagtatatcaaggcgaataatgaaagattctcaactgtcctatgagtcgcacgcggcgaaatataagtatatcaaggcgaataatgaaagattctcaacgacaaaacggccgagccgccgggcaacgtaagtatatcaaggcgaataatgaaagattcnnnnnnnnnnnnnnnnnnnnnnnnnnnnnnnnnnnnnnnnnnnnnnnnnnnnnnnnnnnnnnnnnnnnnnnnnnnnnnnnnnnnnnnnnnnnnnnnnnnntatatcaaggcgaataatgaaagattctcaaccgtaatggcacgatatggcgatattgtctaagtatatcaaggcgaataatgaaagattctcaacacctgttttcgatgttgttctccatgaataagtatatcaaggcgaataatgaaagattctcaacagggctaccgtggcgacccgcgcggcaataagtatatcaaggcgaataatgaaagattctnnnnnnnnnnnnnnnnnnnnnnnnnnnnnnnnnnnnnnnnnnnnnnnnnnnnnnnnnnnnnnnnnnnnnnnnnnnnnnnnnnnnnnnnnnnnnnnnnnnnatatcaaggcgaataatgaaagattctcaacttgggctgtgcgttctcgcgctggtgtttaagtatatcaaggcgaataatgaaagattctcaacttgaaagcctcggtaagctctagcgtgagtaagtatatcaaggcgaataatgaaagattctcaactcgccgtggccgcaatggtgtgcgtcagtaagtatatcaaggcgaataatgaaagattctcaacgctcagcgacagtgaggccaccatgcactaagtatatcaaggcgaataatgaaagattctcnnnnnnnnnnnnnnnnnnnnnnnnnnnnnnnnnnnnnnnnnnnnnnnnnnnnnnnnnnnnnnnnnnnnnnnnnnnnnnnnnnnnnnnnnnnnnnnnnnnntatcaaggcgaataatgaaagattctcaaccgggaacgctcgactgcatcgatcagtctaagtatatcaaggcgaataatgaaagattctcaactcggtaggttctgcagctgaacaccacgtaagtatatcaaggcgaataatgaaagattctcaacatgctgacggcaccatgtccgcaggccgtaagtatatcaaggcgaataatgaaagattctnnnnnnnnnnnnnnnnnnnnnnnnnnnnnnnnnnnnnnnnnnnnnnnnnnnnnnnnnnnnnnnnnnnnnnnnnnnnnnnnnnnnnnnnnnnnnnnnnnnnatatcaaggcgaataatgaaagattctcaactagtcgtgtagcactcgataccggcgaataagtatatcaaggcgaataatgaaagattctcaactcggtaggttctgcagctgaacaccacgtaagtatatcaaggcgaataatgaaagattctcaacttcgtgacgctttggtgattgaggatgctaagtatatcaaggcgaataatgaaagattctnnnnnnnnnnnnnnnnnnnnnnnnnnnnnnnnnnnnnnnnnnnnnnnnnnnnnnnnnnnnnnnnnnnnnnnnnnnnnnnnnnnnnnnnnnnnnnnnnnnntatcaaggcgaataatgaaagattctcaacctcgacgacccattagaagaacctcatttaagtatatcaaggcgaataatgaaagattctcaacgtgatgcgaggccacagaaccgcatccctaagtatatcaaggcgaataatgaaagattctcaactcggtcagtcggtcggccggtcataaaaatagtaaacaactattgaaagattcttagtcctcaatgaaagcccctccggtctattcattttaacaaatatgcgtactgctaggcacaaatagcaagaatattaaaacaggcccctcgacccgcagcagtaagctacaggtcgaggggcctcctcatgcattagcgttagctggtagaaaggtcagcgcccgaaaacccgggaaccgccccctacgccaccgccacggtacccttggctgcggtgccgcttcgggtccacagcaggagcgctgccacgctgttgatgatgtagaaaatgtatttgccgacgttcgcgaagttgccctgagtcagcgccttgatgcactgcacggtgttgtacgcgaaccagaactgccactgcatcgtcagcttcagtgcgttcagaatgttcgctgacagggacaggccaaacactgcggtcgtgatccagaacaggaacgaggtcttgccatcgtaaccgacattgttcgcaatcagatagtaaccgacatagttcgcaatcagggagaacgcgaacgaaccgaccacaatgccgctaataatcagctggcccttcttgccggtcggcggttccatcgccttgccgcgttcggagttctgccacctacgaatcgcgaaggtgtacacgatgaacgtgaccgggtaggtgatgattgctgccttgttgcccagaatgtaatcaatcgcgccagacagtgccgtgttaataatgccgagcacgttgccgatgtttgagaggcggccggtcaggcgggtagacatcattgaaatacccacgttaatcacggaaattacgccgaggggaatgaagttcgtgattgggccccagtcgacgtatttagcgaggctggtgcccaggtatcctgaggcgattgcgatggcgataaccagtgccacgccgaagatgtcggcgtacttggacttggcgaagaagaggagggccttctcgattgagaattccttggcctccatgggtaactcctttgttgagaatataggaacagtgatagggtaccaataactataactctttgaaaaggggttgaattggcgtgtcacacataaaacttcagaaacccacatattccacatctcggaacaccgcggcattgggtaattcaaaatcaccccatcaaaaacccataccaacttccggcaaactttgccagatatcgcccctacttcgttgaacatcgaaaatgggcgtaaaatcaccgccgtttcgtcttcgctttaagggggaccttaaggtacgctagatgactgggtcagggaaccgtgccggtctcactcaccgtgcatccacccgacagacacccgcaccccggtatcctgcgtctcactcacgcacacaggggagggaacccaacgtatcggcctcactcaccgtttacgccgctgtccgcgcatcctgccacccgtaactcactcaactcaaacaagaactgaataggacaatcatgcccttgcttacccatcgactctcacgacgattttttgtaaagggtgcttccgccgccgccgctgcaggcgcactgaccctgcaggcgcaggccgctcaggctgatgaagctcccgcaaaccttgccccggcaaccgaggaaactaaaggcccgcgcctcgttattcagcgtgccaccatcactgaaaccggtatgaccgtcaactacactgcacacggtctgcgcgaattcctcaccgaaggcaccactctgaccgtacgccacggctacgttcgtaacgactctttcgaaactctgcgctcctggccgctcacccccgaatttgacggtgacgctgacagcttcagcggtagcgaccagttccccatcgagctgatgcagggtgaaggtgttgatcacgccctgcagctggatatttgctctgacccgtggggccaggagattacccaccagattgctgcgcgcatccccatggctgagactaagattctgaagacttctttcgaggatgttccggataaccacccgttcgctgaggatatccgcatggcgaaccagaagaagtggctgatgccgaacccgcagactggtgcgtttgagccggaccgccccgtgacccgtgaggagcttattgctctgctgaaccacgctgccggtcacgctggcgtgagcgaaaactctgaggtcgcacccttcgcggatgcggcaggccgcccgaccgcgaacgccctgcactgggctcgtgaccgcaagatcaccgagccgctcaccggtggcgacaagattgacccgactgcaccggtttctcacgaggagctggcagctgtactgttccagtacaacgcggaggttcagctgaccgaaatgaacgaagctgctggttctcgtttccgcgatgtgctcggtgcgggcactctgcaccgttacgttgcgtgggctggcgcgaacgacatcgtgctggacgcttcgggtgagttcaagccgaccgcgccgactactcgcgcggagctggctcgtttcattcgccgctacaagctgcagaacctgctgttcactgacttctcgtacgtttcctaattctcgtacggctcctaaatttagctacccccggcactgcgcgtgcctgttggggttgcgtgaaacccccgtcttctggcttttgctggaggcgggggttttgccatgtcccgtattgccgcttctcggggagttttagtgacaggctgtgcctggcatatgaaattttgcgttatatatgcctaaaatcttgcaaaatcctgtgcgctaagtaagtattacctagaaggtaagttaaaggttgccttacttaatactgtgtgaagactagtttccttcctcgtgggcccatgaaacccacaccaaagagcaggaaaaacgcggcgcctcaccacccatcggtgggggagagacgcaccttcacacaccacccacgaaaaaggacatacatatgaacctcgcttcaagcaaggcattcaagggcctcgccgttggatcgctggcactggcaatttccggcgttgccaccatccccgcatcgttcgcggcagactccaccccggcggcaagccagagcactgacgctcgcaccatcaccgacaaggcgatggcaaagatcacccagggcctgcccggtcagttccaggtcgcatactccaagaagaccaacaagatttgggttgcgggcaccgctgaccgcgacaagcacgtttctactatcgctcgtattgacgcgaactccctgaagattgaggcagtcgccgagctgcccatcgtcaagaacgacaagggctaccagtacgacgcagcttacggcatcaccgttgacgatgtagacggtaccgtctgggttaccaacaccaccgacaactccgtgtccgtgtacgatcaggcaacgatgcagcaggtctggaccaccgcgggtatcgcagagaccgacccgaactggattgagcacccccgctccgttctggttgaccacgagtccggcaaggcgttcgtgaccggccgcttcttcgtatccgctatcgacctgaagaccaagcaggttgagaagatccagctcgaaggcgcacccgacggcggcacccgctacatcagcatgaacatcctggttgatggcggtaagctgtacgttcccgagcgtaccggcggcaagattttcgtcatcgacaccaagaccttcaaggtagagagcagcttcgacaccaagggcaacgctgagggtgaggttcgcccctccgacatcgcgattgaccactcccagaacgaaatctacgtctcctcccagggtgtgaagggcgcgaactccggcgtgtccatctacgatgcgaccacccacgagttcaagaagttcatcccggtcggcacccaggcactcgccctggacaatgacgaggcgaatgacctggtgtacgtctctgacttcggcaccggcaaggtcggcgtgattgacggcggcgcagcggacaagctaatcgctgaggttgccatgaacggcggcaaggcaaacgacctggtcgtactgcccaacggctccgttgtcgctgtggacaagcaggctggcgcaaccgcaactgtgccctacgtcctcgacggtaccaccggcaccgtcagtacctcagataaggtcaccagcaagccttctaaggacaagcagggcaacgaggttcccgccaagacctccgagattcaggcgaactccatcctgaagttcaaggtcaccgcaaccgcaggcgacaactccgaggtcaagcaggtcacccccgaaacccgcgagttccagggctacccggcaaccgccaccaagaccaaggcaaccgactctaccaccccctccaccgaggcacaccgcaccgtggacgcaaacggtagcgttgcgaacatcattcagggtctgcccggccagttccaggttggctactccaagaagaaccacaagctgttcgtgcccaccgtgggtgcacgcggcggcctcgcttcctccctggcacgcgtggatgcagacaccctgcagaccgaggctttcgccgagctgcccgtgaagaagaacgacaagggccagtatggttacacctccgcgtacggcgtgaccgttgatgacgtggacggcaccgtctgggttaccaacaccaccgacaactccgtggcagtgtacgaccagcagactctcaagctcatctggagcaacgagggcgtgaagaaggacgacccgaactggattgagcacccccgctccgttttggttgaccacaagtccggtaaggcgttcgtgaccggccgttactttgtctctgctattgacctgaagactaagcaggttgagaagattcagcttgagggcgcacccgacggtggcacccgctacatcagcatgaacctgttcctcgatggcggcaagctgtacgtgcccgagcgcaccggcggcaagctcttcgtcgtggacaccaagaccttcaaggttgagaagaccatccagactcagggtgaggattccaccgttgaggttcgcccctctgacgttgctgtggatcactcgctgaatgagatttacgtatcttcccagggtgtgaagggcgtcaactccggtatctccgtgtacgacctgaccaccggcgagttcaagaagttcgtcaagttcggcacccaggcgctcgctctggagcacgatgaggaccgcgacctggtgtacgtaaccgacttcggcaccggcaaggtggctgtcttcgacggccgcgctgacgaggtcatcggcgaggtcgagatgaacggcgcagccgcgaacgacgtgaccctgctcaaggacggctccgtactggtcctcgacaagaaggaccgcgacgagaaggtgaccctgccctacgtgctcaacggcaccaccggcgagatcagcaccgccagcgagtacaccaccctgcccaccaaggaccgccagggtaacgacgttcccgcatcggttcagcagctgaaggctaactcgattctgaagttcaaggttggcctgaaggacaccgacgcgagcgcagctccggtgggtatcaccccgacttcgctggactttgcgggttacccgacggtgaccggtgtgaaggctgaggagtcgaagcctgctgacccgaagcctgctgacccgaagccggcagatccgaagccggcagatccgaagcctgctgacccgaagcctgcagatccgaagcctgctgacccgaagcctgctgacccgaagcctgctgacccgaagcctgaggataagaagtctgacgctaagtctgagaacaccgcagaggctaaggatcagacctccaaggatcaggcatctcagtctgactccaagtctgacgctaagaccggtgcacaggactccaagcctgctccggatgctgtgaaggctgataagtccggttcggctgtgaagaacggtggctcctctgcaggtggctccgataatttgggcagtggctcctcggtagctaagagcgacgcaggttcctcgcaggctggctcttcgcgtggcgctttggcgaacaccggtgcgaacgctgtgatgccgctggttgctttcgcttctgtggctctgattgcgggtgctgctttggtgatgcgccgccgcaaggcataagcgtagcgtttagttttcgggcgtaaaggctcgatgtaacg

SEQ ID NO: 3625 - DNA, 23399 bp, synthetic construct
  source 1..23399: mol_type = other DNA
  misc_feature 1..23399: note = Synthetic
cacacaatttggctgttgttttgtacgttgagttggcatccttggtgggtgcaggtggagctaaaagccttgaagacaccgttttcaggctgagatacgataacggtaacgccgcctttggtaagtttcgccgctttgccgacgggtacctccgaagctgccgcaatatcggtgggggactctggcccggcagcaccgttaccgccccctccgccaccaccgctggaaccttcagcacaggcgcttaaagcaagagctcctgcggtagctgtggcccccgctacgagtgcatttcggcgcgaaagtttatgctccagatcctgaatgctctgagagtttggctcgtgtacagaaatttctgattgtgcgcacgagcaggtgcacgatggtacttcgttcatcgttcctccttgaattccccggtgtgtgaagccgggcttgtgtgatgctgaggcgaccgtacctgtgggatggctgcgtgtcgctcttttataaatctagaggataaatcgtatgcacgcgaataagccgttttgttatgtggcgcgcgcctccatatttttcttgggttgagagatccatgtgttaaggcattagccaaggtgtcgctggaaaacttcatgaagatccggggcgaggatttcaacctgccacgggcgcacaccgtgcgagcgaagagcctcaagaagggcctcttgagagtaaggctcgggcggatcccagcacagacgccgtatacagtcagcgctgataatattctgtgctggaatattgagccgctctgactctcgttgtactatcttccgcacttcattaagaatctctagcgaaatagggcgtttcgtttcccaagccttaagcgggggaggcgcagtcgcaggaatggtatagggcgccgggtcctcgccccgagaagctgatactattgcacgcacccagcgggggccttcacgtttcagcagtcgggtacggaaccccggaattgccatgatagctggcacgttacgaggcattttctgggcagcctcaacaagtgcggcatctgagagtaaagccttagaatctatatctttcttctgcgctaatttatcgcgctcgaaccaaagattccgcagggctgttagttgcggtacggaccggagcgtattccgtcccttcgttttcctccaccgttcggctttcttcgcagcagggtcagcgggcggtagtgaacagagataggcaaattcctggcgggcgtactcaagttttccctggtcttctaaaacctcttccaaggcatcgcgtaaatctgccagtacatcaacatcaagacatgcgtagttgagccaagactccggtaaaggacgatgcgaccagtcttcttgggagtgttttttctcaagtttgtaccccagaagctcttcgacaactgcccccaggttcacccgctccatacccgctaaacgagcacccaactcggtatcgaagagacggcgcggccgcattccaagaagatccagacttggaaaatcctgggttgctgcgtgaataatccattcggcatctgctagagcatcgttgatgatcctaaggtcagaaaaagcttcgggatcgatcaggtagagtttatcttcgcgttttagctgaaccaagaaagccctgatcccgtaccgtataccctgtgcgcgttccgtatcgactgcaaccggaccggatgcagcacgcaaagattcagcagcacgttcaagcgccctctccgtgttgataatagaggggaccggaactgacggggtagttagcggaataacatcaggaaccgtgaaatcagcaggtaatccgagcataggtgggagtttgataggctcggtactcgggctgagactcatctgaaagtggttccttgaatatccgtttctggtagctccctctacggggctgaaaacaatgactccaccattctacccgttgccgctgtgcgttacatgtttcttcaaatataccgaaaacccaaggaccggcaccgggctaacagcagtattgtctcgtaaatagctctagcttacgacttttgcggttccaatgtgagacagacagaattgatgcaataccgcagatcagtcggagtatcgtatccttcgccttcaaacacgtgacccagatgcgaatcgcaggcggcgcaacgtacctctactcgccgcatccctaacgtggtgtcttccagataccgcacacgatcttcggcgagtggagcaaagaaagagggccagccgcaatgcgactcaaacttctcagcagagcggaaaagctcggtcccacaggctcggcacgaatacacacccttggttttcgtatcccagtatttgccggtgaaagcacgttcagtgccgccttcacgcagtaccgcgtactcttcgggcttgagaacttgacgccaattcttcgcaattttaccgacacccggtagtgagtttcccactgccactccttcaaatcttctcttatgagctgtcgtcgttataacggtgctggctcgggttttgttcccggtggtacaggtccgtgccccactcggtgatgggcaaggtcaagccgtttacccgcgcctcgtagttgctgcgctggtgcatccctaaacgttgagccactgccaccgacgcccggttgcgggcgtgaataacagcaaatacttgctgatgcccagcttccgcaagctcacccattacctgctgggcggcgtgggtggcgatgccctcaccgcagaaggcgcacccaagccgccaggccagctcaatctctccagccgggccccaatcatttaaccaccggtgggctccggtgaaaccagccacctcaccgtcggccagcaccgtgtagaggcagaaaccttcccgctcgtattcggcgcgagcacgcaccaccatatcctcatagtgggcgagtgaatctgcgggtcgccccaaatactccatgacgcgcgtatccttgaacagcgcataccattcggcggcgtcctccgctgcagggatccacagctcaagacacggctgctcaggcgcgaagaggcgcatagctgccgccggtaagcttgagcaagtcggcgggggagagctcaatatcaagcccgcgtttaccgccagagaccatgatggtttgatactgctcagcgctggcatccaaaagcgtgggggaaggagttttctgccctaacggcgaaataccgcccaccacatatccagtgcggcgctcggcaaccttcggatcgcacatggaggcgctcttccaaccaagggcgtgtgccgccgctttcaggtttagctgcccactcaccggcactaccgccaccgcaaaatctttgtcatgaacaataagaagcgttttaaatacctgctcaggattggcgccaagtttctgcgcggcctccaacccaaaggaggtttctccctccacatgctcgtactcacgaatctcaaaaggagtcttagtttccttcaagagcgcgaccgcagcggtggaggcacctttcttgccgcctttattctttttagccatgaagactattctacgaaaacgtgaggtgaacccctaaggtatgtatcacctttacctgcgtagggatggcgtgcctgcaagcgttaggctacacaacgttttccagcatagcgggtttctgactaggagaattagccgattcatcttcaattgagataccaaagtcggtgactgtactcagatcgtgctctgtcatggttgtgatcccggcaccgcggccagcagaattgaggattccagatcccacaatattgccctgagcatcgtaaaaccagagtttatagacctttccttcgggcagcgcaggcagatttgtcgttgaaacacccgccatgttgtgggaaggagagtacatgaccgatactggcataccgttgactttaccttgggccattgaaaggtcaggagccatgctgatttgctcgacgatcgactggtcgccaggtcgtgcagctgtcggatgtgctggggccgaagaggacaccctcgcggcttgaagctcctgggaggtacgttctagttgctgatgctgcgtgaaaccccatatgcccagaccagcagcgataataatacttgccgcagccgtcatgcgagatggtgagaatttaccctgagccccgaaccaacgccgtttagctcgtgcataagcggaatcctctgagtccgcgatagcttgagcgttgtctgcattatctgatacaaagtaaccttcggaatcggcatggtcactcttatgctcggcattcacatcatctttacctagctcattagctggctggatttgctcggtatgcgcaacctgcgccatcacacgagctttaagctcagcggacggctcttgcggagtgagcgaagtaccaaaaacctcagagaggaccgcagcatcggccttagcatcttcgcgttcgtgtttgggggcccacgattcaaacgctatacgttgcgttggtgaaagcgtgtggagggcgtagtcgagtttatcggggaaatcttcgggatagtctttagtgctcacgggtgccctccaatcgttcacgtagtttctgcatgccagcgcgcatgcgggttttgacagttcctagaggaatgcccgtttcattggagatctcgcgctgtgatttacctccgaaatatgccatggtgagcagctgggcttgttcgcgtggaatatcagatagagcatgatgaacctcctccgtatccataaaagcagctattgcgtcatcaacatgatgataagattcgcggtactcctcaagaccgcgtgtgaaatcgcgttctgtggaggctgcaacggagcgcaccctatcaaccgcacggcggtgagcaatagttgcagcccacgacaacacggtaccccgttctgcacggtataaaggcgctttttgccatatttctagaaaaacttcttgagtaacttcttccgcatgcgttcggttatgaagaatgcggttaataagcgcgtacagacgcggaacaagcgcatcgtatagagcttcaaaacagtgttcgtttcctgcggcagcacactccatcaacgcagttaagcgctgatattcctgaggaatttgggtggctttttgagcttcttgatacgccgaagtcacctgacgatccaaaaaagtcatggtcatatcatctcacgccctatgatgacatttgattattgtgtcggtgataagcgaagtttaggtatgttttacaccctagaaaatattccagggtgtaaagcagcataccggcaaaatattacttcgacatggcggaagccgaaggagacatcatggcgtctttgttttccatcttgccccctttgtcaccgtccatcttattgtcatcatgcttcatgctgtcatgatctccctgcattttatcgccgtccatcttgccgtggtcgccatccatcttgtccccagacatggcagactggcttggcatagctgaaggagacatcatagcgtctgaactcatcatggcagaagaagagggggtggatgatgcagaagagctcgacgatgcgctcggcgatgagttctgatcagaagcgttagaagaacatgcagaaacaccagcaacgagggctagagaaacagctgcaaaagacgcagtgcgaagaataacggacatacgtaactccaatcttatatcggcacaggtaacgcggaggagcgcccgtaccattgcaaaatattcagaatcctaaactggactcattaggtattcggaacattcagcccgctcggattgcaaaacctcagaaaatttttaaatgatgtatctgactacctctcgcaacaccttgagaaaaacattcatgagcttgaatattgcgcagtaaaaggcctcatcaagactctgccaattgtgcaggcatcgctataaaaataatttcaaccaaaccgaaaccgcagttcgttccgaatataaccatgacaacacgtgaggcagtatcgcctcgcattaccaatccatgaggaaaataactatgctgttatcgctcatcatccttggcatactcggtggtcttatcactgggatctcgccctgcatcctgcctatcttgcccgttattctcgtcactggcggtgcagattcagcgcgcactgcatctaccgaacttggacaaacaggcatagcaaaagattctgcggacaatgtgcaagccttattctcgcgcagaagcgcagttctcggaaacgcagctccagcacccatgcagcgtactgcatcacgctggcgtccctatcaagttgtaggcgggcttgttctgagcttcagcctctttaccctgctcggttcggttattcttgctgccctgcacttgccgcaagatacgctaaggattttaggtataaccttcctcattattgttgggctgagcatgcttatacccccgttggagcgcctgcttgaaaaacctttcgcgaaattctcaaaactcggagcgaaacgcagcaccacacgtggcggcttcctcatggggcttgctctcggtctcgtctatgtgccctgtgcgggtccggttcttgcagctattacccttgctggcgcaaccggaaacatcggtatcgaaaccgtagcgctcaccctatcttttgctttcggaacagcgatcccgctgttgatcttcgctcttgcggggcggagcattgcagaacgagttaagacgttccgcacccaccagcgtggagtgcgcacagcatcgggtgtactcttgatcgctctttcaatcggactagtattcaacgttcccgcccagctacagcgcgcaattccgaattatacggaagggattgagcagactatcagtcaagatacgcagaataatattatttcttcttccaccggtgggtcgataagctcgtgccgacccgatgaagaaaaattgcaggactgcggctctgccccggaattagcaggtggcacgggtaactttaacactgagaatcagccaagtctcgctcatatgcgtggaaaggttacactcgttgatttttgggcatactcgtgcattaactgtcagaggacggcaccgcacctgaatgaactctacgccaaatatcatgattatggtctagaaatagtgggagtacacacgccggaatatgcgttcgaacacgaaggtaagaacgtccaggcgggcattgagaacctaggtattaaatacccggtagttcaagacaacgactatgctatttggcgtgcttacagcaaccgctattggcctgcacactatctcattgatagtgaaggtaaacttcgtgctgttcactatggtgaaggtgggcataaggtgactgaggcacaggtacgcgaacttctcaaagccgcaaacccacaagtgcagcttccagaccctattcacaaggatgacgcacaagaggaaacacaaaacgcgcatgatgcgcgaacccctgaaacgtatttaggctctaaacgcgcaatgtactttgcggggcaagaaagctactctaacggaacccgaaccttcaaaccggcagatcgtctagctgttgaccaatacgacctcaacggtacgtggtctataacccccgaacgtattgagcctcaaggaaacgacggcactttgcggattaactatcgtgcccacggagcgcaggttgttgccggcggcagcggtaccatcgaagtgcggcgcaatggtacaacggaaaagattcacgtagacggcgctcccaacgcccaccacattgtgcgcggcgatgagcaaagtagcggagttattgagctcaaggtctcgcccggagtgcagctgtactcgctcaccttctcataagtctctgccgaatctcacacagaattcacccctgacgactaaacccgggactgtgttttcaaggctttagatcacacatgactaaaaccacgtaaaacgcatagtcccgggttttactgcggttttaccgtatctgtcccccagggagagagcactctgagtaccgggctgcggcaagctcagcacatccgtactaaacttaagacaagtaacatagacgtcactcagaaagttatatcgtgcccgtcacctacgaacaccttaccgaacgtatcccaaacgtctcagcagaagagcttctcgctggatttcgtccctcagaacgattcggtgaagtgtcattcgacagctatattcccgatccaaaccagccctcccaagctgaagcagtacaaaaactcaaaaccttcggcgataaaatcaacaaaggaggaaattccggcgggttcttcggcaaactttttggcggtaaaaagaaagattccgcaaaatccgggctctatctagacggcggcttcggtgttgggaaaacccaccttctagcctccctatggcactatgttgacggacccaaagccttcggtaccttcgttgaatacaccaacctggttggtgctctcaccttccgcaaaaccgtagaagcgctcagtggatacaagctcgtctgcattgacgaattcgagcttgacgaccccggcgataccgtcctcatgtcccgcttgatgcgcgaactcgcagatgctggcgtcaaactcgtagcaacctccaacactctgcccggtgccctcggcgaaggacgctttgccgccgaagacttcaaacgtgaaatccaagtacttgccgaacaattcgaagtacaccgtgtggatggtgaagacttccgtcatcgcggtcttccagctgcaccggaacccataactcccgacgtgttcgaggctaaggttgaggaagtattcgatggaaaaaccgtgggtatcgataccttctcagagcttgtcgaacacctagcgaaagtgcacccttcccgttaccgccagtttatcgacggtctgcagggtatcgcttggcgcgatgtacacccgattaccgagcaagcggtagcgctgcgctttgttgtgctcgctgaccgtctttacgacaaagacctgccgatcgtctcatccggtgtacctttcgaccaggtcttcacacccgaaatgcttgctggcggttaccagaagaagtacttccgtgccgtctcgcgtctgacggcgctcgcccgtgaaggcttgctaggggaatcagaggcttagacttcatggcattgcggtatagcgtagaatgctgtgcttgatatttgcgaccttgtttgtgtagaaggtcgtaaggtttttagtgctgacgctctgcctaaaaagtgcggcaaaagatttggcaaacgacgaaaaaacccgtatagtatttatctgtcagtgcgacgggtaaagcctgttgttgatgcttgaaaagcacctgataagcggttgtagctcagttggtagagcaccaccttgccaaggtggatgtcgcgagttcaagtctcgtcaaccgctcgtaggactcctagagttcgaactcatctcgcgagagatgtatgcggtgaggtggtcgagtggttaggcagcggcctgcaaagccgtgtacgcgggttcgaatcccgtcctcacctcgcaacaacacattgatgttgtaggcgcgattggcgcagcggtagcgcgcttccctgacacggaagaggtcactggttcgaacccagtatcgcgcacaaatagaaagccccagctctctaagagctggggcttttagtttgatcagaatgttttgaactggtaatgggctcatagacagcaaaattttggcaaaaacataccgcccattgttcaatgaaccctggacggtgagaagtcagcactaaaaatgtgccttattgggaatcttctctcaaagaatagcagagattcttatagatacgcaataaagattgttacatgaaggttttagataaatttaggctaagcatgacgaagctgaacgcgtaatccaaaaataaggtatatgttagaactatgagggtaaaaccttaaagctcagctcaatcgaaacacaaggtccgtgtttcatagaactatctatcacttactgtaaggaggcagaatgtctgcagatagtctgaattaccgtattggtgtcgacgtgggggaccgctcggtagggcttgccgccattgaatttgatgatgacggttttcctctcaagaaactagcaatggtaaccttccgccatgatggtgggatggatcctgcaaccggtaaaacacctaagagccgtaaagaaactgcaggtgtagcgcgtcgtaccatgcgtatgcgtcgccgtaagaagaaacgtctaaaagacctcgataagaagctgcgagatctaggatattttgtaccgcgtgatgaagagccacagacttatgaggcatggtcttcgcgcgctcgtcttgcagaatctcgttttgaagaccctcatgagcgtggtgaacacctggtacgtgcggtgcgccatatggctcgtcatcgtgggtggcgtaacccatggtggagcttttctcaacttgaagaggcatcgcaagaaccatcagaaaccttcgggaggatcctggagcgtgcacagcacgagtggggtgaacgagtttcggataatgccactttaggcatgctaggggcacttgcagcgaacaataatatccttttgcgtcctcgaaggtatgagcataatcctaaaactggtaagaatgctgaaaaactcaatgtgcggggtcaggaaccgattcttcttgataaggttcgtcaggaagacgtactagcggagcttcgtcgtatctgtaaggttcaggggattgaagaccaatatcctgaacttgcacatgctgtctttacacaagttcgtccttatgtacctactgaacgtgtaggaaaagacccactacaacccatgaagattcgcgcgtcccgcgcttctctcgaattccaagaattccgtattcgtgatactgtcgcaaatttacgtattcgtgtgggaggctctgaacgtcgccctctaactgaagaggaatatgatagggctgttgactaccttatggagtactcagatactacacctcctacgtggggagaagtcgcagacgaactggaaatcgccgaaaacactcttatcgctccagtgatcgatgatgttcgtctgaacgttgccccatatgatcgttcctcagctattgttgaggcgaaactcaaacgcaagacccaagctcggcaatggtgggatgacgatgccaatctagatttacgttctcagctcatcctgctggtctctgatgctacggatgatacagctcgtgtcgctgagaattcgggtctgttggaggtttttgaaagttggtctgacgaagagaagcagactcttcaagatctaaaatttgattccggtagggctgcctacagtatcgatacactgaacaagcttaatgcttatatgcatgaacatcgtgtcggtttgcatgaagctcggcagaatgttttcggagtttccgatacatggcgcccgccccgtgatcgtttagacgaacctacagggcagccgaccgtagatcgcgtgttaacaatcgtccgtcgctttatccttgactgtgaacgtgcgtggggacgtcctcaaaagattgtcgttgagcatgctcgtaccggcctaatgggtccctctcagcgagctgatgttctcaaggaaattgcaaggaaccgtaatgctaatgagcgtattcggcaagagctgcgtgagggcggtattgaggctcctaatcgtgctgatattcgtcgtaacagcattattcaggatcaagaatctcaatgcctatactgtggaaaagaaattggcgttctgacagccgaacttgaccatattgtgccgcgtgccggaggcggatcttcaaagcgtgaaaacctagccgctgtttgtcgtgcatgcaatgcaagtaagggaagtcgtccatttgctgtgtgggctggtcccgctagactggaacgtacgattcagcggcttcgcgaactgcaagcgtttaagacgaaatctaagaggcgtacgctaaatgctattattcgacggttgaagcagcgggaagaagatgagcctattgatgagcgctcgctggcttcaacatcatatgcggcaacttctattcgtgagcgtttggaacagcattttaacgatgatctaccggatggctttgcacctgttgctgttgacgtttacggaggttctttaacccgtgagtcacgccgggctggtggtattgataaaagcattatgctacgtgggcagcgtgataagaatcgctttgatgttcgccaccatgcaattgatgctgccgttatgactctgttgaacccttctgtagctgtgactctggaacaacgtcgtatgctcaaacaggagaatgattattcttcaccccgaggacagcatgacaacggttggcgtgattttatagggcgtggggaagcctcgcagagtaaattcctgcattggaagaaaacagcggtggttcttgctgaccttatcagcgaagcggtagaacaagatactattccggtggttaacccgttgcgattgcgtccacagaatgggtcggttcataaggacaccgtggaggctgtactagagcgaactgtaggggatagctggaccgataagcaggtatctcgtattgttgatccgaatacctatatagccttccttagcctcttaggcaagaaaaaagagcttgaggctgaccatcagcgactagtttctgtctctgctggggtaaagctgcttgcagacgagcgtgtacagatttttccagaagaagctgcttcaattttgactccgcgaggcgttgttaagattggtgactctatccaccatgcgcgtctctatggttggaagaaccagcggggatatattcaagtgggtatgcttcgtgtctttggagccgagttcccctggtttatgcgtgagagcggtgtgaaggacatcttgcgcgtgccaattccccaaggatcacagtcatatcgtgacctagctgcgaccacgcgtaaatttattgagaacggacaggctaccgagtttggctggataactcaaaacgatgagattgagatttctgctgaagaatatctagctacagacaagggagatattctttcagattttttgactgttctcccagagaaccgttggaaagtagtcggtattggagataatcgccgcttcaaaatacgaccactattgctttcgaatgagataatcccagacactttaaacggacggtcaataaaatcagaagaacgtgaccttatagtttcggtcctggataagggagtgcgtgttgttgcttcaacgctattgacacttcctagcactaagattatccgccgcaacaatttgggtattccccggtggcgcggtaatagtcacctgcctacatcattagatattcagcgagctgcgactcaggctttggaagggcgcgattagtccgtggatacaaaatggcgggttcttgaccttacagggtacaaagggtacatctcctatgaacggggtcgcctgaaaatcggtgagcgaacggtaccattagcagaagtagactttattcttcttggacagaaatgttcttggggctatggcttagttgccggtcttgagcggtttgacgttgccgctgctgtttgtgattggcgtggagtccctatctctgcgctctatcactggtcgagtaacaccagagtttttgctcggcatgaagcacaggcagatttaagccttccgcgtgctaagaacgcttggaagcagattattaaggcgaagcttcgcggccaagcaaacgctcttgatgtaatgcatcgcccgcatgccgagcagattcgaactcttgcacgtaccgtcaagtctggcgatccaacaaatatagagggtcaaggagctagagtgtattggtcttcatacctgccggaacgagggtttcggcgtgaccaagtaagtgatgatgtcgtgaatggcatgctcaattatggctataccattctgcgtggtcgggtgttaacccgcgttatctcggctgggttatctcctacactttcactttttcaccgtaaccgttctaacgccttcgctctggtggacgatttgatggaaccatttcgacccgctgtagactatatggtttatagacttttacaaggtggctcttccgaattgggctcagaagagaaaactgcccttgtgagtgttttggccgaaaaagtctctgataaccaggattttaccgtgcggagcgttatcgaaaacttctgctcggagtttgctctctatgttgaaggtaaacgggatactctgaaggttcctatctggaagctttcaatgagcgaacctgatgctttgaaagaaggggagtgagttggccgaaccagtgtggatgctcgtgatgtttgacctaccggtcaaaacaaagtctcagaggaacctcgcgaataaatatcgtcatgcgctgttggatatgggttttgaccggctccaactgagcgtatattgcaaatattatataaatggtaatgcaactgggcgagatctattccagcttcagattcaggtaccgcctggaggggcagtacgtattatgaaggctacagattctcaatgggcagcaacaattcgctatctggggccacagcggaagaatatcgaagagcccccagatgcacttgacgttttctgataattcaggaggggtgggtgaacaaaaatctcttagatttttgttcacccacccctcctgaacttgcaagatgatctcagtttttccgttgaagatggtaatcacagagaaaaatactgggtgttaggctggtttttcgatcgaaaaaccagcctaaactataccctgactaggctgtatattctagatattaagtctagcaaggatagttagtgaagattcccaactgtgcggtatccgatagtcgataggctgtaagtctagcaaggatagttagtgaagattcccaaccagaacatactatagagaccaatacggctaagtctagcaaggatagttagtgaagattcccaacgcccagtgaacgagacggagagcgtgcctaagtctagcaaggatagttagtgaagattcccaacggataccgttattaacggtgcgttgatttaagtctagcaaggatagttagtgaagattcccaacattgacctgtcgggaggtggtataacagtaagtctagcaaggatagttagtgaagattcccaacgcaacgaaaacgtgaccgtagccggagataagtctagcaaggatagttagtgaagattcccaacattctgatgggggagtgtctgacggttttaagtctagcaaggatagttagtgaagattcccaacatgctgcacgaggtgttaaaccttttcattaagtctagcaaggatagttagtgaagattcccaacgtatacacaccatcttgaatgtacccattaagtctagcaaggatagttagtgaagattcccaactaaagaagggcgcttcgtaggggtgggataagtctagcaaggatagttagtgaagattcccaacgccgcactggtagaacgcgcatattctctaagtctagcaaggatagttagtgaagattcccaactttctcttggagttacccggcgcggtggtaagtctagcaaggatagttagtgaagattcccaacctatcccggtctgcctatgagaatttcctaagtctagcaaggatagttagtgaagattcccaacatagtgtgagcaccccaaaccctcggggtaagtctagcaaagatagttagtgaaagagtacagaaatttatatcagagtctaggaagaaacaagatcgagtttgatataaatctaaaatcattactatggtgcaaaactctgtgtcagtgaatgtacttcctgtgaggataaattttctgtagggggctcctattatctcctgtgacacatatcatgcttactggagttggtggggtattcccttaactgtatagttatatatgttgttcgggcgggtcccgaaaaacagtccggccccatcgtatagcggcctagtactccgccctctcacggcggcaacaccggttcaaatccggttggggtcacactaggaaaagagaattccccggttcaggcgaaccggggaattctctttatctttataaatgccaagggggtcaggattttctaaaaggcacgtatataaccttttcagcaaaacctaacatgctcgcgtcgtaatgtgaataaccagaaacgggggagcagcctacttattctctccgctcgcactcgcagacccttgcgcactggcagaagcacccgctgcggcaggagcacggtgcaccatacgccacgttccctcaagataatgagccgtcacctggcccgagacaacaccgctcggcaccttaaaaacctcaggaagcggctgcgaacggttcgtcgtcttcgtatacaccgcagactcccgattaaccttcatcgttgtcttccaggtataaaatccgttcttctcatccttcgttgggtgatctgtatccaaagacatcgtcaacgggttctgcacgccagtcacccagccagtctctgaagcgtacatatcctgcatgaaatcggcaatagttgtgtaatcgcccgtatgatcaatattcgtgaaatagttaccgtcacccgtcaaaagcatataattcaaagtcgcgagccagtaggttacaaaggcatgtaggccctcaaccgaatcttcacgcagtttcgcgggttccaccggaacaggcacatgctgcgccggatgctcctgcgtgccaggttcaaattcaccagacgatctgtagttctccaacttcaactcgcccttaaaactagggccagaaggggtagcagatgcagaagcagtcgaatgtgatggcgatgtagccttggcagatgcgctagcacttggcgccgcatccttattctgcgacgagcacgcggtaagagtagctataaaaccggcacctacaacagtgaaagcgccacgacgcgacattgagctcatgagaaaccttcccatcaaaaaacctttccgcctgcgcgaaaaacttcacaagagtagaacgtaaaatatatacgttctctataaaatctaccggtaaaaccctagcacacctaaaatgtgtagagatctctaaggagccttagtgccaccgggcgaagcctgcgagccgtcgtccttgagcatacgccatgcgccgttctcatattgagttattaccgagaccctagacccagactgcataaggtcattaagggggtaagtctcctgagtctgcgaattatagatttcagtaccttcaccaaactcaacggtagcaatccacatatacgatgtttcactccgtggattcttcaccggttttgcagagtcgagtgaaattttcataggatgctgttccccaagaacccagactacaccgctgtcgtacaaagctttataaagatcaatactttcggtgtaatcgtcagccggatcagctttacgcaacagagcaccgtcacccgttaagtaaagataattctgtgcctcaacccagaaggcaatgaatgaatacatgccgtccacagactcttcatgcatattttctggttccacaggagccggtacgttctcggccttatgctcgcgggtgcccggtttgaactcacctttagaatcgtatttctctagttttacaggtccttgatagttcttcccagaactttgcagaccctccgatgctgatggggaagcccccgccgccgaggctgcgttctcagcagatgcggtaccaccgggtgagggagaagcatcattacctaccggctgaacctttggcgtacaggcagtaaccgttgccgctgtgagacccgtaccggtcaaatacacagcttggcgacgtgaaactagagtcatgatgccctttcaaatctgtactaattccatcataacgtcatcctgcacgtgaaacatggaaaatttctatttctcaaggatagatttacgggggttcaaactctccgtgggaataataatggtctgatctgtatttagtctttcaaaagatgagcatattgtttgcgtactttcgctactttaggcccaactactacggaacagtacccctgatatgggttcttcgcgtagtaatcctggtggtacccttctgcttcccaaaactcagtcagcggtttaatctcggtgacaactggggcgtcgaagaatgactgagctcgctctttcgcagcctcaaacacagccttctgttcgtcagaggaatacaacagtacggaacggtactgcgaaccacggtcggcaccctgctgatcccagcttgtcgcatcgtgcgcggagaagaaaatatccaaaatcgcgtcttcacttataatcgattcatcaaaatcaacccgaacaacctcgtgatgcccagtcgttcccgagcatacagaccggtaatcggggttttgggtgtgcccgcccgcatacccgcatacgcttgcttttacaccctggaactgccgaaaaacagcgtcaatacaccaaaaacaaccgccgccaacaacaaagcttttcataagacctctcccacagatagatgtacattcctttacagcgtagctgtatcaactattattccccgtcctacccgaggtctgctacgggacgtgtaatagctcgtctttctgctgctagatgccacaatagaatcatgacaacacctacgctatcccacattgttgatacttttcatagcctgtatccgccgcatcttgccgctagctgggactcttccgggctagtctgcggacgtttacaggtacccgtcgaacatgtgcattttgcggttgatgccatatcagcaaccgcccaagaagccgtaaatcttggggccggtcttcttattactcaccacccgcttcttttgcgtagtaccagcttcatacccgactccgattacaaaggcaacgtgctccataccctcattgaaggcggatgtggcctgctcggtgcgcacaccaatgctgatgccgccgtcgccggtgtcaacgaggctctctgtgaagcgcttaatctacaaggatgcgaaccgctgactgatcagcagcaacaggaacttgcaggtgaggaatactgcgttggaacaggtcgtgtaggtgttcttgtccgtcctcttacattgcaggaactctctgaagaactagctgctgctcttcctgcaacagcgggcgggctgcgcgttgcgggatccccacaaaaacttattcgccgtgttgccctctgcggaggcgccggtgactcgttgtttgatgccgtgcgggcatctaaagccgatgtctatatcactgcagatttacggcatcaccccgccagcgagttccgggaacaagaacttgtgcgaggtaccgatactgcactcatcgactgttcgcatgctgcaagtgaatctttatggttaaatcgtgctgcggaacgtctgcaagaaaccctagcgggccagggatacagtattgaaatttcggtatcctcgctaaataccgacccctgggattttcatgtaagcactggacaaaccattggttcggcaagcacacctcgctaaaaatatttagagcagcccgacgggacttctaaaataaatgtgagaaaagctcatattttgcaacatgcattactatttttcctgaatatttttctgttaataatactgcggcggccaataaaacataaatatagcgtgaccctaggaaaatagggacacgctatatttctctaaaatccgattgttaatgtttcatatgtgcataacgataaataaacgccgccattgcttcacgtgaaataggctcatagggatggaaggaaccatccgaccacccggtcgtaatacctgtgctgcgaagccagacaatctctttatagaaaggctcgtctgggctcaaatcccaaaaaggagaaacctcaggtgcctcgaactgaggcttgcccgcgaagcggtagaagaatgccgccatagcattacgatctaccaagtcatgcgggcggaaagttccatcagaccagccagtggtaagaccctgctgatggaaccacaccatttccttataccacatatcgttaggagaaacgtctgtgaaaggcgacttttcgggaagatcaacttgcggggagcctgccagacgatagaaataaacagctatacccgaacgctcaatataatctttcgggtggtatgtgctatctgggtaaccgatcgtgattttacggttaaaaagccaagtaatctcattataaaaagcagaagattcaggaacgtcaataaaacgtttctgaggtgaaatggtctgcggagttgcgttaccttccacctgattcagggtcgagagatcctcctgtgcaacaacggcaggttgcccctgaggatcagtctgagactgctgagtctctgcaaagacgggggtgctaggtgcaagagtagcgccaactagggtaagtgagcatatagtcgtgggagctttacgaagtttaaaagtgaaagacatacaataatccatcatggctagtgcgatatgactccctacaatgtaccagggatgtcatatatggtaaaggatcttcgaagatatttataaaactgttataaaccttgtgggaaaattctctggacacattcttagaaaatgtgccgagtatacagaacctatttcctctacacttcgaaattagaatataacagttctttcttcagggtgttgatagcgggagaattctcgtagataccagaagagtacacgctatattcacacctgaaaaatctattcacgaataataagggtcagtgttcctgctttcttgggcgtcggtaaggtacattcaagttcccaatcgcggtcaagcgcctccaagaattctgaaatgcccgctgtaccttcaaaaggtcgctcggcaagggcatgagtgatcacgtagcgagctaactttccgcgataatgctttgccatatgggaaacaaccttgcgtgaaccatctgctgcaacgcgttcaacacgaaccgctaatgtctgggctgacggcgatacccacgatttcgcgtaagcgctagaacggcagtcaagaatgagctgcccctgcgcgtatgcagtcaaagcatttcccaaagctccgcgccaatatgtggccagagcccctatagcgccaagcttggttcccatagacagacgatacgcaggaatatgatcttcaagttgcaccacaccccataaagcagatgaaataagaacggacttctgggccaactcccgttcatcgggggagaaactggcgtaatccagcgcctcaaagagcacacccgtatagacttcagccgccggatgagcaggttcctccactaaccgcgtgtttcgttcaatctctgccgtgagcgatgcacccaccccgaggacatctagagcgtcttcctgagcggaaactcgcatgagttcttccagcacatcttcacgttcggttgtgagctctggaaacgataactcggcaagattaactggtgcgtgtgtgcgaggcgcaggggtcttaccctcagaaggaggcagaagaatcagcatgcctcttattctaccgggcagaaatagagcagcgataataactccgctagaatagaaggctgaagcagggtgcctgggcaatcgcgatatacctcttctgatgggtatgtcgaggaaagtccgggctccacagcacagcatggtggataacatccactcggggtaactcgcaggctagtgccacagaaagtaaaccgcctcatcgaggtaagggtgaaagggtggtgtaagagaccaccagtgagtgcggtgacgtgctcagctcggtaaaccccatgcggagcaaggccaaacaggacacgccatgatagggtagtgcgcccgagccagcggcgcgtgttcgggtaggctgcttgatgcttatggcaacataagccctagatagatgattgcctcaggtacagagctttcatcggtaccgatgacagaacccggcttatagggcaccctgcttctcatgatgcttgtatacactggccggtgcgtctatttctgtgcatcaagaatcagacgcatcggtagtgtggatgattttatgtttttaatgtccgaacgggtcaggatctacaccgggcatccaactattaccctcaacagtccagccttcgcgtttaacaactttcttcatgcgagaggtccattttttattaagacgattcacatatagttttccatcaaggtggtcggtctcgtgctgcatacagcgggcaaaccaaccggttgcctcaaacctgagcggattgccttcgacatcaaatccattgacagtaacccactcagcacgtttgagaggaaaaccgtagcccgggaacgaaagacacccttcttcttcgtcatgggggtcgggttctgccgcggacaccttgccgagagttagcctggggttaacgatgcacccgcgggcaggaacaccatcttcattttccatctggtaggtaaaaactcgtaaacctaccccgatttgaggagccgcgagacccactccgtgggctgcatccatagtttcatacatatcggtaacaagagctttgaactcatcgtcaaaagccgtgaccggagcagctgggcggtgcaaaacgggattgccataaataacaacagggcgaatagccacagataaatccttcgttctcgaaatcacaaggtaaagagctattgatagagtatattggcgtctactcagcgagtaggtcaaatcctatgctatcgcgcagaagctcgtttgtacccccaaaaataggcagtagccgtgccgcgaggaacgcttgggctacaggatgctcattaatatagccatagccgccgaaaagctgcagacaccgatcggtaattgtgcaggctttttcagaggcaaagaccttggctttagcggcgtcctcagcggtaagctccccagcgttaaaagccgctatagcgcgtgccacgtagagttcggaaagttctgtattcatgagagcattagctagttcaaaacgggtattctgaaaatctgccacacgagacccaaaaaccttacgttcttttacatactctagtgtggcgttgagagtagtcctgctgatgaccgcggatgcagcggcaatcgctaagcgcgcttggggcagatgttgtttaatataggtcaagccttgaccaagctcaccgataaggttctcagcgggaacacgtacattctcgaagaatagctcggcagtatctgaggcccgaatacccatcttgtcgagctgccgtcccggggtgtaaccttcagatttttcgacaaaaaagagggagaatgaatcctcagaagcacgttcagaggaaccatcggtgcgggccaacacga

SEQ ID NO: 3626 - DNA, 23396 bp, synthetic construct
  source 1..23396: mol_type = other DNA
  misc_feature 1..23396: note = Synthetic
cacagctacccccgtgagagcgtatttacgccatgaagcgcgcgcatttgcacgaaccagcgtcactaacggtgccctcatcgttgcctttttcgccaattttcccactacttttatcgtccagctttaccgtttcagtcgtacacgctcacacccacaaccgtggggttcccgccttctaactcacgatccccgcctcgtacgccatgatgaccgcctgcacacgatcccgtgcgtccaacttattcaaaacatgcgacacgtgtgttttaatggtcgcctcagaaagcaccagctcccggccgatctcagagttcgacaggccctcagccaccagtttcagcacctcatactcgcgcggggtcagctgctcaataagttcctgatgctgcagcaccggctgctcctgcggcggcgcctcagctgcagcattttccctagaggtatccagtaccgggatcatatgcttgagcaggcggcgcgtggccgaaggcgcgatcaccgcatccccccggtacactgtacgcaccgcccccagcagctcctccggcggggcgtctttgagcagaaacccgctcgcaccggcccgaaccgccgagtacacgtactcatccaaatcgaaggtggtcagcataattacgtgcgattggggggcgtgcatttcaaggatgcgcgtggccgcctgcagcccgtccagcaccggcatgcgcacatccatcagcacaatgttcggtgcctgcccctgctccgccaggcgcgcataactatccacagcggcggcgccgtcatcggcttccatcaccacctgcaaatcgggttgagagtccacgagcatcttcagcccgccacgcaccagctgctgatcatcaaccaacattacagtaatcttttcatccactattacgctccttcacgaataattaaccaaaacctacactgactaaatttctcggtatggcaggtgcgcccgcaccgtgtaaccgccctgaacgtccgggccgtagctcagctcaccctcatacatgttcacacgctccgccatgccgcgcagcccgttacctgaccccggcaccggggaaaacttaccctgcggggcgctattgtgtgcactaatgcccagccccgccctgccccaggccaccaccagctgcacctgctgtgcgtcacgggcgtgcttaaggatgttcgtcagcgcctcctgcaccacccggtacgctgccagctcagccccctgcggcagggtgcctcgcggcaccccgctaatacccgagaactcgattggaacccccgaatcgcgtgtctgctccaccagcatcggcacctcacccaggctgggggcgggggtgtacatggtcacctcgtcggtgcgcagtatcccaagcagtgaacgcatctgtgcaagagaaccacgcgccgttgtggcgatcgtatcgagtgtttgctccgcaattttttgagatgtttccggctgtgagccatctgcgtcggtggcttcttcgctagcctgccgtgccgccgctgaggcataccgcgccccatcggcctgcgtaataatactggagagtgaatgcgccacaatatcgtgcatttcccgggcaatacgggtgcgttcgtcttgggccgccagccgccgctcctgctgctgctcaaattccaggcgcatagcgcgctcacggatttcgtcttgcagcagcacacgcatacgccgtgaagcaccaaaaaaccagaagaacgagaacgtgagcccgcaaaagaagagggcgaagagcgctatgaaagctgcaccagcggcattgaacaccgggtcattcgggctgaggctatgaagcaacgctataaaactacggactcccaccaggaatgagataacccacccgccaataaatgcgcgtgctcgtcctttttggttccaatgccggccggtatggtaagcggccaatagcaccggcaggtaggagtaaataacgacggtgggggcgaaaagcgaaaggagcagcgccaccgtaaaaacataaatactgccgtaggggttgcggtaccggtagtacaggctggtggtagtcacacccgcagtaataaaggcaacgcccgcatcacggtcagcggttcctaaacagatcagcagggtgagcatctgaatgctcagaacagccgcggcattaccccaccggtggtgtttgtcgaggaagttattaacgcggctagtgaagtccatgggttaagtttatcggtgggtagctactactcaggtatgagaaggccatgtgcgccagctgcatcatgataagtactacggttctcaggctgcccacactgtgagattcgcggggttgtgtgtgggtgtggttccgcaccagcagtagggtagtagcatgactgaacagcacctcaccaacagtattgacctcgccgtgatcgctggcgacggtatcggccccgaaattattgctcaggcccggcgtgtacttgaccgcgtatgcgagctcgatagcatcgccgtaacctcaaccgactactcacttggggctgagcactggctaaaaactggtgagaccctgcccgagagcaccatggatgcgctgaaaaagcacgacgctattctttttggcgctattggtgccgacccacgcagcggtgatatcccctcgggcctgattgagcgtgagatgcttctgaaactacggttcgcgttcgaccactacattaacctgcgccccgcgcggctgtacccgggggcggtgtcaccgctgagcaaccccggcgagatcgacttcgtggtggtacgtgaaggcaccgaaggcccctatgcgggtaacggcggtaccctgcgtgagggcacgcaggagcagatagcaactgaagtgtcgctcaacaccgcacacggggtcagccgcctaatccggtacgccttcgagctggcacaatcccgccgcaagaagctgaccctcatccacaaaacgaatgtgctggtgcatgctggccgcctgtacacccgcctttttgaggagatcgggcgtgaattccccgatgtgcagaccgactacctgcacattgatgcggcaacaattttcatgaccactaacccctcacggttcgacgtgatcgtaaccgataacctattcggtgacatcctgaccgaccaggccggtgcagtaaccggcggtatcgggtacgccgcctctggcaatattaatgcggtggggaagttcccctcaatgttcgagcccgtgcacggttcagcccccgatattgcggggcagaataaggcaaacccgaccgctacaatcctcgcagcggccctgctgctgcggcacctgggctatgagtcgaccgccgtgcgcattgaggaagcagtcgaggccgacatgcgcgccaatggtgcccgcacccgcaccaccgttgaggttggtgacgacgtgctgggctttatcggctaaccaccaccagtgggcacccgcaccccagcacgggtgtgcggtgcccggcagccccggcagtaatatgcgtggtgcccccatatcgggtaccctaaaacagggtgcggcgagcacacacggtttgcccaccgctggcgtggtcacgaaccacagcatccccacgcgccacccgcgcagtttaacgatgcgcaccgctcaccttcattcgcgggcggcacaccaagtaacgaactctcacggaagaagaacctcgatggccatcgaattcagccacgaaacgaaccaaaaccccgccagcgacgcccgccgcgccgagatcctagccgaccccgggtttggcgactacttcaccgaccacatggtcagcatcgactggaacggtgactataaaaccggcggtgaatggtcaaacgcgcgggtgcacgcctacggtccgctcagcttagatcccgccgccgcagtttttcactatggccaggaaatcttcgagggtattaagggctaccgccacgcggacggttcggtgtggacattccggcccgagaagaacgcggcgcgcctgaaccgctcagcgcatcgtatggcgctgcctcagctgcccgaagagacattcatcgaatccctgaaacagctggtgcaggcagacgaaaaatgggttcccagcggtgagggagaagcattctatttccgtccgtttatgattgcgaccgaggcatacctgggggtccgccccgcacgtcacgtggagtaccacgtgattgggtcaccagccggtaactacttcggcacccccgagccggtggacatttggctgtccacgaagtacgcccgcgctggtgaaggcggcaccggcaccgcaaaatgcggcggtaactatgctgccgccatgatcgcccagcttgaaggtgaagaaaacggctgcaaacaggtgatcttcaaagacccgcaccgcaacgacgcgctcgaagagctgggcggcatgaacgtattcttcatctacggcaaagagaacaagctggtcacccccgaactgaccggaacaatcctagaaggcgttactcgctcctcaattctgcagctggccaaagaccgcggaatgaccgttgaggaacgccccatcaccctgaacgagtggcgtgacggtgtggcctccggcgatattacagaggtgtgtgcctgcggcaccgcagcagtcatcgcccccatcggaaagctcaaagccgctgattttgagattcccgcagcctccgaagggttcggtgagatctccaagagcctgcgtgaggaactcgtgggtatccagaccggcacggtagaagaccgccacggctggatgacccgcctcgtctaaaaagctcacccccgcacgtggcttttcgaccgaaacgcaccttatagaggcagccccggccggaaagccacgtttcgcgcttaaaatccgtgccgattccctacccgccaccaccgcgccggggtacacttgagacaagcagaagggaggttctgaaccgggtcacacccgtgcagggcctccttttgcgcactcaaaaccacacggtgcgggtgcgtaccaccgatacatcaggttcaaccgagggagaccccatgcacaagctggccattattaccgccgtagcccccgaccgcgccgaccacctgcacgaaaccgcccaatccgtggcccaaacccgcaaccacctcaacatccagtggatcgtggtgtgggacggcgtgagcacccaacccgtcgaacacgcagacgcacaactaaccaccggcaaactctgcagcggcgcctccgtggcccgcaacaccgcactccctacggtcgaggccgaatacctgctcaaactcgacgccgacgacgtgctcaaccccgaaggcgtggccgccaccatccaccagcttgagaaaaacccagacgccgggtgggccgccgcaaacatgctcatccacggcaccggcgaacgcaccgaacactgggccaacaccccagaaacctaccccgaaggcaccctcgccgggctctggaccgtgcccttcccgctacaccccggcgccgtcatctaccgcaccgaccgcgtactccaagccgcaggctggcccgccctcaacagcgccgaaaacctggggctgctcctgcacgtcgcagaagacacccaagggctgcgggtacccgacgtactcgtctaccaccgccaatgggacgcccaagaaagccaacaagaatacgccccccaacgcgaagagcaagccctcaaaaccatccgcgccaccattaacgcccgccgcggacgcaccggccgcgaacccgtatacttccgtacccgctaaaccccgccgcagacgcagacaacccggcggctgacaccaccgccgggctggtaccctagagggtatgcgtattgcacgatttaccgtagatgacgaactacacttcggcctcgtcgaaggcgaagaaggcgccgaaaccctgcgcgttctcgccggtgacccgttctacaacggcatagaaccaaccggtgcaacccaccggctagatgatgtgcgcctactcgcgcccatcatcccacgctcaaaagtaatcggcgctatcgccaactgggcgggcacaccggcaccggccgcaccacagttcttcaccaaacccaacaccaccgtggtaggccccggcgaccccgtcaccctccctgactactccgaggcggtcagccccgaaggtgaactcgccgtcgtcatcgggcgcatcgcaaaatccgtgccgttagaacgcgtacccgaagtcgtgtttggctacaccgtagccaacgacctcaccgcccgcgacgtcatggacaccgacgcccaatggacacgcgctaaaagcttcgacggctcaaccccgctcgggccctggatcgaaacccagctcgacaccgactcgctgaacatcaccacctgggtagacggtgacaccctccaagaaggcaacacctccgagatgcactacagtgtggctgagctggtcgccgcagcatcagaagtcttcaccctcttaccgggcgacattatcctcaccggaacccccgcaggaaccaccgtgctgcacgaaggcaacgaggtcgaggtggaagttgaaggaatcggcgcgctcgttacccgaatccgcagctaacccccacccggcaccagataagcgggtaccgaacagcacctgcgcctcgccaccgaaacctctgacacatatataggagaacaataatgaccgaataccgcggccccgcgctcgcagacgcgagccagacccgcgtccgtttctgcccctcaccgaccggaaccccgcatgtgggtatggtacgcaccgccctgttcaactgggcgtacgcgcaccacaccggcggcaaactggtgttccgtatcgaagacaccgacgcggcccgcgattcggaagagtcgttcaaccaggtgcttgagggcctgcactggctgggcattgactgggacgaaggggtgggcgtgggcggcccccacgagccgtaccggcagtcgcagcgcatggacctgtacgccgaggtcattcagaaactcaaagacggcggctacatttacgaagatttctcaacccccgatgaggtgcgtgaacgccgtaaagctaaaggcgaagacccgcagttagggtacgacaactatgaccgcaccctaactgagcagcagaaagaggcgttccgcgccgaaggccgccagcccgtgtggcgcctgcgcatgcctgaggaagacattacgtttaacgacctggtgcgcggcgaaatcacgttccgggccggttcggtaccggactatgtggtggtgcgcgcaaacggcaagccgctgtacactctcgtgaacccggtggatgatgcgctcatgggcatcacccacgtgctgcgcggtgaagacctgctctcgtcaaccccgcgccagatcgccctgtaccgtgccctcattgatgtgggtgttaccgagttcatccccgaatttgggcacctgccctatgtgatggggcagggtaataagaagctttcaaagcgtgaccccgaatcgaacctgtttttgctgcgtgaggccgggttcattaaagagggcctgctgaattacctctcactgctgggctggtcgctctcagcagaccaagacgtgttcacggtggacgagctggtgcagcatttcgatgtgcacgacgtggtgggcaacccggcacgtttcgacgtgaaaaaagccgaagccattaacggcgaccacatccgccgcctggatgccgccgatttccgggaccgcctggtaccgtacctgcaggcggcgggcgtgctgggggagcagctgagcgaacagcaggagcaggtgctcacgcaggccgccccgctggtgcaggagcgcatgcagcttctgggcgaggcacctaaacttctggcgttcctcttcaccgctgatgaagatattacggtggctgatgatgcgcgtaagcagctgaaagaatccgccccgcaggttcttgccgccgccattgaggcgctcgaacccatcaccgagtgggattcttctcacattgaggcagcactgcgttcggcgatcgttgagggcctggacatcaagccacgcctagcattcgggcctgtacgcatcgcagtttcaggtgagcgtatctccccgccgctgttcgaatctatgcagattctggggaaggaatcatcgctgaagaggctgcgtaaactagcagccgatttgggggagtagaatattacttagcccctttctgaaagtgccgcccgacccgccgcctgccacgcgcagggcgggccgggcggttctcttataccccgtgcgcaaccggtagagtggtgcgcgcactatgggcgcagggtgcgtacagcttatgcttatagcagtgcaggaaccgctgagaggctacgatgctggagatttttagcagtaaaaaacgcgtgtggcgcgccgtccgtaaaggcacggtgatggcgttcgcaaacgcatcgatcattatgctcatcgcaaccgttgccgatgcgctgcggtctgtgtggactattgtggcgattatggtggcaagtctgttggcgtatttcgctgcctaccatgaggcacgttttgacgacgaacaagatgcctgggaggcgcagcagaaagcccatgctgaagccgctgacaccagcagcactgagctggagaaaggacaataaggatgacccgcaaagatgtggcgctggctctgacgatttctgttgccgccctgctgctgtatgtgggggtaaagcaggtgttgggcgggcactgggactgggtgacgttcgtgatctgggtgctgggtgcgctgctgtttgggttcggcatggtgtacgcaaaatcgttcctaatgcgcctggtagatgagatgaacgaggatggcgtggcccctgaaacgcagcgcaaacgccagccctccaacggcggtgagggcagcacgaatagcgacagcgaaccagaaaccgggaagaccacaaacgagcacccaagcacggacaggaacggtgcttaaagccagcagacaaaggcagggtattcgtcgtgacctggagtagctgccgggccttgcgcacccgcccagaaccggaaccatcgctgaggcgcagcagcaccccgatgagaaaaacctcagaaaaatattggccatgctcaccagtgtttgtgcttgtcagagcgttctatgggatagttttccgggttcagagacagaatttcacgcccgccaagcccgtgaagacttgcagggtgcccaacagttcggtatagtattcttcgttgcgcggttgtagctcagttggtagagcaccaccttgccaaggtggatgtcgcgagttcaagtctcgtcaaccgctccaccaagcccctaaaggttttatctttgggggctttcgctttggttgttacttttctagaccgcacggtatttgcactaataccgttgcttatggggagggggagaacaaacgttccgctgaatacttttgagattatcacgactattggttttcagtagcagccgtgcggagtttcgcctgtatgctgtgggaataaattttagaatcccgtgagtaaaccctaaaggtgcggtagaattggttgcgaaggctcctggctctgtaatctagttattggaatagccattgactagtgggtaaaacctctagtcagtggctatcttcttgcccaaaataagcataggataagttttaaaaaacataccgccctctgctaagcagcaagaggacggtgagaagtcagcgccaagatgcgccttattgggaaccttcattttccaggaataactgtaacagacggcggtacggctcgcaagtgcaggtggcagggggttacgcctaatggcattcgtcatagaatcttaaaaatcagataaaacttgtgcagagttcgaaaaatcagtatagggttatacacgggaaggtaaatcctatcttcatttttaccccatccgcagagacaaaggctgtttctgtatgggtacacatagactcgctcgttgaaggagtatacgtatgtctgagcacaccaaatatcggattggtattgatgttggtgaccgttctgttggcctagcggctattgaatttgacgatgatggttttcctctttctaaccttgtgatggtaacttatcgtcatgacggtggccttgacccaactacaaataaatcacctaaaagccgtaaagaaacacgcggtgtagccctccgtactatgcgtatgcgccgccgtaaaaagtcgcgtttaaaggatttggataagaccctgcgagctcttgggtatgttgttcctgcatgtgaagaacctcagacatatgaggcgtggaagtctcgtgcgttattagctacgacaaaggttgaaggcgcccaagagttaggcgagcacttggtgcgtgcggtacggcatatggcacggcatcgtgggtggcgtaacccatggtggactctcaaccagcttgaaatagcttctactgcgccttccgatacttttgcgaagattcgtgagcgtgctgagaaagaatggcctggtatggttcctgaagaagcgactttggggatgattggtgctctcgcggcaagtaataatgtgcttttgcgcccccgtacctatcgtaaagaccagccacgtcacagtaaaaaacttaatgtgctggggcaggagcctattctggtagataaggtgcgccaagaggacctactggccgagttgcgtacaatctgcaaaaggcagaatattgaagatcagtatgaaaagctagctcaagcggtctttgaacagacgcgtccttatgtgccgcttgatcgtgtgggcaaagatccgttacagccaaataagtctcgcgcttcgcgggcttctcttgaatttcaaaggttccgaattcttgatgcggtcgctcatttacgtgtacgtgttggagtctcagaccgtcgtgctctcaccgacgaggagcacgataaggctgtgcatttccttatggggtattcgaaaaaggatgtaccaacatggggtgatgtggcagatgagatcggcgttgagccagctcatcttatcgctccggttattgacgatgttcgcttgaataaggccccgtatgatcgttcttctactgagtttgaacagaagatgaagaaaaagactcgggcacgccagtggtgggacgaagcgaacctggaatcgcgctcccagctgatacttctagtctctgatcctaccgatgaaactacgcgtttggcggaggtatcggggctttatgaggtgtttgaaagctggcctgatgaggagaaagaagccttagaaggcttgaaagttgaatcagggcgggctgcttacagcacggacactctcaataagctgagcgaccatatgcgcctaaaacgtattgacttgcatgaggctcgtaaaatagcgttcggtgttgacgatatgtggcatccgccgctggatcgtattgatgagcctaccgggcaacccactgttgaccgtgtgcttacgattgtgcgccgctttattttcgattgcgaacgtgcttgggggcgccctgagaacgtagtgattgaacatgcccgcaccggtttgatggggcctgctcagcgtgctgatgttctgcatgagatagcgaagaaccgcaaaaagaacgataagatccgcgaagatttaagagcaggtggtatcaacaacccgactcgggctgacattcgccgtaacgctattgtgcaggatcaggagtcacagtgcctttattgtggggctactattggcgtaagttattctgagcttgaccatattgtgcctcgcgctgggggtggttcttcacgccgggagaacttagccgcagtatgccgcgcctgcaacgacagcaaaaaagacactccgtttgcggtgtgggctaagaacacgtcacgccctgtcactctggaggggacaacccaacgtcttcgagagctgaaggcttttaaacgcccgaaggatcggcgcatgttggatcttattattcgccgtttgaagcagactgagaaggatgaccctattgatgaacggtcgttagcgtctacctcatacgcagctaccgcaattcgggaacgcattgagcagtacttcaatgagaaagctgaaaagcttgatctggctaaggtacacatagatgtttattcggggtcgctgactcgtgagtctcgccgtgcgggtggtatcgataaaatggttcttttgcgcggtcaaagtgataaaaaccgttttgatgtgcgccatcatgcgattgatgcggctgttcttactcttctgaaccggtcggttgctgtgactttggaacagcgccgtctcattaaacaacagagggagtattccctagagaaatcacgccgtgaacgtgataatgtgtggcgcgattttatggggctgggacctgcggctcaggagaagttcgcgaagtggaagaaaacggcttacgtccttgcggatatcatcaaggaagctatctctaatgatgctattcctgtagtgagcccgctacgtttgcgcccgcagaatggttctgtgcatcttgatactgttgatgctgtactagaacgcactattggtgatgcgtggaccgttgaccaggtccaccgtattgtgaacccccaaatttaccttgcgtttgctggatatttgggaaaccagaaggctctggagcctgatcccagccgcgttctggcattgaacgatggacgtaagctcactgctgaggacgttatatatgtttttccggagaaggcggcatcaattctgacacctcgcggtgtggttaagatcggtgaatctgtacatcatgtgcgtttgtacgcctggaaaaaccgtaaaggaaaggcagaggttggtatgcttcgcgtctttggtgcggagttcccctggctcatgcgtgaaagcggcgtgaaggatgttctgcgagtacctatccataccggttctcaatcttatcgggatctgagctttacggttcgtaagaatattgagaaaggggaagctgtagaaattgggtggctgactcagaacgaggaacttgagtttaatcctgagagctacttacaggaaggcggcaaggataaactagctaaattcctcgcctttttgcctgagactcgttggcgtgttgatggttttccgatgccagataaattacgaattcggcctgccctattgtctcgtgaagaaatacctgaaggtgtatttgggacagaagaacagagcctgcttgaagaagcgttaacaaaggggctcattatcgctactaaagggttattgtcgttgcctgatgtaaaagtcttacgccgcaataatctcggtattcccaggtggcgtggtggctcttaccgcccagtatcccttgatattcagcgtgccgcactcgcggctctggacgagcaggagtaagagaccttggacagcaagtggcgtgttttggacttaaccgcttttgaaggctttgtctcttatgagagggggcgattaaaagtgggagagcggagcgcgccgcttgctgaggttgattttattcttcttggaccggggtgctcctgggggtatggccttgtgggcggtcttgaacgttttgatgttgcggctgctatttgtgattggaagaatacccctatttcaacgctttaccattggtctagtaatacgaaggtgtttacgcgtcatgaggcacaggcgcagctgactttgcctcggtcaaagaacgcttggaaacagatcattaaagcaaagctgcgggggcaagcaaatgcccttgatgctatggggcgcccaaatgcggagcagctgcgagcgtttgccagggccgtgaaatctggtgacccaaataatcttgaaggtcaaggcgcccgtttgtactggtcgtcgtatatgcctgagggcgggttccgccgtaatcaggtgggtgacgacactgtaaacggtatgttgaattacgggtacacgatccttcgtgggcgcgtgctaacccgtgtgatagcggctgggctgtcgcccactttatctctttttcaccgtaaccgttcgaacggttttgctctagtggatgatctcatggagccttttcgccctgcggtggattatgccgtgtataagttactgttgggaggagctacagagcttggcaggcctgagaaagccgccttggtgggcgttctcgctgagaaaatatctgaagatcaggattttacagttcgtagcgtcattgaggatttttgtattgaattcgccctctacgttgagggcaaacgtgaacgattaagcgttccaacgtgggagcgcgtaatgagcggcgatgaagccgagaaagaaggggagcggggtggctgagcctatgtggttattggtcatgtttgatctgccggtaaaaactaagggacagagaaaattagcgaatggttacaggcattcactcttggatatggggtttgaccgtcttcagttgagcgtgtattgcaagtactatatgaacggtaactctgctggcagggatttgtctcagctgcagtttcaagttccgccaggtggggcggtacggattatgaaggctaccgattcgcagtgggcagcaactattagatatttaggtcctactcaagagaccccggaagagcctccgggggctgtagatttcttttagctctacaaataatggaaatgtggggtgtgggtaatatcatgttgcccacaccccacatttatgaatttgcgggtggtatatcgagccagtttttctcgcatagggccaataacagactcttttgttggggatatgaccagattttccttcgaaaatctggccatatctagccgctgactagtagttatatgcaacgtactaagtctatcaaggctacagaatgaaggttcccaacgcccgtctcgtgatctcgcggatgctattaagtctatcaaggctacagaatgaaggttcccaacagcactatcagcgaaagctctgcaggaggtaagtctatcaaggctacagaatgaaggttcccaacgtgtctgatgcgcaggtgtcgtggcttgtaagtctatcaaggctacagaatgaaggttcccaacttcggactgttttagcggcccatacgcctaagtctatcaaggctacagaatgaaggttcccaacgattttgtctaagattgctgagggctgctaagtctatcaaggctacagaatgaaggttcccaaccaatcgctgcggggctgtcggtagattttaagtctatcaaggctacagaatgaaggttcccaacactggtggaatacggttctggttcccgctaagtctatcaaggctacagaatgaaggttcccaacgcaggatgccgcataagtttgcgatggctaagtctatcaaggctacagaatgaaggttcccaacttcgttgccttctgttgttgagcctaaataagtctatcaaggctacagaatgaaggttcccaacgggtgtggcgccgccgccaactcacagataagtctatcaaggctacagaatgaaggttcccaacgggtgtggcgccgccgccaactcacagataagtctatcaaggctacagaatgaaggttcccaacgtatttttacgccgccgttgcgtgagcttaagtctatcaaggctacagaatgaaggttcccaacctaaactatgattcccgttgcatacccataagtctatcaaggctacagaatgaaggttcccaacatcgtcctcgtataaggacacagttcattaagtctatcaaggctacagaatgaaggttcccaacccatcaaaacagcaaccatacaaaaaactaagtctatcaaggctacagaatgaaggttcccaacttgaacgggcgctggtgttggcgtttcttaagtctatcaaggctacagaatgaaggttcccaacccacatacgtggggatgagctaggctatttaagtttagcaaagctactgggatgaatgcttccactattgttggctagagtgtgcgaagtagagggtttgggaaagtattcaataaacactgtcggtagagtttcgaaagatgtgttaaatgcgaaacccgagcgccacaaccgtccggatgggtctcggatccacttctaacaactactgttgttagcattactaacaggatagaaggccgcggccataatatcaaaatcctagttgaagcctggggagtaggaacagaatattaccctggaaatcatatagatataggggagaaacttatatcctatatgcctcgtccatatccacaacaaatggtacctgcactgggcgtgcaataaaactattttctttgtattgatagggcatgtttaaccgtcagcttcgcgtctaccgttttttcatgggctgcggtgataaaagtaattttttgtgtattttcggtattcggtttgtaaaaccctgggagttcgctaaaaattatgggtagagcattattgaggatgcttttggatgcgcgccctgcttcttccggttaagagtggtcttcccggtggtgcgcggcgcgttttttgtttcgaaaggaaaccaatgaacctgactctcgcttccggcaaggttacaaagtctttcgtggctggggccttggccctgagtgtttctggggttgctgttcccgcatcgtttgctgcccctagcgcaccagaatcgcagagcgcacctgctgccacgtctcgcaccttagacgcggcggcaactaaagctaagatcacgcagggcctaccgggccagttccaggtctcgtattctaagaagaaccataagctgtgggtggcgggaaccgctgacggggacatgcatgtctctactctcgcccgccttgatgctgattcgttgaaggttgaggccgtggccgagctgcccattattaagggtgagagaggctacaattttgaggccgcttacggggtggaagttgatgatgttgagggaaccgtgtgggttacgaacacccgcgataactccatttcggtgtacgaccaggccacgatgaagcttgtgtggactaaccacgggcttgataagaacgacgcgaactggattgagcacccgcgtgaggtgcgcattgaccacgcctcagggaaggcgtttgtgtcgggccggttctatgtgtcggctattgacttgaaaactaagcaggttcagaagctgcagcttgcgggtgcccctgacggcggggtgcggtatgtgggcatgaacatgcacgtcgattctcaggatcacctgctgtatgtgccggagcgcaccagcggcaaactgttcgtggtagacacgaacaccctcaaaactgtgcgcaccattgatgttcacgcagatactgagggcactgaggttcgcccttctgatgttgccatcgataagtctttgaacgaaatctatgtttcttcccagggcgtgaacggcgttaattcgggggtgaccgtatatgacttcaccaccggcgagtacaagaaaacgattgctttcggcacccaggccctggccatggagcatgatgaagagcacgacctggtgtatgtgagtgatttcggcaccggcaaggttggtgtgattgacggtgccaccagcaaagtcattggtgaggtcgccatgaacggtgcgaaagctaatgatttgaccatgctcaataacggctcgatcgtggctgtagacaagcaggatctgcccggcacagcccgtgtgccgtacgtgctgaacggtgtcaccggtgaggtgaaaacctcggataagaccacctcgaaagcgaagaaagacaaggacggcagtgagatccccgccgccgaatcagagattcacccgaactccattatgaagttcaaagctgaggtgaaagcaggggatgaggcggccgtgcagatcaccccgcagcagcgtgaatttcaggggtaccccaccgaggccacccgcaccgtgagctacgccagcccggtgattgagttccccgacgggaagatcgacatcaccgcagactataagctccatattaaaggcagcggctacgtgggggagggtgccgcgaagggcgtgtacgtgttcctcgtccctgaggggacctggaaacccgggcagagcattgaccgtgagcaggccatgaacctgtcaaagaacgccgtgtgggtgcgccccgagcagctgaaggacggctcgtttgagattgacctgcccatccccgcgaacaccctagagtacggcaagaagtacacggtcggcaccattgctgcgcacgacttgtcggtgactgaccgcagcctggactactccgcaatgtttgagatcaccaaggacgggcagaccagctctagcgtgtccggcccgaaaactgagcagatccagggcggcgggagcaccccggcacagcccaccgaagctgcggctgtgaccgcgccttcacccacctccgcccccaccgaaccggcatctgcgcacccctcagcaacgggaggcaccaccggtgaggcgaagcccgaggccactcaggaaagcgtatccgtgaccgttgctaacggtaaccaccccggcggtgactccgcacctcagggtacccgcggctccacatcccgcagcctggcgagcaccggcgcgaacggcgtgatcatgctggcgggtatgggtgctttggctattgtggccggtgcggtggtgctggttgtacgccgccgcagtaaatcctagccgtcacctggtgcgctaaccggcaggctgcgtgaaaaaccgcaggggcaccccgaaaaacaggggtgccccttcccggtgggtgatgcgtaaaaccgccgcagtacggtgcctgaacggggaggaaacctcggcgggagccaccccatacaccaccctgtggaagtgtcgtaaaacactgatagctgatttggtggtggggtacccgaactgtatagttatatctgttgccgaaacacccacggcacataacgagaagaaattctcacggccccatcgtatagcggcctagtactccgccctctcacggcggcaacaccggttcaaatccggttggggtcacgctaagactaaagaatccccggctctcaaaagccggggattttctattgccacagtaccagggctacttcagaagatgcgcgtacttacggcgggccgccgcaaccttcgggctgatcaccacagagcagtacccctggtacgggttcagcgcgtagtagtcttggtggtagtcttctgcctcccagaatgtctcaagaggttttatttccgtcaccacctgagcatcgaaaagagcctgcgcccgcacctttgccgcctcaaaaatctttcgctgctgctcgtcggcatacagcagcaccgaacggtactgcgacccggtatctgccccctggcgatcccagcttgtggggtcgtgggaggcgaagaaaatatccagcaccgcgtcctcaccgatcacgttctcatcaaaatcaacgcgcaccacctcgtgatgccccgtcgtccccgagcacaccgaccggtaatccgggttcggtacggtgccgccagcgtagccgcacacgctcgcgctcacgcccttaaactggcggaacaccgcatcaatacaccaaaaacagccgccgccaaccacaaaactacgcatcgtcccgctccttcacgaaaaccactgtctcacctgacaccccattaaacgccccgcaccttccgaatattccccgccgggtgctcatgccacaatagagacatgactgaaaccaccacaccaaacctagcgcaggttgttgccgccttccacgacctctacccgccgcagctggccgccgggtgggacgcatccgggctggtctgcgggcgcaccgccgcccccgtgaggcacgtgcacttcgccgttgatgccctcgccgccaccgctgacgaagccgtagaacacggcgcggggctgctcatcacccaccacccgctgctgctgcgcggtgcgcagttcatccccgatacggattataaagggcacgtgctgcacaccctcatcgaaggacaatgcggcctgctcggggcgcacactaacgccgatgccgccattgcgggcgtgaacgaggcactctgcgacgccctgcacctcaccgaccgcactgcactggccgaacctcaaactcaagaacttgggggagaggaacaccccgtcggaaccgggcgcgtgggcacactgcctgaaccgctcaccctgcgtgccctctccgaacgcttagcggatgcgctaccggcaaccgcgggcgggctgcgtatcgccgggcgcccagagcagcgtattagccgtgtggcactgtgcggcggggcgggtgattccctgttcgaggcggtacgttccgttggggcagacgtgtacattaccgccgacttgcggcaccaccccgccagcgaattccgtgaacaagagctcgtgcgcggcaccgggtgcgcgctgattgactgctcccacgcggccagcgaatcgctctggctgcagcgcgccggtgagaggctgcaggcgctactggccgaacgtggccacagcattaccttcaccgtctcatcactgaacaccgacccgtgggacttcaccgtatccaccggcagcgcggcgggttcagcatccacccggtaattcgccgtaaaacccaaacacctcaacccacacaaacccacattgcggtggtctatggggtataaggtgtgcggcgtctagaaacgggaaggccccgggaaacccaccacgggtcccggggtcttccacctttagctgactacctctgcagggagagaacagccggtgctatcgcgtcctcgtagcattcgcgtactggtacaggaactgagcagcctcagcacggctcacttgagcgcgcgggttgaactccttagactgcgcatcaagcaccacgcccttttgctgcgcccacaccatgtcgcggtagtaaatgttgctgccagcgcgcacatcggtgaacggtgaatacttcgggagcgtcacgttcggcttaccggcggcgcgatacatgaacgagacaagggtctgccggttcacgctatcatccgcatggaatgagccgtccccataatcattaccaatattctgctgacgagcccacacaatcgccttataccgcgggttgctggtggaaatatcgcggtagggtgactgggctgggagctgtatatcaggggagccagccatacggtacagcgcctccaccagctgtccgcgcgttacacgctctgacggggagaaacggccatcacgggcttccagcacattctgatccaccgcccacgtggcgctctggtagtagcgttgcgaggactccatatcaacaaaccgggacttctgcttccgaacctcctgctgtgaggtaaccgcaggaacatcaatggtgcggctaatcgcgcgggacggatcctgcgacttcaccgacacggtaacttcgtactgtttagatgcacttacctgcgacccgttgactcccattgccacaatagcgcctgaaccatcaccgaacattgcagtctgcaaatcctgctccacccgcttcaccacggtgccggtacccttttcacgaagcaccagctcgaaggaatcgccctcatctaaccggaaatttgtggcccacaccgatactcggttgtatgacttggtggtattgatcgtctcgccgttgtacttgacccttggctgggcatccttcaccggcagatttgcccgcgcaatctcattcacctggccgttatgtcggttgtacacaatgtaggcgtaacgcttcgaagcatcaaccttgaaccccgagtactccagggtggacgtaaaactgctggtgtttttaccgtcctgcgcggcaaaggtaatgtctttggaagcgagaggctcaccctgaggcttcccgttcgcgtccacctcaacgatctgcgcgtacgaggttgaacctgcgggaatatttgagaagttcagcccctcaactgtcaggctggcctgtttatccacaggattcagctggttattgcgaatggacaggcgctgcacctcacccgtgacagtattgagcggaacgctcacacccgtcatggtgccgtaaaaatactcggagtacacatccagcttaaaggtgccaatgctgtacgggcctttcgccgggtctatagcattgccggggacgttgagctgaatttcgaaggaaccgtcagcgttaatcttgtctttcggaattacagtagtgtaaaggttcggaacgcgccgcatcttctgccgcgacccttcaacaaacatggaccgcgggccgaatgcaatggcgagcgaaccgtcctgttcacggtgctgctcggtgaacccggtgccgcgcaccgtaatggttccgccctcaatcaggtcaaggtttggggtatcaacggtcagcttggggccgctggctgcgggctgcccagcggcttgtgcggcggccggagtttcggctgctaatgctgccggcgctagggcggcaccgagcggcaaggcgagagccccggcgagagtcagagcgcatgcgcgcttgggcaggttgtgcggtgagaatgaattacccatcagattactccactcgtaaagtaatttattgataccttcacggtagcaaaacgcctagtgggagtcgaggaaaaccgcaaaattaccccgaaaagcattaactgtaaagtaaaggtgtagaaaaactattcatagattaatattcattaaatggcttattcgcactttagtgtcattaaaaacagatatgtatgtttatatgctttaattctctgtatatatatgtttcatgcgtaaagtatctggggtggtcttagtattgtgcagcacagtcaaagatctatgaccccctacacatgccccatgggccacattattggtgtgcaaacaggggagtgggacacagaggagaaaatgttgaatccgcagacgccccagaaaacacggcgcacaatcacagtgcattaatacaatgcagaaaagaacccccgcgccgcacaatcagaggagatgatgattgcgcggcgcgggggagactcaagagcctgaaccgttgattacttcttaccgtaaatacggtggtaacggtacaggaaggccgccattgcgtcacgggtaatggcctggcccgggcggtaagtacggtcgtcccagccgcggctaataccgcgatcggccagccagctgatctcggtgtagaacaggttatccccgttcacatcaacaaatgacgtgtgccgcggagcgtagaaccggtagtccctcgcctgacggtagaagaacgccgccatggcctcacggctgaccgaatcattcgggcggaacgtaccgtccgggtaaccggtagtaataccctgctggtacatccacacgatttccttgtagaacgggtacgaggcgt

SEQ ID NO: 3627 - DNA, 23378 bp, synthetic construct
  source 1..23378: mol_type = other DNA
  misc_feature 1..23378: note = Synthetic
aggggttggcccctgggagggggactggccggagggcgaccactgggaccctgacctgttgcgtgagggcgaccgtcgcaatgtagtcgataagtatcgctactggaagatggaagctatcattgccgatctcgatacccagcgccacgattttcatgtggcgatcgagaactggcagcacgatctcaatatcggcacggtggtgcgcactgccaacgctttcctggctaaagaggtacacattatcggcaagaagcgctggaacaggcgcggtgctatggtgaccgaccgctaccaacatgtgcgccaccatcccaccattgaggattttttggcctgggctgaagctgagggcgttgctgtgattggtatcgatattttccaggactcccagcagcttgagacctacgaactgcccaagaagtgtgtgctggtctttgggcaggaggggcccggtctttctccggagattcacgctgccgccgaagcgactctttccatcgagcagttcggttctacccgttcgatgaacgccgcttcggctgctgccgttgccatgcacgcctggattcgcagacacgtgtttgggcagaaagtcagctaacaagcctgtttctgtggggcgcgattggtaaggtgccgcttctaaaatttttgcgaccggtaaaggtatccggggaaccagtagcatctgggtctgaggggccttgccggtcgcaagcgttctaggctgttgagaagccggctccttgcagattatccagtctgtgagcaaaagaatacttgattttgaaagtatcttagggtgtattctacatatataggaatttaaaagaaccatacgccctcacaaggaaagagcgcactcatgaaaccagaagattttccccggcctgtctccgaacacagtgccggccacgaaccacttcataccgacaccagatctcttcagcacgtagagtccaccgccagcccaaccctcaccgaggcacccgcgcaagcggcgtcgtcctcagaacaaactcccgaagagcccggcactttcacccgaagcatcatggtccaagaccccaaacggcaacgcaaaatgatacttgccctcatggtgccgctgttcatggcgctggtggcggtgtcggtggtcaacgtggcaatgacccccattagccgctcccttaacgcagacaccagccaggtacagtgggtggtctcgggctacgcgctggcctttgcggtttttctcgtttcggcaggccgtttgggtgatgccaccggacgacgccgcgtgttcatcacgggtatcgttctgtttacgctgggctcgctgggcagtggactggcgccaagcgcagattttctgattgcagcccgtttgctacagggattcggttccggcctgctcaacccgcagaccaccggcattattcagcagcagttctcgggccaggcacgcgctaaggcttacggcatgtttggtaccacggtggcaattgcaaccatggtgggcccgctgctgggtggcgtgctgatccgtacctttggtgaggctgtgggctggcgcatgatgttcctgatcaatgtgcccatcggtattatcgccattatttttgcgcgcctatggctacccaatgaccgccgaactgccgagaataccccgcacggtgtccgccccaagaccgaccttgacccggtgggctccctgctcatgaccgtagcgattttcgccattatgtggcccttcgtagagcggtctgccggtgctattaactgggttgctctgccgattggtctgctgcttctctggggctttatcacctgggagaatcgctacaagagccgcggccgtgagcccatgctgaacatgagcctcttttctgaagaagccttccgcaacggcattttgattgtgggcctctacttcctgggctccactagcgtgtggctgattgtgccggtttatatgcagtctcacctgggcgaatctgccctggtggcggcgctgattagcctgcccgcttctctactttccggtattttggctccgattgctggccgctatgtgctccgcgccggacgacgcatgattatgggcggtcttgcccttatgatggttggcctggcgacatctgtggttgtcatgtggaacgtagaatcaggtgccctgccggtgtgggcagcggcagtttcgctctccctggtgggtgctgcgggcggcctcaccatttcgcctaaccaaaccctgaccatgaagtcggtttcgccccgcatcagcggtgttgccggcggcgtgatgtctctgggtcagcgcatcggcaccgcagtgggtaccgcgctgattcccggcattatgttcagcctgaccgacgccggtaagggttggaacatcggctttgccgcctctttcgcggcaattttcgtgctgatggtctttggcctgatcttcacgatcaaggatcgcaggcgtgagctacgcgagcaggctgcttaaaaagggttcggtacacgtggggagcgccagtacatttctataaatgtactggcgctccccacgtgtaccgaaccccaatgacctacatcagtccgaaaatccagactgccagggtcatggtggtcagggtaatgagcacgatgcccaccaggttgagccagaggcctcccttgaccatctggccgatggagacgtaacccgagccgtaggcaatcgcgttgggcggggttgccaccgggagcatgaaggcgcaggttgcagccagggcaacgggaattgccagtagcatggggtcgaagcccatacccagggccataccgcccgctaccggtaggaaggttgctgcggttgcggtgttggaggtcagctcggtgaggaagataatgccggtggtcatcaaaatcaccagtaccagaaccgagattccttcaaggccgcccacagcggagccaatccagtcagttaggccggaggatgagaactgggctgagagcgccaggcctccgccgaagagcaggagcacgccccagggcagctgcagggcggtgtcccagtccagcaggcgaacacccttcttacccgcggggccggccggaagcaggaagagcagcaggcccacgagaaccgcaatgccggcgtcggtaatcggcggggtatcgaaggcaacgggcacgataatccaggccagagcggcgagaacaaagatgatgagcacgcggagctcaccagagctcatcttgcccagcttgttgtattcgttggcaatcagttctttaccgccgggaatgtggtcaatttccggcttgaaaattaccttggtgagcaagaaccagcagacgaacatcatcacgaccgccaggggaacgcccacaatcatccactggccgaagccgatttcaacgccgtgggtatcggccatgtaaccggcaagcagggtgttgggaggggtgccgatcagggtgcccagcgaaccaatcgatgcggcgtaggcaatgccgagcatcagcgaggtgccgaagtttgacttgacgatgtctccagcgccgccggcctcagtggtcttggggtgctgaatctgggcgatgagggtcaacaccgagatgccgatcggtagcatcatcactgcggttgcggtgttggaaacccacatagagagaaagccggtggcaatcataaagcccgccaccattgacgagggcttggtgcccatcatcttcagggtcagtagggctatgcggcggtgcaggttccagcgctgcatagagagggcgagcaggaatccgcccatgaagaggaagatgacgttgttgccgtaggaggctcccacctcgtcaatttttacctcgctgttaaacacggggaaaatcaccagcggcaacagggcagtggcgggaatgggtagggcttcggtcatccaccaaccgcccatgagaatagcggtggctgcggtgagcttggcgccgtggggaacgtctgcgggcatgatgaagtagataatcagcgcgagtagaggcgctccgatgagccccaccaggcgcttggtacgttcgttcttatcaaccgcttctgcctgcgcaccgcgggagagctgaatttctccgattgcctgtgttggaatcggctcgtaatttttgaggtgatcgcccaccatgtggggttgcctctgctgttcttggttggtcatctttttccttgatggaacggtcgattgtgtgctgtgacaagctatggtatcgctccggctgtattttgtggtgtgtattacgcaccgggtgcgccgtgttgctcgggtggggcggtgatgtgaggacgccgcccctgtggtttacctgccttggggcaggtgggtgcgtgttggattccggtggggcaggggagattgcaaactagacccacacgggttttccttgattttgcaaggaactgtaaaaattgcagatgtgtcaaagcgtgggtttaagtgtgaaaccttgcgaaagaccctgccttttaggctttaacttgctagaataaaaaccagttgtgcgcctggtttaatcgccggaggcttctggctttgaggcgccttaaacacgcagtcatcaaacggtgactgaccttcaactcaaggagttcagcatgcctattgctaccccggaaaaatacgcagaaatgctcgaaaatgcaaagactaagggctttgcatacccggccatcaacgttacttcttcacagaccctgaacgcggctatccgtggttttgcagaggctggctctgacggcatcatccaggcttccaccggtggcgctgcctactggtctggccccaacaagaagaacatggttgttggtgctctggctatggctgcttacgctcgcgttgttgctgctcagtacgacgtcaacattgctctgcacactgaccactgccccaaggataagctggacgaatacgttctgcccctgctcgatgagaccgagaaggctgtggctcgcggtgaagaccccatcttcaactcccacatgtgggacggttctgctattgcactggacgagaacctggaaatcgcccagcagctgattgagcgcacctccaagaaccaccaggttctcgaggtcgagatcggtgccgttggtggcgaggaagacggcgttgagggtgcaatcgatgactctctctacaccaccgttgaagacgctatcaagaccgttgaggctatcggcctgggcgagaagggcacctacatggctgctctgaccttcggcaacgttcacggtgtttacaagcccggtaatgtgcacctgcgccccgagctgctgaaggaaattcaggatgaggtaggcaagaagtacggtaaggaaaagcccttctacctggtcttccatggcggttccggctccaccgagcaggaaattgcagatgcagtttccttcggtgttgtgaagatgaacgtcgataccgacacccagtacgcttacacccgccccgttgccggtcacatgctgtctaactacgacggcgtgctgaagattgacggcgaggttggcaacaagaagacctatgatccccgcgtttggggtgccgctgctgaggctggcatggcagctcgcgtggttgaggctgctaagcagctgggctccgtgggtacctccatcaagtaaagcctgctagtttagctcaaaaatcccggcccaccctgtggtgggccgggattttttgtgtgcttgggtcgtggggtggtctccgaccggttttgtacaggtttgtctcctgtgtacaaggttatctctgtacgcccgagacaagcctgtacaaaaccgcagggcgggcgaacagagcagcaataatcccaggtcacctggtcaaaagaaacccgcttggtagtatggaaaacgtagtttacctaacagattaaggagaaataccgtgtcacttgccggtaaaaacctgcttgagggccccgagcccacctacctgcccaaagaagccgagcttgaaattcgcattgccgctggagatgaggccgaagacttggtcaaggctttccccaagtcatcgctggcctgggctctgcttgctgaggatgctctcaaggacggccgcaccgttgagggctatgcctatgcccgcgtgggttaccaccggggcctggactccctgcgtgctaacggttggaagggtcacggccccattcccttctcgcacgagcccaaccgaggtttcctgaaggccctctacctgctgggtggcgcggcagctgccattggcgaagaggatgaggcgcagcgaatcgagaatttcctcaacgatagcgaccccgaggcaaagagccagctctcccgctaggggtcttgcagggagcggggcggtcttcagtcaactggcatcgggatgaagcgatacaggtgcgagcttgcgagcactcaggagtgagcggaatcgcgaagtgtgcgttaaagggaggttggctgaagatcgccccgtgtactgcaaacttacggaggctatgacagctcggggaatgcctcagccaccgccgggaaggtgatcttaccggcgtcagtattcaggcccagttgcaggtcgggattagccgccagggcgtcgtccacaccggcggcgagcttgagcacgtagggcagggtggcgtcggtcagcgcaaccgtggaggtgcgcggcaccgcgccgggcatgttggccacgcagtagtggcggattccgtctacctcgaagatggggtctgcgtaggtggtggggtgggaggtctcaaagcagccgccctggtcaatcgccacgtcaatgagcagagcgcccggcttgagggtcttgaggtgctcgcggcggattaggtggggagtcttggcgccgggtaccagaaccgagccgataatgacgtcggcgtccgcgatttcgcgcttgatgttggacggcgtggagttgaggactcgcgcggaggaaccgaagagctcggtcagctggcgaacgcgggagccgaagccttcaagaatggtaacttcggcaccgaggcccacgctcatctgagcggcgtgggtgcccacgttgccgccgccgagaaccaccacgcgggcggcctgcacgccgggaacaccgccgagcagaatgccagggccaccctgggtgcccaataggtactgggcggcagctgagcccgccaggcgacccgcaacctcactcatgggcagaagcaggggcagggcacggccgttgcgcacggtttcgtaggcgatcgcccgggtctttgccttgagcagggcctcggtcagaggcttatcggctgccaggtgcaggtaggtgaaaagggtgaggtcttcgcgtaggaatttgtactcttcttcgatgggttccttcaccttgaccagcagctcagcctggttccaggcttcttcctgggcgacaaggcgggcgccttctttctcatattcctcgttgctgaagccggcgccattgccagcatccttctcaacgagaacctcgtgacccgcctcggtcagagcatgaacgccgtccggggtaaggccaacgcgctgctcctgcggtttgatttcacggggtacggaaatacgcatgatgttcctccatcacgtcatagggatagggtgcttctattctctcgcgagaaagttgcctatacaacctcattttccgggcttgtatcatttaatatgacgccgattacgtttgggtggtggaggaaggaagaaagtcccatgtcagagcatacattcgtagataaagatgaaaacctgcgcccctactggcccgagaccgtcaaggtgatgcgcacgggagcgccctggctggattccgtggtgatggccctgtgctatgtggttttctttgtcttattcttttattttcaaaacctacctgccgttgcgatgctgctggtgatgtgggtttggcagtattttcgtggccagggttttctgggctcatcaaatgcggatgtaatggctagagaccgcaagaacaccataaaaagtggcattcttgttgctctgctgatgctcggggtcctatgggtagccattcaggaaattgaggttctctacattcctgccatcgtgctggtcttttgcacgatgctgctggggtacagaaaatggtttgattggaaatacgacgaacccgcagcgaaccatcccgaggcagccagaggaaaggctcggcaggcctacttcaatgatgtggcgaatcggggctctgtgtcctagggggtgaggctgataaaaaaggtcacaaagccagccccgagagtgcggggcaactggcatcggggctggcgtttaagggaggttgaccagcactctcggggctggctgccacaccttacctttagaattcctgcttgtgcacgcgcaccaggtgctcattggtgaagccgcgcagggcccactgggcattctcgcgaccgtaacctgacttgttgataccgccaaaggggaaagccgggtcagattccatgtgcgagttaatcatggtcatgccggcctccacccgggcggcaaacttctgagccttctcaagatcctctgaccatactgacgacatcaggccgtattcggtcttgttggcaagttccagggcctcttcttcgtctttcgccttgaagaccatcacaaccgggccaaagagctcctgggctgcgctctttgaatcgatgtcaaggtcggtgatgagtgccggtgacatgaaccagcccggacggttgagcttacgtccgccgaagtgcagggtggcgccgtcctcgtccaccgcctgctgcacccgctcaacagcctcatcgcgggctgactcggaggaaagcgggcccatgtcggtggtggggtcgtcgtagtcacccacggtcacattttccagggcttcgcgggcggcggtaacaaagtcgtcgtagtattcctcgagcacaatcatgcgcttgggggaggtgcagacctggcccgcgttggagatgcggtaggtgacagcctgctgcgccagcgccttaacgtcggaggtatcgagtaccacgaaggggtcgttgccgccgagctccagtactgagcgcttcaggtgcttggccgcgtggccggcaacggaggcaccggccgcctcagagccggtcagagaaatacccttgacgcggaagtcttcaataaccttctcggcgtcctcagaattgaggtagaggttggtatagacgccggcgggcaggcctgcttcttcgagcatggtctgaaagcgctgcgaagaaaccgggcagattgaagcctgcttcatcaggatagcgttgcccaccatgaggttgggcagcacaaagcgggcaatctggttgtaggggaagttccagggcatcacgccaaagagcacgcccagcgggtcgtgccgcacgtaggtttcttctgctccggacgccggcaggcgtgtgggtgccagaaattcggctgagttctcagcgaaccagcgggcagttttggcaactttggttgcttcggcctttccctgggcgagaggtttacccatttcgcggccaataatatctgctaattcatcggcattttggtcaacaatatcggcgaatttattaaggatttccgcgcgctcggcaagagaggtttctttccactctgtatatgcctcatgcgcggtttcaataatgtgggggatttcttcggttttgatggagtcaaaagtttcttcgactttaccggtattggcattggttagtgcgtaagtactcatacttcaagcaaagcactcatgcgggggagtgtctaggggtgttgcccggccttttgccctgcccgcccgttcgttggggagtcggcttctgaacaaaaggccggtagaaacacggcttcttgctaagaagccggctccttagaggggggggcggagttgctgtaactgtatgatatttcctctggacggagatttttaggaaacgaaaaaatatatacctgtgggttactctgtcgacagggaatcacggatattatgtgatttgaacaatatttagatggggagatggtatgaaatacagaatcggaattgacgttggagaccgttccgtgggccttgcggctatcgagttcgacgatgtgggctttcctattcaaaagttagctttggtgacttatcgtcacgacggtgggcttgatcctacaaccggaaaaaaccctcaaagtcggaaagctactgctggtgtagctcgtcgtactcgacgtatgcggaagcaacggagaaagcgcctaaataagttagattctgtgttgaagcaccttggatatccagtacctgaccaagaagaaccccagacctatgaagcctggcattcgcgtgctttactcacgggaaagaagcttgaaaacgaagcagagttgcaagagcacctagtgcgtgccattcggcatatcgctaggcatcgcggatggcggaacccctggtggagattccaccagttacagaacgcgccggtaccttcaccgagcatgctaaaaatgattgaggctgctgatgagcgctggccaggtagggtgcctcacgacgctacagttggtgagctaggtgctctagttgctgagccaagcactttgctacgccctagaacttacgatgcgaagaaacaccctaatactctcaacaataagggcgaatctgcggttctcagcgaaaaagttcggcaggaagacctctatgcagaggtgaaaaagatttgggctaggcagcacctgcccgaggaccactttttaccgattgttgaagccttgtttaatcaagtaaggccttatgtccctcaggaaaatgttggaaaggatcctttaccagggcaaacaaagaagaatcgtgccgttaaatcttcacttgagtttactgagttccgaattgttcaagcggttgcaaatctgactgtgattgataggggaggtaaacgccttcttaaggatgatgaatttgataaggcagtacactaccttgttaatttttctgaagaagctgctcctacttggggagatgtagctgaagaaatcggtgtacctgcaaatcgtcttattactcctgaaattgatggcgtaaaacttaattctgccccgtttgatagatcttctcagaagatcttgaatagtaaactcaggaaaaattctgaagtgcttaagtggtgggatacagctgattgggaacagagatctgagctgattcgctttctgagcgatgcgactgacgagacaattatttctgcagagcagtcgggcttgagcgatatttatgaggcatggccggagaacgagcgagagattcttgaaggacttgactttgagcctggtcgtgcggcgtacagcacagactccttgataaagctaaccgcttatatgcgtgaacatcatgttggattacatgaggctcgcaaggaggtattcaatgtacctgatacgtggcaacctcctcgtgaaagtttagactccaatacagggcaaccaacagttgatcgtgttctatcaattgtgcgtaagtttgttctagcgtgcgagcgtaaatggggagcgcctgagaaaatcatcgtagagcacgtacgcacaggtcttatggggcctgcagctcgctatgagattttgcgtgagattgcaaagaatagaaataacaatgaccgagtccgccaagagctcatcgatggtggcttttctgcaccgacacgggcagatatacgtcgataccgcatcgtccagaaccaagactgtagatgcctatactgcggaacgacggtaactgtcgaaactgctgaacttgaccatatcgttcctcgtgcaggcggaggttccagtcgggtagataatctggttgcagtatgcagaacttgtaattctgagaagggaaaaattccctttgcccagtgggccaattctagtaagcgatctggagtttcagttgaggaagccgttgagcgactgtggtcttttgacaaggtcggagtctttaaaggtgtatctggaaaacgtctcaaacaacagattgctcgtcgcctgagacaaactgaagaggatgagccaatcgatgagagatcattagcatcaacttcttatgctgcggtggagcttagacagcgtttagaaacctatttcaataagggtaaagcctacggcgaagaatcctggttttcggtcgatgtctacagtggttccatgactcgtggttctcgccgtgcaggtggtattgacgaacgtctgcttttgcgcggtcagagggataaaaatcgctttgacgttcgccaccacgccattgatgcggctgttctaactttgctgaatcgttctgtggcaagaactcttgaacaacgaaagctaatgcaggaagaagctcgcttaggttcacgagatactggttggaaagacttccaggggttgggaataactgctgtacagaaattcaaagagtggaggaagacttgtttggttcttagcgatattttagcggaagcaatcgaagcagatcagatcccagtgatcactcctctgagattaacacctaagaacggttcagtacataaagacacaattagtgcgatgggtcggaagttcttgggcgaagcttggtccaaagacgagattcaacgtgtgcaggaccctgagctttacctcttactcttagatgagctaggtaaagcaaggggccttgaggctgatgaggagcgttcctgcacgttgcctactggtagtcaactgtctgctgattctgaagtgttggtgtttcctgaaaaagcagcttctattctggtaggtacgggtgcagcgaagattggtgactctcttcatcatgctcgtttatatgcttggaaggacaagaaagggaagttgaatatcgggatgcttcgtgtattcggagcggagctaccttggttaatgcgtatctcgggtaacaaggatgctttgactgcgccgattcatagaggggcacaatcttatagggatatgcaggacaaaacccggaaagccattgaagctggactagctcaggagattggttggatcacccagggggatgagattgagataagtcctgaagaattttcaaaattaggtggcgaactaggagagttcctgaagatacttccagaaacccggtggagaattgatgggttttatgatgccgggcgattgagagtacgccccatcttgttgtcacaggaagatctgcccaatactgtgtacgcacaagaactctcaaaagaacaattttccttactggagcttgcgcttacgcgaggtcttctgccaagtctttctaacgtctttgaacagaattctacgaaggttattcgccgtaatagtttagggattcctcgttggaaatcaaatggatttctgcccgtatcacttgatattgctcgtgtagcaaatgaaaaattaggagagtaggcgtggacagcaagtggcaggttctagatttcacgggatactcgggttatctctcctatgagagaggccgactcgtagtaggggataggagcgtgccacttgctgaggtggatttcatattggtagggcaaagttgttcctgggggtatggccttatcgctgggctggagaggtttggcgttgcaatggcggtttgcgattggcggaatattcctatttcagtgctataccactggtctgaaaatactcgagtctttgcaaggcataatgctcaggctacgctgagcgtcccccgggcaaaaaatgcatggatgagaatcgttaaagctaaagtgcgagggcaagctaatgtattgaaaattaaaggtcaggtgtcagtttcccaagaattagtttctttgagcaaggcagtacgttcaggagatccgagtaatattgaagcgcttgctgcccgaacatattggcataattttctacaaccaggtggaagttttagtcgccaacagtcctcctctgatttcgtaaacgcaatgctgaattatggatatacgattctaagagggagggttattactcgtcttgtaactactggcttgagcccaactttatctctatttcataggaatagaagcaatatgtttgctcttgcagatgatcttattgaacctttcaggcctgcggttgactctgtcgttcttgacctagtaaatgacggctctgtagagctcggtaaaacagagaaaaaacgcttatcaggcgttttggctgaacagcatgatgaatcatcgtttacagtgcgctcactaattgaagatttttgccaagagtttgccttatatgttgaaggcactcgtgaaaacttgaatgttcctatatggaacgggcgagaaattacaaaagatggctaaatcgatgtggcttttagtgatgtttgacttgcctgtgaagagcaaagagcagaggacgagggcaaatcaatacaggaacttgctgaaagatcgtgggtttgacatggtgcaacttagtgtctattgcaagtattatctgaacggtaactcatctgagcgagatattggaatcttgaagcagaacgttccagtaaacggctacgtgcgtgtattgaaagtagctgatcaacagtgggcttctaccttgttatttaaaggtccacggcaaaagaaagctgaagcgcctccggagcaactgactattttttgaatttgataaaacataaccccacacgtgctatgcacgcatggggttgataaatcacatactttcgtatgcttgttaggaatcttcacctctgataaatcctaaagaaaaatctatcagatttttcttcgagatgcataaatcgttatgttggacacgtaggaaattcattttttctgttgaaaaagtcggaaaaagatgcttctcactaggtgttttatgtagttatttaagtctacctgggatcagaggtgaagattcccaacttcggccctaatcatgatgttgcgccggtaagtctacctgggatcagaggtgaagattcccaacctcattttggcatagcgtgtcgcctgattaagtctacctgggatcagaggtgaagattcccaactgctcactgatgatggagtgaagcaccttaagtctacctgggatcagaggtgaagattcccaacccagctttgaccgtgtaccgggcaatcttaagtctacctgggatcagaggtgaagattcccaacagcgagtggcccgcatgttccctaaagctaagtctacctgggatcagaggtgaagattcccaactgccgggctctgtggcgcctgccggtgctaagtctacctgggatcagaggtgaagattcccagctgacgctatcctggctgcgtcagcggactataagcctatctggattgaaaatggaactttcatgggtggttggttctgggcgtttactcgcctgtatctatcgtagttttaataactgtaatacaattaagaaatggaaatagtcatcgcagcttccgccctcaaacacgggatcactcgtgatgagatttttgaagcactggagaaccacatctatgtgattgacaacttcgatgagtccagaattcaaggtttaccttcccctactctgcatatcgggaaaacctatcttcgagcaacgacagcactgaatgagaggtgagcaaagtggaacagaaaatgactccccaagacattgaagagctcagcgagaaaatggcggattgggctgaatctgatgacttttttgaggcatttaaaggtgcccgggtaagagctagagatgagaaaactgttgaggagatgaatagacttctggaaactatcaggccggggcgtccagctcatcaagttgaacagaaccgagcaggagcttctccgactgtgcagtttcgcattccgccagaaatcgaagagcttcttgaaaggcgtgccgcaaaagaagataaaagcaaaagcgaggttgcccgccaggcgctcattcagtatcttgccactgcctagaatgttcgcctatcctacactgtgtagaaaatttacttgtaaagttaaaatgcttgactcatcaagtaaatatggcttagtgttggatgtagggtttcatgaagtgctgaagttccccctaagtttcagcacaatctagatttatatagattcccccatatatatgaatcccccgtttccgcacaggaaacccagcgggccccggcacagttgccggggcccgctgtggttaaggcaccactcgcgcaaaagtgagttatccctttctcacaataatccacagcagataggctccgcccagcgccccagtcaccagaccaaccggaatctggaatggcgccagcgcatgccctgctacataatcagcggcaactagcagaagcgcaccggtgagaactgactgccaaagcgcagctccgggtgttctccatactcggtgggatagttgcggggcaatgagtgctacaaaaccaatgggtcctgccagtgaaatggaaagtgcggtcagcagcactgcgccggtcatcaaaattcgagtggcagcctgcaccgggagccccaggccggccgctaaatcctccccgagctctaaaaccctcagcatgcgtgagaagcagagcgccaggggtaccgcaaggcagataagaacggcgggtagccacacggaattccaggtgagcgcattaagagaaccataaagccaggtcttagcagattcagcctgctctaagtccgcgcgggttaaaaggaaatcgttgaaggctgagagcatggcccccactgcaatgcccacgagtaccagtttgtgccccgctgaagaggttccgcttcgtgcagagagcaggagaaccagcgcggcggtcagaaatccgcccgctatagctcccaaccctgttccaattcccccgcctgtagcggcggtttcggcatctgcgccagcctgggtcagcaccaaaaccacaagcagggccccggtagcagaaccggtggtgaatccaataatgtctggggagccgagcgggttacgggagaccgattgaaaaatcgcgcccgctaaaccgagggaagcacctaccgccagtgctgccaccagtcgtggcaggcgttgattgagaacgatgtatcgatcgagcccttcgccgccaccggcaagtacctgccagactccggcgggggtgatttcgtaggttccgaaaattaaggtgatgagtgagagagcaatgagaaggacgagcgctaggctcgttattgtgcgcgggctgcggtaggtgccgggtaggggagtgcgggtcattggtccttcccctcggagcgagaaattctcttgatttttcgtgccctgtgtgcgcctgctgagtcaagtcggagaactagggccaagagaagtggtgctccaataaaagcggttacgattcctgcttcaacctctgagggaatggcaatcactctacccacaatatctgcggtaagtaccagaatggggccaccaatcacagagagtggaagcaggcgagaaagcgaaactcctacgagaagccgtagcacatgcggcactaccaaacccacaaaagaaagcggccctgcaatagccgtggcggttccgcacagtagcgtaattgagagtagagtgcccgcctgcactagcggaacgggcacgcccagcccagcggcggcgtcctgccctaaggccagtgcaccgaggggacgaatcagcacaaaccccagtatcagccccgccagcagaagcggggtagaggtgaggactacggagagttctctgctctcaaagccaccgaccacccagaaacggtaggaatcgaaggcgcgagaattaaacatggtaataattccggtgactgccgagaggcaggcattgagggcaatgcctgccagtaaaaggcgggcaatggattcgcctttacccgtggcgccaatgtagaacacggcggtggcggcaagtccggcgccgaaaagggccatccacatttgcccgcttgcatcggtaatccccagggcggcaatgccgctcaccacgaaaaccgcagcaccagagttgaccccgagtaggcccggctctgccaaggggttgcgggttaatgactgcataagaatacccgcaactgccagtgcaactcccacggcgatagcagcaagagtgcgcggaatgcgcagttgccacacgataatcgatgcgctgccgctacccggtgtaaaaagtccgctcagggcatcaatcggggaaatcatacgggaccccaccatgagtgacagaataatcagtgccgccaaaacaagtagtccggtggtcaaaaccagggacgagcgcggcgcgtgggaaatcattgaaccttctgagagctaatcaaggcagagtgctaccacaatagtaataaagagctggctaacctcaaagttagggtagcctatataaatgcacgctaataaaaatgtaataccagctcagatgtcccgccgagcttttggaggactggcggttacgggtctcggcgccctcttgctgaccgcctgcggatcttccaccgaatccgagagcagctccggctcatcggcatcggccgccccagcgccgtccacgctccccgacggcatgggaactgacgccgcttcgggcgaatttccgcgcaccgttaagcactttcgcggcgaaaccaccattgacgctaagcccgagaaagtcgtggtgattgccaccggccagcttgacgatgttctcgctctgggggttgtgcccatcgccgcggcagccgcaaaggacgccgacattgtgccccagtacctgcgcgatgcctaccccgattttgaccttggcaaaattgaggcggtcggaactcgcaacgcccccgataccgaagcgattgccaacctcaaacccgatttgattcttctcaacaatacccaagacgatgaatcgatttacgaagctctctctgctatcgcacccattgtggtaaccgagggaaccggcgtgaactggaagcaggatttccagttgctcgccgccggtgtgggcgatactgacgccgccgcgaaggctctgcaggaatatcaggatgacgccgcaagcctgggcgaagcagccgatgattccactaccttctctttcctgcgccaaaattcaggccgtacccgcatttggggagtttcttcttttgtgggctcgatttgtgaagatgcgagactcgcccgccccgagcctcagcagattgataagacttcggtggatatatcggctgagcagttggatcaggccaatggagactggctcttctatagcgtgcagggcggcgatacctcagcgctgacttctgaagcactgtgggagactctggaaccggtggccaataaccgggcggttgaggttgatgacgaaatgttcttcattaacgccggcattaccgcagctcggggtgtggttgaggcaatcagggagaaaataggctagcttctaaatcggtgccgagaggtggattttaggcttaaaattgcgggatttaagcctaaaatccaccgctcgcgcagaaaccgcaaatctaaaagtgctacggttgcttaggaaacttacttactatttctaaggacccctcatggacagtctcgtgcaagaaaatggggactcacaagctagccaagcagaccgacagaaagatcgctcagaaaccggggctgctatcgaattccggtcggtcacgaaaaaatacggttcccacaccgtggtggagaacctcagcctgaccattcccagcggcaaaatcaccgtatttgtggggccctcgggctgcggcaaaaccacctcgctgcgcatgattaaccgcatggtggagcacacctccggcgaaattctagtcaaggggcagcccaatacggaaagttccccgcacgagctccgtcgcagtatcggctacgtgctccagcaggcggggctgatgccgcacaggaaaatcatcgacaacattgccacggttccctacctgaaaaatgtgcccaagaagcaggcgcgggcacaggcaaaagaactgatgaaaacggtggggctcagcgaagaccttgccaatcgttaccccgcccagctcagtggcggccaggcccagcgggtgggtgttgcccgcgccctggcctcggagtcagacatcattctcatggacgagcctttctcagccgttgaccccgtggtgagggcagatttgcagcaggaaatcctgaggctgcaagagaagttccaccgcaccattatctttgttacccacgatatagatgaagcaatccagctgggcgactacattgccgttttcgccaccggtggccgcctagcgcagttcggaacgccggaggaaattctgcgcgaacccgctgatgactttgtttcgggctttgtgggccgtgaccgcggtatgcgccggctgacctttgcctcggcgcagaacctgcccattcatccgctggaagctcaggatactccctggcaaaagtggcagctcaagatcaaagacggtatgcccgccggctgggaaaccgagggccgcaccattcccggtggctccctctttgtggagggcggtaccctgcgcgatgctttggactcggtgctctcctcgccctcgggctggggcgtggtcgttgataggcaaggtaaagccattggtctgctcaactccgacgatgttctcgatgccaccgaagaagaacgctaccgccgctacggggttgcctagatgaactggtttctcaataacaccgaatacgtggggcaactgaccctgctacacctgctccagtcggtgattccggtgattgccggtacgctcattgccctgcccctcgcgcgcttagctgtaggacgacgtcgtgacggccgctccaccgcggtcgccacgggcgcggggaaggcgcgccgcggcgtcgtcgtcaattcggcggctctgctctacacggtaccctcgctggcgctctttgtgctgatgccggtggtgctgggtacttcgattacctccctgctgaacgtttacgtggcgctgaccctctacgtggtggcgatgatgacccgctccgccgtagacgccttcgattcggtatcgccggtgactcttgaggccgccaccgccatgggctaccgccccacccgccgcttctgggcggttgagatgcctctggcagtgcctgtgatgctggcgggcctgcgagtggcgctggtgtctaacatttcaatggtttcggtaggcgcggtgattggaattcagtctctgggcaccctctttaccgacggtctgcgccgcgaccttcccgccgaaatcatagtgggcatcgtgggtatcgttctgctggccctggtgcttgaccgcctgttagccctggtaggcaaagccctaacccgctggagggcagcatgaatatctttgagaaaacctggctcttcttcactcaggacggcgcctgggcgggcaccggcggtatctggcagcgggttgccgagcacctgggctacagcgggctgattctaatctgcgcggcagtgattgcggtgccgattggtctgctggtgggccacaccggtaggggagaaaacgcggtggtggcggtgaccggtgccctgcgctcgctgcccaccctgggtttgctgaccctctttgccctttggcttgggctggggcttaccgctccggtgctggcgctggtaatcctggcaatttcacccctgcttgccggggtctattcgggcatagctgcggtggatcgtgtgaccgtagacgccgcccgcgcccagggcatgacagaatctcagattcttttccgggtggaactaccgctggcactacccctgatttttggcggcattcgtaacgctgccctgcaggtgattgccaccgtcactatcatggcctacatcaacctgggcgggctgggccgctaccttatcgacggcttggcagtgcgggactacccccgcatggtcgcctcggtgattctggtggcagcgctggcgctgattgttgatttgattctttctctgattcagcgggcagttacacccgcaacctccaaggagctctcatgacctctctcaaccgccgccgtttctttggccttgcgggtgtttcagcttctgctttggcactctccgcctgcggaatttccggagaaacagcctttggctcaggctctaccgatggcaccgtggtgatcggctcagccgactttaccgagtcgcagattatcgttgaaatctatgctgctgccctcaaaaagcgcggcttcaccgctgaaacccgccccgccattggcgcccgcgaggcctttatcggcgccctggaagagggtgccgtgggggtggttcccgactacaccggtaacctgctgctcttcttagacacctccgccaccgcggttaccgccgaggagattctttcttccctcaaagatgccctgcccgaagagctttcggtgcttgaacctgctcctgccgagaacaaagactctatggtggtcacctctgagaccgcctcttcgctggggctgcgttccatggccgacctctccgcccaccccgagctcaaactgggtgctccgcccgagttcgccgagcgctcttacggtctgccggggctgaagtccaagtacggttttgagcccgccgagtttagccctattaatgacggcggcggcccgctgaccgtgcaggcgttgctggacgacgatgtccaggtagtcgacctcttctccaccgatccggcgattagtcgcaacaacctggtgatcttagaggatccagggaacaactttattgcccagcaggtggtgccggtggtcaacggaaaactggtgtcggttgccgccgccgatgttctcaacgaggtttctgccctgctcaccaccgaggacctagtggccctcaacgacagggtctcgggcgaggaaaaggctaatgtggccacggcagcgggcgactgggtagaagagaagttcccgagctagtccgagaggttctgctaaaggtagcgtagaaaccctgctaaaggtagtctaggagctctgctaaaggtagtctaggagtatgaactaccttgcgagaagcctagatttggagctggatgaactgcttccttacgtctctgcagttgccattgacggaccgaaaggcgtaggaaaaaccgatacagcgcgtcgtcgggctaagcatcgtttttttctagataatcccgatcaacgccaggttattgaggctgatttaaatttcagttttatcaaggacaatcagcccgtattgcttgatgaatggcagaaagttccggctgtctgggattccgtgcgtcgcaaggtagattcgggggctaccccgggacagtttctgcttaccggtagcgcaactcccactgaagaaaacgatactcacagcggggccggaagaattctttcgctccgcatgcgaccgttgaccttctatgagaaatataggaacg

SEQ ID NO: 3628 - DNA, 19883 bp, synthetic construct
  misc_feature 1..19883: note = Synthetic
  source 1..19883: mol_type = other DNA
acaggagcagtcgctgcaatggcagaaccgccacagatagaagatccaactccaaccaaggtagctagctttgtatcaaggttaaaaaagcgttggaaaaagaaagctataatcaaagcaattgaaatagttgaaaggataacaggaagggaagatgttccaactgcgaaaacttgtgagatattgagtccaaacccaagcaaaataacagcatactgaagcagttttttggagctataagtcaaaccggcatccagttgtgtataggaagtgagaaagggatggagaatcattccgataaaaatggcgaaaacaggtgcgcccacaacaggcaggaatcctcctaaaacccaagagatgatagaaatgatcaggcagactgacagtcctgcccaattttttgatagaaatgacataaaaacctccgaaaatagatactccttattgtaatcttatttgtcagaaaaataaaatagaaagtaggaatacagacccagcccggggagcgcaccacctcagcctccgcgctgataaaggccttcgatatccttgaggaacttaatatccttctcgtaggtatccagcatatagggccatacatactgcatgtcattgcgcggcgggtaagaaaaacggaagtcgtggaaatgtattcctcatatcggtgtggtgtgtgaaaaggtgaatgctacttagacgttgaattcttcgaagtctagaattgaccacttttggccatcatgtttcattttggctttgagagtatcgttagttttatcttcgttatcccatgcagtccatttaccgtctggttcaacatggatttcctgattccagttacgatacattttccagaaatatgtttcgccgtcttcggaccaagccgacccatcagctgtaaatttttcgatgccgtcgataacccatccgccgcgcctgtatagtttttcgacgctttcgtaggcttctaattcggagctgaaattgggcgagatgaattcttgtgcctttgcatagtcaccagtttggataccgtagtttccccactgaacccaggcatcaaatgttttgcgtaggccttctgcagatttttcgttgtagccttcttcagggagagtgggtttcggcacgttttgcgcgttgccgtatttgtctgccttacggtactcaccatcgggggctttggacccgcccgagtagccgcggacagtagatggggtagcgcttgccgaaggtgactcagatactgcggcagatgccgaggcggtctcgctcggagctgcggtcgatgatgccgaggcgctcgcctcattatttgcctgctggccacacgccgcaagcagagcacccaggcccacaagtgcgccgccgctcaacagtgcgcggcgggtaagaaaaacggaagtcatagaaatacattcctcatatcggtgtggtgtgtgaattaaaggaaaaggctatttctcgttttgcaattcttcgtctgatttacttccaacaatcttccaatagccatcagagtaggtgaagaggaagtagaaagtatcgtcactggtgtcagtgttagcttccatattcaatgtaccgtcgggttctacatacataacggtgctccagaatcggcgatgcaacatgcggtactttttcttcgcctcatcgtagatgagcgggccttggggttggtagctgtccagcccgtcaacggtccatccgccgcgctggtaaagactctcgatgtactggtagaacccgtattcttcagcgtctttcgtgatgtacttgaacgcgtaggagcagtccccggtctgaatcgcgtagttgtgcgcaacaacccagtctttcatcatgcggtagaggccttcttcagtttcgggatactgttgcggctcggctttcggaagaggaacattctgcgcagggccgtaaccatcagctttgcgatactcgccatccggggctttagaattgcccgaatatccacgagtcacaacaggcttcggggcggttgagaccgaagcagatgcagactcagatgccgaagcggtctcactcggcgtggcggtagaggacgccgaggcgctcgcctcattatttgcctgctggccgcacgccgcgagcagggcactcatacccaggaatgcgccgccgctcagcattgcgcggcgagtaagaaaaatggaagtcatggaagtgtattccttatatcggtgtgaagtgtgaatagaggtggctggttagaaaccggaagactaaccagccgaagggaataacccgatagctgagaagccacatgtgtttcgaaaagccaccattatcgtggcttctcggcgaacatgtggcttctcagtgtaagacccacagcgggggaacggtcttacatgtcgggccagtcgcggtgcagcgaatactccgtatccccatcaccgttatcattcaggtgccaacgctgaccggtacgaatatcggccttacgcagacgcgggttcggattatccggcttacccatggtcggatcgttcttacagccccagcgagtgtcgtcgtagctgcagtcaccagccacgcgtcccacatcaacccaccacacacgcaccagcagcgggtcgacagtatccttcgtcaacacgacatccagagcctgccagtcaccgccgtccacacggaaacgaccagagtaagacaccgtcgcgtaggcgtggaagttaccagagcgctggtaagcgtaactcgttgcggtcttgcgtgattctttaccgcgtgccctgctgaccggcttgcccatggtatagaagctaccctcgtcaccgttgccgtactgaatggtcatctgagtggggtaggactccatctccacatgcccgatcatcaggtcgccttcccagcgtgcggtgggtgcgtcgacgtagaagttgatctggtcgcccttgtagacgttggggttgtcttcgctgaggctggtgccgaggttgtaggactgcttcaacacaggggcttggatattggtgttagcgaattggtcctcaatctcttggagcatttcttcaggagaaggacccttgggctgcgcggggtcattggaggtgaaggttttagcgtcattgggtacgcagtagcggccgccaacgtggttggggattttgttggcgttatctcccaggggtagggatcctatgacgtagtggccaggacgttggtctcctttcgtatgacattctgcatctccggcttttcgggctttggcactacttgcatgatattcttgctttgctccatcgagttgtagcggatgttcgtcgttccaacgttttcgcgcagattccatatcggaccctagagaatcgactgatgatacttgttgttgattttgagcgctggtttcacctgcacgttttgaagtttttgatttgcttgttttggaaaaactaatacaatgaccagatgaatctttatttatgcactctttacctatggcgggtaatgtatacaagggtaaggttgacaggataaaagcaatagatactatctgattgaaatgttttttgtgcatgatatcctctaattacccttcattgagtagtttggttcctgcaattttccagtacccatttgaatatgtaaatataaaataaaatgagtcgtcggaagtatcggtatttgctttgaacacaacttcaccgtcaggttctacatacatagccgtagaccataccctgcggattttcatgcggtattttttcgtttcatcatcaaataacaaagcgctttcagactgataagaatctagtccatcggcgacccagcctccatgagagtacatctcttcaagatattcgtagaacccatattcttcagcatcctctgttacatacttgaatgcataggaacagtcgccagtctgaattgcatagttatgggcaaccacccagtcctccatcatgtgattgaggccttcttcagtttcagggtactgagcgggctcattacgaggcttgggaacgttttgtgcagggccgtagccgtctgccttacggtattcgccgtcgggtgctttggattgccctgagtatccgcgagtaaccttcggtttaggggtggcgctcgcagagggcgactcagacgccgcggcagaagccgatgccgactcgctcggtgcggcggatgtggtggctgccgcctcattattagcctgctggccgcacgccgcaagcagggcaccaacgcccacaagtgcaccgctacccaacaaggtacggcgattaaaaatggtcaaatccatagaagatacgctcctatcgtcggtgatggtgtgatatatgtgcatgtcggaccgttattcacaggttgcattgactgccggaagaaaaacagccccgtagtgcacccatcaagcgcatcaatgcgctgtggaacactacagttaccaccctaccgcatgtttgcggtcgtttgcactcttttgaggatgatgacggtcgttggtcaatattcgggcttctcaatgttttatgcatcaaataaatctgcacccgaagaggtgccgcctcagcagaatttgtgccatggtttagcgccttcagccatggtttttaactagaaccaaagacactaacctatggcacaaacccgtaaccatgaccgaatttgtctctgcgccgggtaggcgggatccggtaatgacttagtgttttcggtaatgggttagtaacttcaggctggggctttaaccattaccaaagacgctaagtcatgactgaaattgctaggtcatgaccgaacctccaccggtgctgagcagtacctccactggcactgagcatcccacgcaaaacagagcggccccgcaccccaccgccaccccgcaacacccctccccatgcccgtaatgtggcgggcaactcatgccgctcacgcggggtgttagacagtactacacttaaagcggaagtcacatcgccgtcactgaagaaaagagtttttgtgcccaccacgaccgtacacttgaccgaccgcatccctcgcgtttctgctgatgagttgctggcgggtttccgcccctctgagcgttttggtgaagtgtcttttgatagctacattcctgatccgaatcagccgtcgcaggctgaggctgtgcagaagctgaaggattttggcgacaagattaatggtggcggcgctggtgccggtttctttggtcgtctgtttggtggcaagaagaaggattcgacgaaggctggcctgtaccttgacggcggttttggtgtgggtaagactcacctgttggcgtcgctgtggcattatgtggatggcccgaaggcgttcggtacttttgtggagtacacgaacctggtgggtgcgttgacgttccgtaagacggttgaggcgttgagcagctacaagctggtgtgtattgacgagtttgagctggatgatccgggtgatactgtgctcatgtctcgtctgatgcgtgagctggcggatgctggcgtgaagcttgtggcgacctcgaacacgctgcctggtgcgctgggtgagggccgtttcgcggctgaggattttaagcgtgagattcaggtgcttgcttcacagtttgaggtgcaccgtgtggatggtgaggatttccgtcaccgtggcctgcctgctgcgccggagcctgttgctgatgatgcgtttgatgcgaaggttgaggaagtgttcggcggccagactgttggcgttgataacttcgctgatctggtggagcatctggcgaaggtgcacccgtcgcgttaccgtcagctgattgatggtctggatggtattgcgtggcgtgatgttcacccgattactgagcagtcggtggcgctgcgttttgtggtgttggctgaccgcctgtatgacaaggacttgccgattgtttcttcgggtgtgccttttgacaaggtgtttactgaggagatgctggctggtggttatcagaagaagtatttccgtgcggtgtctcgtttgactgcgttggctcgtgagggcatgctcggcgaatctgagtagccgccgcctgacgctgcgaaaccgcgcagtgtgaatgcgtgaactgcgccgaaaagttttatagagaagacccccgccggatgctccacgagaggatccggcgggggcctttgtttgtcttggctcgtatggtctgcgggctcataaatacctgcagtagatagggaagttaaaaacataccgcccgttcctaagaggagccggacggtgagaagtcagcatcggaaggatgccttattaagaatctttcgttactgattctagcacaggggcttactacttctgcaagcgcttcacataaaaatttttttgcgcttttgggggtgtgaatgacggttttgaatgcatatatggcgtagtcaggttattgttagtctcagatgagcgcaatgatgcttatcaagagtgcaatgtctgcacttgattgcaatcactcacaaaggagtatgacatgtccacggacatgaaaaactaccgtatcggtgttgatgtcggtgaccgctctgttggtcttgccgctatcgaatttgatgatgctggtctccctattaagaagttggctttggtaactttccgccatgacggcggtttggatccgacgaagaacaagaccccgatgagtcgtaaggaaactcgtggtgttgctcgtcgtacgatgcgcatgactcgtcgccgtaagcagcgtctgcgtgaccttgataaggtgcttgagaagctgggttacaccgtgccggagggccctgagcctgagacctatgaggcgtggacttcccgtgcgctgctggcatctatcaagttggctagtgctgatgagctaaatgagcatttggtgcgcgctgtgcgtcatatggctcgtcaccgtggttgggctaatccgtggtggtctcttgaccagctggagaaggcgtcacaggagccgtcggagacttttgagattattctggctcgtgcgcgtgagctgtttggtgagaaggttccggctaatccgactttgggtatgttgggtgctcttgctgctaataatgaggttcttctgcgtccgagggatgaaaagaagaggaagactggctatgtgcgaggcactcctctgatggttgctcaggttcgtcagggagaccagctggctgagcttcgtcgtatttgcgaggttcagggtattgaggaccagtacgaggctcttcgcttgggcgttttccaccataagcacccttatgtgccgaaggaacgtgtgggtaaggaccctctgaatccttctacgaatcgaacgattcgtgcgtctctggagtttcaggagttccgcattcttgattcggtggcgaatctgcgtgtgcgcactggttctcgtgcgaagcgtgagctgactgaggctgagtatgatgcggctgtcgagttcttgatgaactataccgataaggagcaaccgagttgggctgatgtcgctgagaagattggtgttcctggtaaccgcttggttgccccggttcttgaggacattcagcagaagacggcgccctttgaccgttcgtcggcagcctttgagaaggcgatgggcaagaagacggaggctcgtcagtggtgggaatctactgatgatgaccagttgcgtagtctgttgattgcatttttggttgatgcgacgaacgatactgaagaggcagctgctgaggcagggctgtctgagctatataagagctggccggctgaggaacgtgaagcgctctctaacattgattttgagaagggccgtgttgcttatagccaggagaccctctcaaagctgagcgagtacatgcatgagtaccgtgttggtcttcacgaggcccgcaaggctgtcttcggcgtggatgatacatggcgtcccccgttggataagctggaggaaccgacaggtcagccggcggttgatcgcgtgctgacgattctgcgtcgttttgtgctggattgtgagcgtcagtggggccgtccgcgcgctattactgtggaacatgcccgtaccggcctaatgggacctacccagcgtcagaagattctgaatgagcagaagaagaaccgcgcggataatgagcgtattcgcggtgagctacgtgaatctggtgtggataatccgagtcgcgcggaagttcgtcgccatttgattgtgcaggagcaggagtgtcagtgcttgtactgcggcacaatgattacgacgactacttctgagctggaccacatcgtaccgcgcgctggcggcggttcctctcgtcgtgagaatttggcggcggtgtgccgtgactgtaatgcgaagaagaagcggaagctgttctatgcatgggctggtcctgtgaagtcgcaggagactattgagcgtgttcgccagttgaaggcctttaaagaccccaagaaggcgaaaatgttcaagaatcagatccgtcgtttgaggcagactgaagctgatgagccgattgatgagcgttcgctggcttcgacttcgtatgcggctgtggcggtgcgtgagcgtttggaacagcattttaatgagggccttgcccccgatgatgagagccgtgtggttctagacgtgtatgcgggttcggtgactcgtgaatcccgtcgcgcgggtggcatcgatgagcgtattttgttgcgcggtgagcgtgataagaaccgttttgatgtgcgccatcatgcggttgatgctgcggtcatgactctgctgaaccgctctgttgctttgactctggagcagcgtagccagctgaggcgcacgttttatgagcaggggctggacaaactggaccgtgatcagctgcacccgggagaagattggcgtaacttcaccggcctgtacccggcttctcagaagaagttcttggaatggaaggacgccgctacagctctgggcaatgtgttggctgaggctatcgaggatgactctattgcggtggtgagtccgcttcgtttgcgtccgcagaatggctcggtgcacgatgaaacgattgatccggtgaagaagctgactttgggttctgcatggtctgctgatgatgtgaagcgtattgttgatccggagatttacctggcgatgaaggatgcgttgggtaagttgaagaagctccctgaggattctgcccgctctcttgagctgtcggatggccggtttgttgaggccgacgatgaagtgttgttcttctcgaagaaggctgcgtcgattttgactcctcgtggtgcggctgagattggtgcgtcgattcatcatgctcgcttgtacagctggctgacgaagaagggcgagctgaaagtcggtatgcttcgcgtgtatggtgcggagttcccgtggctgatgcgtgagagcggtagccgcaatgttttgagtatgccgattcaccggggttctcagtctttccgggatatgcaggacacaacgcgtaaagctgtggaaagcggcgaagcggttgagttcgcgtggattactcagaacgatgagttggagtttgatccggctgactacatcactaatggtggtaaagacgagctgaagcaattcttggagtttatgccggagcgccgctggcgtgttgatggattcaaggattctgggcgtctccgtatgcgtcctgcactgttgtctcgtgagcagttgccaagcgagattcaggctcgattggacacaaaatctctcagcaagggagaaactgtgttggtcaaagcgttggatgatggcctttatatctccattggaggattgttgcccctagagagtatgaaggttattcgccgcaataacttgggtttccctcgttggcgcggtaacggcaatctgccgacttcgttcgaggttcgttcttcggcgttgcgcgctttgggcgtggaaggctaggagagcgtgatggatagtaagtggcgtgttcttgatttcactgcctatgagggcttcctgtcgtatgagagggggcgaatcgtggcgggggagcggagcacgccacttgctgaggttgattttatcctccttggtatggggtgctcctggggttacggcctggtggctggcctggaacgttttgacgttgctgccgcgatttgtgattggcgtaatcagccgatttctacgttgtatcactggtctgagaatacgaaggtgtttactcgtcatgaggctcaggctgaattgagcgtgccgcgtgcgaagaatgcgtggatgcagattgtgaaggctaaacttcgtggccaggcgaattgtcttgatgctatggggcggcagagcgctgcggatattcgcgcgttggctcgttcggtgcggtcgggcgacccgtcaaacgctgaggctcagggggcgcgcctgtattggggtgcgtttcttccggagcagggtttccgccgtcagcagctttctgatgatgtggtgaatggaatgctcaattatgggtacacgattcttcgcggcagggttttgactcgtgtgattgctgcgggtttgtgcccgacgttgtcgctgttccaccgccatcgttctaatgcgtttgcattggttgatgatttggtggagccgttccgccctgctgtggattatgcggtgtatcagttgatttctgctggttctactgagctgggtcggcaggagaaggctgctctggttcaggtgttgtctgatgctgtgaatggtgattcgccgtttaagctccgtactgtgatggaggatttttgttctgagtttgctctctatgttgagggcaagcgtgataggttgtcggttccggtgtgggagctgactgctgctgaggagttgtgtgaggatggctgatcctgtgtggttaatggtgatgtttgatttgccggtgaagacgaagaatgagcggaagctggcgaatcgttatcgtcatgttctgctggatttgggttttgatcgtatgcagctgagtgtgtatgcgaagtactatctgaatgggaatgcgacgggttctgatttgttccggttgcagattgaggttccgccgggtggtgcgattcgtattatgcgttttacggatgctcagtgggctgggtcgattcgccatttggggccggaggtgcagcagatggaggagaagccggaagcgttagatattttctagcggagcttcacaaaaatgagccggtgggacagcgaccaaacatggtcgctgccccaccggctcattttttcctttcggacctcgtctagagatgagctccgaggcaggtatgggacagtttttctcttgaaaaactgccccatttatgcccctgactaggggaaatacttgattacttaagtatatcaaggcgaataatgaaagattctcaacccgggtagctgcgtgcccacggggaaaataagtatatcaaggcgaataatgaaagattctcaacctactcaccacctggcgcgcgcctgctataagtatatcaaggcgaataatgaaagattctcaaccgtgaaaatgccggtgccggtttcatagtaagtatatcaaggcgaataatgaaagattctcaacgttgattcaggcgcttggccctgtgttttaagtatatcaaggcgaataatgaaagattctcaacaataacgcggcgggcggcacggcaactataagtatatcaaggcgaataatgaaagattctcaaccccgggagcaccatcacgaacagcacgctaagtatatcaaggcgaataatgaaagattctcaacaagattttctcggtttcttcgtctgtgataagtatatcaaggcgaataatgaaagattctcaactctgggtaatcggtggggacgcattggactaagtatatcaaggcgaataatgaaagattctcaactcaatgatgacagaatccgagcccagcctaagtatatcaaggcgaataatgaaagattctcaacgtcaccatgaagtactctctgatgatgctaagtatatcaaggcgaataatgaaagattctcaacccagaggatgccaattgtcaccgcaaggtaagtatatcaaggcgaataatgaaagattctcaactgctcagccgatgagcggtacgaaaaattaagtatatcaaggcgaataatgaaagattctcaacaattaagattgtcactttcctcatgggtaagtatatcaaggcgaataatgaaagattctcaactggaggaaaataatgactaacgtgcttgtaagtatatcaaggcgaataatgaaagattctcaacctgcgggacgcggcggcgcagaagaatctaagtatatcaaggcgaataatgaaagattctcaacaacaactcactgtagcggtcgcggaacttaagtatatcaaggcgaataatgaaagattctcaacccgcgtccggcctctcccaccacggggttaagtatatcaaggcgaataatgaaagattctcaaccgcgggggtctgctccttgactgtttcctaagtatatcaaggcgaataatgaaagattctcaacgagatagacggcgtgacattctcgaccgtaagtatatcaaggcgaataatgaaagattctcaactacggaaccgacccggaaaacgtagaagtaagtatatcaaggcgaataatgaaagattctcaacttggagttcaacgaacgcggcgagattctaagtatatcaaggcgaataatgaaagattctcaacaaagctatcgcatggcggcgcccatcagtaagtatatcaaggcgaataatgaaagattctcaacgaacaggccattgtgaacggcgactttgtaagtatatcaaggcgaataatgaaagattctcaacttcgtcagttatgagaactacaccatcgtaagtatatcaaggcgaataatgaaagattctcaacttggagaataactaatgacccccgcccctaagtatatcaaggcgaataatgaaagattctcaacgacgaccagggatgccagctgcggaatgtaagtatatcaaggcgaataatgaaagattctcaactatggattcacagttgctttcaaatctttaagtatatcaaggcgaataatgaaagattctcaaccaaaaacggcattgttcaccgtgaaatctaagtatatcaaggcgaataatgaaagattctcaacgtctccgctgtcggccatgcgcttaatataagtatatcaaggcgaataatgaaagattctcaacccatcctcagcattaaacgcatgaacaaataagtatatcaaggcgaataatgaaagattctcaacctacaggcgatcgtgagtctggacatcgtaagtatatcaaggcgaataatgaaagattctcaaccggaatgtgaccgtgaccaccgaagctttaagtatatcaaggcgaataatgaaagattctcaacctttgcttggcgattgtgaacatgtgcttaagtatatcaaggcgaataatgaaagattctcaacataattcttgcagtgattgctaacgcggtaagtatatcaaggcgaataatgaaagattctcaactacgaattgctcaaggttcagcagccgttaagtatatcaaggcgaataatgaaagattctcaaccatccgaaaagcctacgccacagggcattaagtatatcaaggcgaataatgaaagattctcaacctggagacaacagaaacactaccgacactaagtatatcaaggcgaataatgaaagattctcaaccgtgcgtgctacgcaggataattccccgtaagtatatcaaggcgaataatgaaagattctcaaccgtacccgcaccgtctcaccgccagttttaagtatatcaaggcgaataatgaaagattctcaacatggattggcacgctaggcgcgctatcttaagtatatcaaggcgaataatgaaagattctcaaccaaagctggagcgcatgggctgtgcccataagtatatcaaggcgaataatgaaagattctcaactacaccgacgataatggcgtgatctggataagtatatcaaggcgaataatgaaagattctcaacaccgacaaagccactggcgagtcgcgtttaagtatatcaaggcgaataatgaaagattctcaacctcaatctcaacgcccggtgggttgtggtaagtatatcaaggcgaataatgaaagattctcaactcagcaaacgcgttagcggcacgggtgataagtatatcaaggcgaataatgaaagattctcaacgccaatcgcacgcgcaagcggagtccactaagtatatcaaggcgaataatgaaagattctcaaccgactggttgccggctgctgtatgtagctaagtatatcaaggcgaataatgaaagattctcaacgataagggaatgttgagctgttgggcactaagtatatcaaggcgaataatgaaagattctcaacgacgttgataacggcgacgaaccgcatataagtatatcaaggcgaataatgaaagattctcaacgtggacaaggccggaggacttcatagattaagtatatcaaggcgaataatgaaagattctcaaccctgcgcggcgggaaaacttacggcgattaagtatatcaaggcgaataatgaaagattctcaacgcattgaacgccttgaacgcaagtgcgttaagtatatcaaggcgaataatgaaagattctcaactctggaatggaattaaggatattatttctaagtatatcaaggcgaataatgaaagattctcaaccatcatggtactgatgctgtctgacaggataagtatatcaaggcgaataatgaaagattctcaactagcctgttcagctctgaggaattggaataagtatatcaaggcgaataatgaaagattctcaacgtgaacattctggttggtgactttgaggtaagtatatcaaggcgaataatgaaagattctcaactgagggaacgccttacggcgcggggtgataagtatatcaaggcgaataatgaaagattctcaacaggtcgtgtgcagattgtccactggcgctaagtatatcaaggcgaataatgaaagattctcaacagccgccgccataccagccaggccaccgtaagtatatcaaggcgaataatgaaagattctcaacagccgccgccataccagccaggccaccgtaagtatatcaaggcgaataatgaaagattctcaaccagctacgcgaaggtcgtgaaagtcccctaagtatatcaaggcgaataatgaaagattctcaactggaatttggaagattggagaagcctaataagtatatcaaggcgaataatgaaagattctcaactcccagctggtctatggtttcgcgaacgtaagtatatcaaggcgaataatgaaagattctcaaccgtcagcgtgaacacgattcgcgcggtataagtatatcaaggcgaataatgaaagattctcaaccaacatcactgctgatgaagcccgagcctaagtatatcaaggcgaataatgaaagattctcaaccgctggatacgcgggcgtaaccggcgattaagtatatcaaggcgaataatgaaagattctcaaccctaccaaccggcttagcagacggagcataagtatatcaaggcgaataatgaaagattctcaacggcgctggtgactggccgtgcctgggtataagtatatcaaggcgaataatgaaagattctcaacgaacggtggtgcgtgcctgctccaccactaagtatatcaaggcgaataatgaaagattctcaacacctgctgaaaacgtcgtccagggcgtgtaagtatatcaaggcgaataatgaaagattctcaaccaattcacgcgcgggcacgccgggtgcctaagtatatcaaggcgaataatgaaagattctcaacattctgcgtatgcagattgaagcgctaataagtatatcaaggcgaataatgaaagattctcaacctgtatgaaaatgcggtaaagcccgcgttaagtatatcaaggcgaataatgaaagattctcaaccatatgttgctgggtatgaatggccgcggtaagtatatcaaggcgaataatgaaagattctcaacaaccaggcgttcaccaacgcactcagtataagtatatcaaggcgaataatgaaagactctcgaatcggtcggtcgcgtcggccggtcataaaaatattaaacaaatattgaaagattcttagtcctcaatgaaagcccctccggtctattcattttagcaaatgtgcgtactgctgggtacaaatagtgaaaacattaaaataagcccctcgacccgcagcaacaagctgcaggccgaggggcctcatcatgcgttagcaacgcaaccgccgccaccgtgggagtggccggctgcaggccgaggggcctcatcatgcgttagcaactaagctgcagagtggcgctgtcaccgcccgggggagtaccccctacgctgccgccgctacagcccccttggctgaggtgccgtttcgggtccacagcaggagcgctgccacgctgttgatgatgtagaagatgtatttgccgacgttcgcgaagttgccctgggtcagcgccttgatgcactgcacggtgttgtacaggaaccagaattgccactgcatcgtgagcttgagtgcattcagaatgttcgctgacagggacaggccgaacactacggtcgtgatccagaacaggaacgaggtctgaccgcggtagccaatgtagttcgctaccagggagaacgcgaacgaccccgccacaataccgccaataatcagctggcccttcgtgccggtcggcggttccatcgccttgccgcgttcggagttctgccacctacgaattgcgaaggtgtacacgataaaggtcaccgggtaggtgatgatcgctgccttgttgcccataatgtagtcaatcgcgccagacagtgccgtgttaataatgccgagcacgttgccgatgtttgagaggcggccggtcaggcgggtagacatcattgaaatacccacgttaatcacggaaatcacgccgaggggaatgaagttcgtaatcgggccccagtcgacgtatttgtcgagggtggtgcccaggtatcctgaggcgattgcgatggcgatgaccagtgccacgccgaagaggtcggcgtacttggacttggcgaaaaagaggagggccttctcagagaattccttggcctccatgggtaactcctttgttaggatatagaaacagtgatagggtaccaataactataactctttgaaaagggtttgaatcggcgtgtcacacataaaacctcagaaccccacatattccataccccggaacacctcggcgcagagcggttcaaagccaccccatcaagaacccataccaacttccggcaaacgttgccagataacgcccctacttcgttgaacaccaaaaatgggcgtaaaatcaccaccgtttcatcttcgttttaaagaaaccttaaggtacgctagatgactgggtcagggaactcgtgccggtctcactcaccgcacatccgcccgacagacacccgcaccccgcacgctgcgtctcactcacgcacacaggggagggaaccaccgtatcggcctcactcaccgtttacgccgctgtccgtgcgtcctgccacccgtaactcactcaactcaaacaagaactgaataggacaatcatgcccttgcttaaccatcgactctcacgacgattcttcgtaaagggtgcttccgcagccgcagccgcaggcgcacttgccctgcaggcacaggccgctcatgcagacgaagctcccgcaaaccttgccccggcaaccgaggaaactaaaggcccgcacctcgttattcagcgcgccaccatcactgaaaccggtatgaccgtcaactacactgcacacggtctgcgcgaatttctcaccgaaggcaccaccctgaccgtacgccacggctacgttcgtaacgactctttcgaaactctgcgctcctggccgctcacccccgaatttgacggtgacgctgacagcttcagcggtagcgaccagttccccatcgagctgatgcagggtgagggcgttgaccacgccctgcagctggatatttgctccgacccgtggggtcaggagatcacccgccagattgctgcgcgcatccccgtggctgagaccaagatcctgaagacttctttcgaggatgttccggataaccacccgttcgctgaggatatccgcatggcgaaccagaagaagtggctgatgccgaacccgcagactggcgcgtttgagccggaccgccctgtgacccgcgaggagcttattgctctgctgaaccacgctgcaggtcacgctggcgtgagtgaaaactcggatgttgcacccttcgcggatgcggcaggccgcccgaccgcgaacgcgttgcactgggctcgtgaccgcaaaatcaccgagccgctcactggtggcgacaagattgacccgaccgcaccggtttctcacgaggagctggcggctgtgctgttccagtacaacgcggaggttcagctgaccgaaatgaaggagggcgctggttctcgtttccgcgacgtgctcggtgcgggtactctgcaccgttacgttgcgtgggctggcgcgaacgacatcgtgctggatgcttcgggtgtgtttaacccgaccgcgccgactactcgcgcggagctggctcgtttcattcgccgctacaagctgcagaacctgctgttcactgacttctcgtatgtctcctaatttttagtcacccctggcactgtgtcaccccggcaccgtgtgttggggtgcgtggaacccccgtcttctggctttgctggaggcgggggttttgctgtgccatgtcgtgcctcgctgctgtattgccgcacttcggggagttttagtgggggagttttagtgacaggctgtgcctggcatatgaaattttgcgttatatatacctaaaatcttgcaaaatcctgtgcgctaagtaagtattacctagaaggtaagttaatggttgccttactaaatactgtgtgaagactagtttccttcctcgtgggcccacgaaacccacaccagagagcagggaaaacgcggtacctcaccacccgtcggtggcggagagacgcacctccacacaccacccacgaaaaaggacatacatatgaagctcgcatcaagcaaggcattcaagggcctcgccgttggatcgctggcactggcaatttccggcgttgccaccatccccgcatcgttcgcggcagaatccacccgggcagcaagccagagcagcgacgctcgcaccatcaccgacaaggcgatggcaaagatcacccagggcctgcccggtcagttccaggtcgcatactccaagaagaccaacaagatttgggttgcgggcactgcagaccgcgacgagcacgtttccactatcgctcgtattgacgcgaactccctgaagattgaggcagttgctgagctgcccatcgtccaggacgcgaagggctactcctacgagggtgcgtacggtatcaccgtcgatgacgaggaaggtaccgtgtgggtgaccagcacccgcgataactccgttgccgtgtacgatcaggcgaccatgaagcagctgtggaccaatgcgggtctgagcaaggacgacccgaactggattgagcacccccgcgaggtgcgtgtcgatcacgagtcgggtaaggctttcgtgaccggtcgcttctttgtctcggctatcgatctgaagaccaagcaggttgagaagattcagcttgagggcgcacccgatggcggtacccgctacatcagcatgaacattctggtggacggcggtaagctgtacgtgcccgaacgcaccggcggcaaactcttcgt

SEQ ID NO: 3629 - DNA, 15581 bp, synthetic construct
  source 1..15581: mol_type = other DNA
  misc_feature 1..15581: note = Synthetic
atatgtgcatgtcaggccgttattcgcaggttaagctgaccaccggaagggaaacagccccgtagcgcacccaacaaatgcatcaatgcgttatggaacactacagttaccaccctaccgcatgtttgccgccgtttgtattcttttgggtgctacagcgacgaaacatcaccatacgaacacctcaatgctttatgtatcaaataagtacctgcacgcaaagaatttacacatagtggcgagtgttccccggcaaaagcatccccgcaacagaccaggggagagggctgcggaccaaaagaatgaacagcaagctaggggagtagttagaggggcagagtaatggccgataggtttagggaatatcgataggctattgcctcctccgcgggtttaaaacccacggcgaagacactaacctatcgaacgctgcgcccacccaagagcacccgtccaagacagaccctgcccaaaacacactccacctcagcctccgcacccgaacgcccatgccctcgcattcccgacctccgcgtcccagcccagcaatccctcccgcatatcccaccccactccctccccatgctcgtaatgtggcgggcaactcatgcggctcacgcggggtgttagacagtactacacttaaagcggaagtcacatcgccgtcactgaagaaaagagtttttgtgcccaccacgaccgtacatttgaccgaccgcatccctcgcgtttctgctgatgagttgctggcgggtttccgcccctctgagcgttttggtgaagtgtcttttgatagctacattcctgatccgaaccagccgtcgcaggctgaagcggtgcagaagctgaaggattttggcgacaagattaatggtggcggcgctggtgccggtttctttggtcgcctgtttggtggcaagaagaaggattcgacgaaggctggcctgtaccttgacggcggttttggtgtgggtaagactcacttgttggcgtcgctgtggcattatgtggacggcccgaaggcgttcggtacttttgtggagtacacgaacctggtgggtgcattgacgttccgtaagacggttgaggcgttgagcagctacaagctggtgtgtattgacgagtttgagctggatgatccgggtgatactgtgctcatgtctcgtctgatgcgtgagctggcggatgctggtgtgaagcttgtggcgacctcgaacacgctgcctggtgcgctgggtgagggccgtttcgcggctgaggattttaagcgtgagattcaggtgcttgcttcgcagtttgaggtgcaccgtgtggatggtgaggatttccgtcaccgtggcctgcctgccgcaccggagcctgttgctgatgatgcgtttgatgcgaaggttgaggaagtgttcggcggccagactgttggtgttgataacttcgctgacctggtggagcatctggcgaaggtgcacccgtcgcgttaccgtcagctgattgatggcctggatggtattgcgtggcgtgatgttcacccgattactgagcagtcggtggcgttgcgttttgtggtgttggctgaccgcctgtatgacaaggacttgccgattgtttcttcgggtgtgccttttgacaaggtgtttactgaggagatgctggctggtggttatcagaagaagtatttccgtgcggtgtctcgtttgactgcgttggctcgtgagggcatgctcggcgaatctgagtagccgccgcctgacgctgcgaaactgggcagcgtgaatgcgtgaactgcgccgaaaagtttatatgcaaaggcccccgccggatgctccacgagaggatccggcgggggtctttgtttgccttggctagttctaatctgcgggcttggcaaatgcgtaccgcaagcatacagggaagttaaaaacataccgcccgttcctaagaggagccggacggtgagaagtcagcatcggaaggatgccttattgggattctttctaccctgattctagcatgattttcaacaaaataagtagagttacatcgataatttctatctttaacgcgagaatgaccaaacggagtgcgcatctatctatacggggttatggttagttttagaagggtgcgggaacgcagaatgaacatgtaacacctacgctatattcgagtatttacgaaggagtaagcagacatgaagaattatggtattgggattgatgtcggttaccgctcagtgggctgtgctgctatcgagtttgatgatgatggtttccccattaagacgttgtctttagtgagtttccgtcatgatggcgggctggacatgaagggagacaaacctaaaattcgcaaggcgacccgtggcgttgctcgtcgtaggatgagtatgaaccgccgccgtaagcgtcggctacgcaaccttgacaaggtactgtcgaatctgggttataccgtaccggaagattctgggtctgagacctatgaggcatggacttcacgtgcgctgttggcatccatcaagctggctagtgctgatgagctgaatgagcatttggtgcgcgctgtgcgccacatggctcgtcaccgtggttgggctaatccgtggtggtctcttgaccagctggagaaggcatcgcaggaaccgtcggagacttttaagattattctggctcgtgcgcgtgagttgtttggtgagaaggttccggttaatccgactttgggtatgttgggtgctcttgccgctaataatgaggttcttctgcgtcctcgccgtagctacaaggcggaggaagctaataacccaaagaaggcagagaagtacctggctgattatggcactcagccgctaatggccgcgaaggtgtgccaggaggaccagctggctgagctccgtcgcatctgcgaggtgcagggtatcgaggctcagtatgagaatcttcgtgaggccgtctttacgcacgtgcgtccctacgtgccgaaggaccgcgtaggcaaagacccgctgaacccctccgaaatccgcgcaagccgcgcctcgctggagttccaggagttccgcattcttgattcggtggcgaatctgcgtgtacgtaccgattcccgtaccaagcgcgagctctccgaaagcgaatacgatgctgcggttgatttcctgatgtcctacacgggtaaggaacagctgagctgggctgatgtggctgaagagattggcgttccgggtaaccgtctgattgccccggttcttgaggatgttcagcagaagactgcgcccttcgaccgttcgtctgcggcctttgagaaggcaatgaaggcgaagactgaagcacgcaaatggtgggaatcgaacgatgatgatcaactgcgtagcctgttcattatgttcctcgctgacgcaacggacgatacggcagaagccgcggttgaagcgggcctgcatgagttgtttgcaagctggccggaggaggaacgcgaggtactctcgaatatttctttcgaatctggtcgtgcagcctatagcgcaaagactctttctaagttgagtgagtacatgcatgagcaccgtgtgggtgttcacgaggctcgcaaggccgtcttcggcgtggatgatacctggcgcccgcctttggcaaagctagaagaacctattggtcatccgacggttgaccgcgtgttgacgattctgcgtcgttttgtgctggattgtgagcgccagtggggccgtccgcatgcgattactgtggagcatgctcgtaccgggttggtgagccccgctgtgcgccggaagattctgaaggagcaagaggacaaccgtaagaataatgagcgtatccgcggtgagttgcgtaagtcgggtgtagaaaatccgagtcgcacggaagttcgtcgtcatttggttgtgcatgatcaggagtcccaatgtctttactgcggtgctgtaatcaggacggatacttctgagttggatcatattgttccgcgcgctggtggcggttcctctcgtcgtgagaatctggctgcggtgtgccgctactgtaacgcgatgaagagcaacaccccgttctaccgctgggcttccccggagaagctcaaggagaccattgaccgcgtccaccagttgaaggcctttaaagaccccaagaaggctaagatgctgaagaatcagattcgccgcctcaagcagtctgaggctgatgatccgattgatgagcgctcgctggcttcaacttcgtatgcggctgtggcggtgcgtgagcgtttggaacagcactttaatgagggccttgctcccgatgataagagtcgcgtggcactggacgtttacaccggtgccgtgacgcgtgaatcccgtcgcgcgggcggcatcgacgagcgtattcttctgcgtggtgagcacgataagaaccgttttgacgtgcgccaccacgcaattgatgcagcggtcatgacccttctgaaccgttcggttgctctcactttggagcaacgccaccagttgaagcgtgagtttaacgagacgaagcgtgagaacggttggcgtgactttattggtctgtacccggcctccaaagagaagttcttgaagtggaagaaagcagctacagttttgggcgatttgctggctgaagcaattgaggatgattctattgccgtggtgagcccgcttcgtttgcgtccgcagaacggcgcggtgcacgatgaaacgattcatgcggtgaagaagcagactttgggttctgcttggtctgctgaagctgtaaagcgtattgttgaccccgaaatttacttggagatgaaggacgctttgggtaagttgaaggagcttcctgaggattctgcccgtacgcttgaattaccggatggccgcttcgttgaggctgatgatgaggtgctgttcttcccgaagaaggcagcatcgattttgactcctcgtggtgcggctgagattggtgattcgattcaccacgctcgcttgtacggatggatgacgaaggagggtgagctgaagttcggcatgctccgcgtgtacggtgcggagttcccgtggctgatgcgtgagagcggtagccgtgatattttgcatatgccgattcaccggggttctcagtctttccgcggtatgcaggttggtgtgcgcgaagcggttgagagtggcgaagcggttgagtttggatggattactcaggatgatgagttggagtttgatccggaagactatattgctcacggtggtgatgatgagctgaatcggcttcttcgggttatgccggagcgccgttggcgtgtggatggcttctataatgcgggtactttgcgtattcgtccggctttgttgtcggctgagcagcttccttctgagcttcagaagaaggttgctagtaagactttgagcgacgttgagctcattctcttgagggctgttcagaggggcttgtttgttgctactagtggcttcttgccgttggagagtctgaaggttattcgccgcaataacttgggcttcccccgttggcgcggtaacggtagtctgccgacctcgtttgaggttcgttcttcggcgttgcgtgctctgggcgtggaaggctaggagagcgtgatggatagtaagtggcgtgttcttgatttcactgcctatgagggcttcctgtcgtatgagagggggcgaatcgtggcgggggagcggagcacgccacttgctgaggttgattttattctcctcggtatggggtgctcctggggttacggcttggtggctggtctggaacgttttgatgttgctgccgcgatttgtgattggcgtaatcagccgatttctacgttgtatcactggtctgagaatacgaaggtgtttactcgtcatgaggctcaggctgagttgagtgtgccgcgtgcgaagaatgcgtggatgcagattgtgaaggctaagcttcggggtcaggcgaattgtcttgatgcgatggggcggccgggtgctgcggagattcgtgcgttggctcgttcggtgcgttctggtgacccgtcaaatgctgaggctcagggggcgcgcctgtattggggtgagttcctcccggagcaggggttccgtcgtcagcagctttctgatgatgtggtcaatggcatgctcaattatgggtacacgattcttcgtggcagggttttgactcgtgtgattgctgcgggtttgtgccctacgttgtcgctgttccatcgtcatcgttctaacgcgtttgctttggttgatgacttgatggagcctttccgacccgcagtggattttgcggtgtatcagttgatttctgctggttctactgagttgggtcgccaggagaaggccgctcttgttcaggtgttgtctgacacggtaaatgcggattcaccgtttaagctccgtacggtgatggaggatttttgttctgagtttgctctctatgttgagggtaagcgtgatagattgtcggttccggtgtgggagctgacagctgttgaggagttgtgtgaggatggctgatcctgtgtggttgatggtgatgtttgatttgccggtgaagacgaagaatgagcggaagttggcgaatcgttatcgtcatgttctgctggatttgggttttgaccgtatgcagctgagtgtgtatgcgaagtactatctgaatgggaatgcgacgggttctgacttgttccggttgcaggttgaggttccgccgggtggtgcgattcgcattatgcggtttacggatgctcagtgggctggttcgattcgtcatttggggccggaggtgcagcagatggaggagaagccggaagcgttagatattttctagcggagcttcacaaaaaatgagccggtggggcaacgaccaaatatggtcgttgccccaccggctcatttttcttttcggatctcgtctagagatgagcttcaagacaggtatggggcagtttttctctcaaaaaactgccccatttatacccctgactaggggaaacgctcgattacttaagtatatcaaggagtatttagaaagaatcccaactaatggctcctcaggctccggtgtaccgtaagtatatcaaggagtatttagaaagaatcccaacttcccttcacgcaggagggcaagctggctaagtatatcaaggagtatttagaaagaatcccaaccgatccgatgtcgtccaatgcgtccccgtaagtatatcaaggagtatttagaaagaatcccaacgagccttcaacagattcttcaacatgtttaagtatatcaaggagtatttagaaagaatcccaacagggtgagcctcgcctcgttctcccagctaagtatatcaaggagtatttagaaagaatcccaacgtggggcgcgcactttggaatgattgcgttaagtatatcaaggagtatttagaaagaatcccaactcagaagaagcaggaaaaaccccgtgattaagtatatcaaggagtatttagaaagaatcccaactgatttttcgcacgttgtcgagcttttctaagtatatcaaggagtatttagaaagaatcccaacgatttgctgttcggctgcaccgggcggttaagtatatcaaggagtatttagaaagaatcccaacggcagcaagacagtgtgtcaaactgtgctaagtatatcaaggagtatttagaaagaatcccaacggtgcggcgggcttcgttcaccatcttgtaagtatatcaaggagtatttagaaagaatcccaactctctcaatcgtcaaggtcagtagtggttaagtatatcaaggagtatttagaaagaatcccaacgacccgcgctgctgcgcttgtctccgcttaagtatatcaaggagtatttagaaagaatcccaacagcgtgggttcccagtcgttatcttccataagtatatcaaggagtatttagaaagaatcccaacgtgtatcgcgaggtgtattctcagctgataagtatatcaaggagtatttagaaagaatcccaaccctctggcggtcgcgggttctcccgcgttaagtatatcaaggagtatttagaaagaatcccaacggtaaaaaaatatccccccaacccgtagtaagtatatcaaggagtatttagaaagaatcccaaccggccagcccacttcacatgtgcttttctaagtatatcaaggagtatttagaaagaatcccaaccggcaacacgcgcccaccgacgggcggctaagtatatcaaggagtatttagaaagaatcccaacgtgccactcatcggctgagcgccagccctaagtatatcaaggagtatttagaaagaatcccaacgtgcaccaaagctcacccggtgtgccaataagtatatcaaggagtatttagaaagaatcccaacgttgcgccggatatccccaaaggtttactaagtatatcaaggagtatttagaaagaatcccaacaagtgactcatagagaggtgtcactgtttaagtatatcaaggagtatttagaaagaatcccaacggccggctgcgcggccggtgcctgctcctaagtatatcaaggagtatttagaaagaatcccaaccttctatgacgcgcgaatcataaggtgttaagtatatcaaggagtatttagaaagaatcccaacaccgtaacgatcatgggcgcggtcgctttaagtatatcaaggagtatttagaaagaatcccaacggttgcggtgtgtgtgaaggtcgagaagtaagtatatcaaggagtatttagaaagaatcccaacaatcgtctgcacatacccggtcagcttctaagtatatcaaggagtatttagaaagaatcccaacaggttagggcctgcaatgttcagggtctttaagtatatcaaggagtatttagaaagaatcccaaccgacgtagtcaggcttgaggtcaccaggtaagtatatcaaggagtatttagaaagaatcccaactgggctacaacctgtgatgtagttaaggtaagtatatcaaggagtatttagaaagaatcccaactcgcaaatttgtgccaaaaattttattttaagtatatcaaggagtatttagaaagaatcccaacccgcctcattgccgatgtgctcagcgactaagtatatcaaggagtatttagaaagaatcccaaccagcacgccgcgcatggcgtgcagggcgtaagtatatcaaggagtatttagaaagaatcccaacatgttggataatgccgcgcgctggaagttaagtatatcaaggagtatttagaaagaatcccaaccaggacggcgacttcgtaaacctgcatttaagtatatcaaggagtatttagaaagaatcccaacgatttggtttggcaggcgtcggttttggtaagtatatcaaggagtatttagaaagaatcccaacatcattgagggcacccgcgaggggaagataagtatatcaaggagtatttagaaagaatcccaactaggacaccatcgcggagaacgccggaataagtatatcaaggagtatttagaaagaatcccaacctatttccgcatccatgaccttgatgtttaagtatatcaaggagtatttagaaagaatcccaaccggaaggtcgtagcacgaaccgccgtagtaagtatatcaaggagtatttagaaagaatcccaactatttttttggggggggggtggtgaggtttaagtatatcaaggagtatttagaaagaatcccaacgcttcgattccatcgccaggcgctggtgtaagtatatcaaggagtatttagaaagaatcccaacgctcccctgagaagcacacagggcagggtaagtatatcaaggagtatttagaaagaatcccaacgtgcccatacgcgataatccggggtcaataagtatatcaaggagtatttagaaagaatcccaacgtactgctgttgatattgtcctgaaccgtaagtatatcaaggagtatttagaaagaatcccaactggttgtttccgcatcggccgctggaaataagtatatcaaggagtatttagaaagaatcccaacgccgagaagacggcatagccggagacagtaagtatatcaaggagtatttagaaagaatcccaacgctcgccgggccagcagacccgattgcttaagtatatcaaggagtatttagaaagaatcccaactgcgccactgactacaggcggcttaggctaagtatatcaaggagtatttagaaagaatcccaacgtgatgcgtgaccatgagcccgggtcagtaagtatatcaaggagtatttagaaagaatcccaacaatatttggggcgggggtggcaagtgtttaagtatatcaaggagtatttagaaagaatcccaacgctgattctccgtccccgaccggggacgtaagtatatcaaggagtatttagaaagaatcccaacggtcatcggagaggcgcagattcggagataagtatatcaaggagtatttagaaagaatcccaactctcccgcaaacccctatctcgtcatcataagtatatcaaggagtatttagaaataatcccaacttctcaagggggaccagggcagggctcctaagtatatcaaggagtatttagaaagaatcccaaccccctgcggacgtggtagccgttcttcttaagtatatcaaggagtatttagaaagaatcccaacaatattggggcgggggtggcaagtgttgtaagtatatcaaggagtatttagaaagaatcccaacggcttccgggtctggtggagcagctgcataagtatatcaaggagtatttagaaagaatcccaacgattccacgatcgcgacgcgctggcaggtaagtatatcaaggagtatttagaaagaatcccaacccgacgaaggcatgacgatcaaccccggtaagtatatcaaggagtatttagaaagaatcccaacagcctggcgcgtcactcgacaaactggctaagtatatcaaggagtatttagaaagaatcccaacacgtatggaagcgatacgcgacccttgataagtatatcaaggagtatttagaaagaatcccaacccggtcttcgggtgcatccacgggcgcataagtatatcaaggagtatttagaaagaatcccaacggtgtatttcggggtgtatcgtgaggttataagtatatcaaggagtatttagaaagaatcccaacgtctttggcaccgggtgaagttgtggcgttaagtatatcaaggagtatttagaaagggggaaattataaagcttttattgagtctttgtgtattattattgaaaattatgtattttgagatttgtaagaaaaatatggaattgggtgtatagatgaggcccctcgacccgcagcagtagactgcaggtcgaggggcctcctcatgcattagcgttagctggtagaaaggtcagcgcccgaaaacccgggaaccgccccttacgccaccgccacggtgcccttggctgcggtgccatttcgggtccacagcaggagcgccgccacgctgttgatgatgtagaagatgtacttgccgacgttcgcgaagttgccctgagtcagcgccttgatgcactgcacggtgttgtacaggaaccagaattgccactgcatcgtgagcttgagcgcgttcagaatgtttgctgacagggacaatccaaacactacggtcgtgatccagaacaggaacgaggtcttgccgccgtagccaatgtagttcgcaatcagggagaacgcgaacgaaccggccacaataccgccaataatcagctgacccttcgcgccggtcggcggttccattgccttgccgcgttcggagttctgccacctacgaatcgcgaaggtgtacacgatgaaagtgaccgggtaggtgatgattgctgccttgttgcccagaatgtagtcaatcgcgccagacagcgccgtgttaataatgccgagcacgttgccgacgtttgagaggcggccggtcaggcgggtagacatcattgaaatacccacgttaatcacggagattacgccgaggggaatgaaggccgtaatcgggccccagtcgacgtatttggcgaggttggtgctcaggtatcctgaggcgattgcgatggcgataaccagtgctacgccgaaaaggtcggcgtacttagacttggcgaaaaagaggagagccttctcgtatgagaattccttggcctccatgggtaactcctttgttgaggatataggaacagtgatagggtaccaataactataactctttgaaaagggtttgaaacggcgtgtcacacataaaacttcagaaacccacatattccacatctcggaacaccgcggcattgggtaattcaaaatcaccccatcaagaacccataccaacttccggcaaactttgccagatatcgcccctacttcgttgaacatcgaaaatgggcgtaaaatcaccgccgtttcgtcttcgctttaaaggggaccttaaggtacgctagatgactgggtcagggaaccgtgccggtctcactcaccgtgcatccgcccgacagacacccgcaccccgtacactgcgtctcactcacgcacacaggggagggaacctcacgtatcggcctcactcaccgtttacgccgctgtccgcgcgtcctgccacccgtaactcactcaactcaaacaagaactgaataggacaatcatgcccttgattaaccatcgactctcacgacgattctttgtaaagggtgcttccgccgctgctgctgcaggcgcactgaccctgcaggcacaggccgcgcaggctgacgaagcacccaccaacattgccccggcaaccgaggaaactaaaggcccgcgcctcgtcattcagcgtgccaccatcactgaaaccggtatgaccgtcaactacactgcacacggtctacgcgaattcctcaccgaaggcaccactctgaccgtacgccacggctacgttcgtaacgactcttttgaaactctgcgttcctggccgctcacccccgaatttgacggtgatgctgacagcttcagcggtagcgaccagttccccatcgagctgatgcagggtgagggtgtcgagtacgccctgcagctggatatttgctccgatccgtggggtcaggagattacccaccagattgctgcgcgcatccccgtggctgagactaagatcctgaagacttctttcgaggatgttccgggtagccacccgttcgctgaggatatccgcatggcgaaccagaagaagtggctgatgccgaacccgcagactggtgcgtttgagccggaccgccctgtgacccgtgaggagcttattgctctgctgaaccacgctgctggtcacgctggtgtgagtgaaaactctaatgttgcaccctttgcggatgcggcaggccgcccgaccgcgaacgcgctgcactgggctcgtgatcgcaagatcaccgagccgctcactggtggcgacaagattgacccgaccgcaccggtttctcacgagcagctggcggctgtactgttccagtacaacgcggaggttcagctgactgaaatgaacgaggctgctggttctcgtttccgtgacgtgctcggtgccggtactctgcaccgttacgttgcgtgggctggcgcgaacgatatcgtgctggattcttcgggtgtgttcaacccgaccgcgccgactactcgcgcggagctggctcgtttcattcgccgctacaagctgcagaacctgctgttcactgacttctcgtatgtctcctaatttttagctatccctggcgttgcgcgctgggtagcgtgaaacccccgtcttctggcttttgctggaggcgggggtttgccatgctccgtattgccgcacctcggggagttttagtgacaggctgtgcctggcatatgaaattttgcgttatatatgcctaaaatcttgcaaaatcctgtgcgctaagtaagtattacctagaaggtaagttaatggttgccttacttaatactgtgtgaagactagttcccttccttgtgggcccacgaaacccacaccaaagagcaggaaaaacgcggcgcctcaccacccatcggtgggggagagacgcaccttcacgcgccacccacgaaaaaggacatacatatgaacctcgcttcaagcaaggcattcaagggcctcgccgttggatcgctggcactggcaatttccggcgttgccaccatccccgcatcgttcgcggcagactccaccccggtagcaagccagagcactgacgctcgcaccatcaccgacaaggcgatggcaaagatcacccagggcctgcccggtcagttccaggtcgcatactccaagaagaccaacaagatttgggttgcgggcactgcagaccgtgacaagcacgtttccactatcgctcgtattgacgcgaactccctgaagattgaggcagttgccgagctgcccatcgtcaagaacgacaagggctaccagtacgacgcagcctacggcatcaccgttgacgatgtagacggcaccgtctgggttaccaacaccaccgacaactccgtgtccgtgtacgatcaggcaacgatgcagcagacctggaccaccgcgggtatcgcggagaccgacccgaactggattgagcacccccgctccgttttggttgaccacgagtccggtaaggcgttcgtgaccggtcgtttctttgtatccgctatcgacctgaagaccaagcaggttgagaagatccagctcgaaggcgcacccgacggcggcacccgctacatcagcatgaacatcctggttgacggcggtaagctgtacgtgccggagcgtaccggcggcaagattttcgtcatcgacaccaagaccttcaaggtagagagcagcttcgacaccaagggcaacgctgagggtgaggttcgcccctccgacatcgcgattgaccactcccagaacgaaatttacgtctcctcccagggcgtgaagggcgcgaactccggcgtgtccatctacgacgcgaccacccacgagttcaagaagttcatcccggtcggcacccaggcactcgcgctggacaacgacgaggcgaacgacctggtgtacgtctctgacttcggcaccggcaaggtcggcgtgatcgacggcggcgcagcagacaagctgatcgctgaggtcgccatgaacggcggcaaggcaaacgacctggtcgtactgcccaacggctccgttgtcgctgtggacaagcaggctggcgcaaccgcaaccgtgccctacgtcctcgacggtaccaccggtaccgtcagtacctccagccaggtcaccagcaagccttctaaggacaagcagggcaacgaggttcccgccaagacctccgagattcaggcgaactccatcctgaagttcaaggtcaccgcaaccgcaggcgacaactccgaggtcaagcaggtcactcccgaaacccgcgagttccagggctacccggcaaccgccaccaagaccaccaaggcagccgactctaccaccccctccaccgaggcacaccgtaccgtggatgcaaacggtagcgttgcgaacatcattca

SEQ ID NO: 3630 - DNA, 15380 bp, synthetic construct
  source 1..15380: mol_type = other DNA
  misc_feature 1..15380: note = Synthetic
agggatggagaatcattccgataaaaatggcgaaaacaggtgctcccacaacaggcaggaatcctcctaaaacccaagagatgatagaaatgatcagacaaactgacagtcctgcccaattttttgatagaaatgacataaaaacctccgaaaatagatactccttattgtaatcttatttgtcagaaaaataaaatagaaagtaggaatacagacccagcccggggagcgcaccacctcaccctccgcacccgaacgcccatgccctcgcattcccgccctccgcgtcccagtccagcagtccctcccgcatatcccaccccattccttcctcatgcccgtaatgtggcgggcaactcatgcggctcacgtggggtgttagacagtactacacttaaagcggaagtcacatcgccgtcactgaagaaaagagtttttgtgcccaccacgaccgtacacttgaccgaccgcatccctcgcgtttctgctgatgagttgctggcgggtttccgcccctctgagcgttttggcgaagtgtcatttgatagctacattcctgatccgaatcagccgtcgcaggctgaggctgtgcagaagctgaaggactttggcgacaagattaatggtggcggcgctggtgccggtttctttggtcgcctgttcggtggcaaaaagaaggattctacgaaggctggcctgtaccttgacggcggttttggtgtgggtaagactcacctgttggcgtcgctgtggcattatgtggatggtccgaaggcgttcggtacttttgtggagtacacgaacctggtgggtgcgttgacgttccgtaagacggttgaggcgttgagcagctacaagctggtgtgtattgacgagtttgagctggatgatccgggtgatactgtgctcatgtctcgtctgatgcgtgagctggcggatgctggcgtgaagcttgtggcgacctcgaacacgctgcctggtgcgctgggtgagggccgttttgcggctgaggattttaagcgtgagattcaggtgcttgcttcgcagtttgaggtgcaccgtgtggatggtgaggatttccgtcaccgtggcctgcctgctgcgccggagcctgttgctgatgatgcgtttgatgcgaaggttgaggaagtgttcggcggccagactgttggtgttgataacttcgctgacctggtggagcacctggcgaaggtgcacccgtcgcgttaccgtcagctgattgatggcctggatggtattgcgtggcgtgatgttcacccgattactgagcagtcggtggcgctgcgttttgtggtgttggctgaccgcctgtatgacaaggacctgccgattgtttcttcgggtgtgccttttgacaaggtgtttactgaggagatgctggctggtggttatcagaagaagtatttccgtgcggtgtctcgtttgactgcgttggctcgtgaaggcatgctcggcgaatctgagtagccgccgcctgacgctgcggaatcctgcagcgtgaatgcgtgaactgcgccgaaaagtttatatagtaaaggcccccgccggatgctccacgtgaggatccggagggggtctttgtttgtcttggcttgttatattctgcgggcttgcaaatgcctgcagtagatagggaagttaaaaacataccgcccgttcctaatcggagccggacggtgagaagtcagcatcggaaggatgccttattaagaatctttcgttactgattctagcacaggtgtttgctacttctgcaagtgcttcacataaaaattttttttgcgcttttgggggtgagaatgacggtttcgaatgcgtatatggcgtagtcaggttattgttagtctcagatgagcgcaatgatgcttatcaagagtgcaatgtctgcacttgattgcaatcactcacaaaggagtatgacatgtccacggacatgaagaactaccgtatcggtgttgatgtcggtgaccgctctgttggtcttgccgctatcgaatttgatgatgctggtctccctattaagaagttggctttggtaactttccgccatgacggcggtttggatccgacgaagaacaagaccccgatgagtcgtaaggaaactcgaggtattgctcgtcgtacgatgcgcatgaaccgtcgccgtaagcagcgtctgcgtgacctcgataaggtacttgagaagctgggttacaccgtgccggaagggcctgagcctgagacctatgaggcgtggacctcccgtgcgctgctggcatctatcaagctggctagtgctgatgagctgaatgagcatttggtgcgcgctgtgcgtcatatggctcgtcaccgtggttgggctaatccgtggtggtctcttgaccagctggagaaggcgtcgcaggagccgtcggagacttttgagattattctggctcgtgcgcgtgagctgtttggtgagaaggttccggttaacccgactttgggcatgttgggtgctcttgccgctaataatgaggttcttatgcgtcctcgccgcaactacaacgcgaaggaagctaataaccctaagaaggctgggaagtacctggctgattacggcactcagccgctaatggccgcgaaggtgcgccaggaggaccagctggctgagctccgccgtatttgcgaggttcagggtattgaggaccagtatgaggctcttcgcgaagctgtctttacgcacgtgcgtccctacgtgccgaaggaccgcgtgggtaaggacccgctgagtccctccgaaatccgcgcaagccgcgcctcgctggagttccaggagttccgtatccttgattcggtggcgaatctgcgtgtacgtaccgattcccactcgaagcgtgagctttccgaaagcgaatacgataccgcagttgatttcctgatgtcctacacgggtaaggaacagccgagctgggctgatgtggctgaggagattggcgttccgggtaaccgtcttattgccccggttcttgaggatgttcagcagaagaccgcaccctttgaccgttcgtctgcagccttcgagaaggcgatgaacaagaagacagaagctcgtcagtggtgggaatcgaacgatgatgaccagctgcgcagtctgttcattatgttccttgccgatgcaacggacgacactgcagaagccgcggttgaagcgggtctgtatgagctgtttgagagctggtctgaagaggaacgcgaagctctttctaatatcgccttcgaatctggccgtgcaggatatagtgcgacgaccttatctaagctgagcgagtacatgcacgaacaccgtgtgggtcttcacgaggcccgcaaggctgtcttcggcgtggacgatacctggcgcccgcccctggctaagctggaggagcagacgggccagcctacggtggaccgtgttctgactattctgcgtcgttttgtgctggattgtgaacgtcagtggggccgcccgcaggcaatcactgttgagcatgcccgcaccggcctaatgggtcctgctcagcgtcaggatattttgcgtgagcagaagaagaaccgtgaagagaacgaacgtattcgcaacgaactgcgtgagtctggcgtggagaacccgaagcgtgtggatgttcgccgtcacctggtgattcaggagcaggagtgccagtgcttgtactgcggcacgatgattacgacgactacttctgagctggaccacatcgtaccgcgcgctggcggcggttcctctcgtcgtgagaatttggcggcggtgtgcagttactgtaacgggaagaagagcaacaccccattctaccgctgggcttccccggagaggttcaaggagactattgaccgtgtccgccagttgaaggcctttaaagaccccaagaaggcgaaaatgttcaagaatcagattcgccgcctcaagcaaactgaggctgacgagccgattgatgagcgctcgctggcttcgacttcgtacgctgctgtggcggtgcgtgagcgtttggagcagcattttaatgagggtcttgcccccgatgacaagagccgcgtggttcttgacgtgtatgcgggttcggtgactcgtgagtctcgccgtgctggtggtattgatgagcgtattcttctgcgcggtgagcacgataagaaccgttttgacgtgcgccaccacgcaattgatgcagcggtcatgaccctcctgaaccgttcggttgctttgactctggagcagcgtagccagctgaggcgcgcgttttatgagcgggggctggataagcgggaccgtgatcagctgaagccggaagaagattggcgtaactttaccggccagtacaaggcctcccagaggaagttctccgagtggaagaaagccgctaccaagttgggagacctgttggctggggctatcgaggacgactctattgcggtggtgagccctctgcgtctgcgcccgcagaacggtgcggtgcataaggataccattgccgcggtgaagaagcaggctttgggttctgcttggcctgctgatgctgtgaagcgtattgttgatccggaaatttaccttgctatgaaggacgctctgggtaagttgaaggagcttcctgaggattctgcccgctcgcttgaattgccggatggccgctacattgaggctgatgatgaggtgctgttctttccgaagaatggtgcatcaattttgactcctcgtggtgtggctgagattggtgagtcgattcatcacgttcgcttgtatagttggctgacgaagaagggcgagctgaagttcggtatgctccgcgtgtatggtgcggagttcccgtggctgatgcgtgagagcggtagccgtgatgttttgcgtatgccgattcatccgggttctcagtctttccgtggcatgcaggatggtgtgcgtaaggcagttgagagcggcgaagcggttgagttcgcctggattactcagaatgatgagttggagtttgatccggaagactacatcgctcacggtggtaatgatgagctgaaccggcttcttcgggttatgccggagcgccattggcgtgtggatggcttctataatgcgggtactttgcgtattcgcccggctttgttgtcggctgagcagcttccttctgagctacagaagaaggttgatagtaagactctgagcgatgatgaagctgttctcctgaaagctgttgagaggggcttgtttgttgctattagtagcttcttgccgttggagagcttgaaggttattcgccgcaataacttgggcttccctcgttggcgcggtaatggcaatctgccgacttcgtttgaggttcgttcttcggcgttgcgtgctctgggtgtggaaggctaggagagcgtgatggatagtaagtggcgtgttcttgatttcactgcctatgagggtttcctgtcgtatgagagggggcgaatcgtggcgggggagcggagcacgccacttgctgaggtcgattttattctcctcggtatggggtgctcctggggctacggtttagtggctggcctggaacgttttgatgttgctgccgcgatttgtgattggcgtaatcagccgatttctacgttgtatcactggtctgagaatacgaaggtgtttactcgtcatgaggctcaggctgagttgagtgtgccgcgtgcgaagaatgcgtggatgcagattgtgaaggctaagcttcgcggtcaggcgaattgtcttgacgctatggggcggcagggcgcagcggatattcgtgcgttggctcgttcggtgcgttctggtgacccatcaaatgctgaggctcagggggcgcgcctgtattggggtgagttcctcccagagcaggggttccgtcgccagcagctgtctgatgatgtggtgaatggcatgctcaattatgggtacacgattcttcgcggcagggttttgactcgtgtgattgctgcgggcttgtgccctacgctgtcgctttttcaccgtcatcgttcgaatgcttttgcgttggttgatgatttggtggagccgttccgtcctgctgtggattatgcggtgtatcagttgatttctgctggttctactgagctgggtcgtcgggagaaggcggctctggttcaggtgttgtcttatgcggtgaatgatgattcgccgtttaagctccgtactgtggtggaggatttttgttctgagtttgctctctatgttgagggtaggcgtgataggttgtcggttccggtgtgggagctgacggctgctgaggagttgcgtgaggatggctgatcctgtgtggttaatggtgatgtttgatttgccggtgaagacgaagagcgagcggaagttggcgaatcgttaccgtcatgttctgctggatttgggttttgatcgtatgcagttgagtgtgtatgcgaagtactatctgaatgggaatgcgacgggttctgatttgttccgtttgcaggttgaggttccgccgggtggcgcgattcgtattatgcgttttacggatgctcagtgggctgggtcgattcgccatttggggccggaggtacagcagatggaggagaagccggatgctttagatattttctagaaggtgttcgtaatgaatgagccggtggggcaacaaccatgtttggtcgctgccccgccggctcatttttcctctcggatctcgtctagagacgagcttcgaagcaggtatggggcagtttttcttgcgaaaaactaccccatttatgcccctgactaggggaaatacttgattacgtaagtatatcaaggtgaataatgaaagattctcaacaaatcaccagaagatgagatgacgacgataagtatatcaaggtgaataatgaaagattctcaaccctgagcgattgacgtcaatgccggctttaagtatatcaaggtgaataatgaaagattctcaactgcgtttgcgcgggtcacggtagggcaataagtatatcaaggtgaataatgaaagattctcaacagaaaacccatagtggttacctcctctttaagtatatcaaggtgaataatgaaagattctcaacaaggctttggggtggcgcgagtggtagttaagtatatcaaggtgaataatgaaagattctcaacagtctactgatggtagctcgcatgtgaataagtatatcaaggtgaataatgaaagattctcaaccgtccgtacagcattccacagtagaaaataagtatatcaaggtgaataatgaaagattctcaacggccagcctgacgagtcatcaagatcgataagtatatcaaggtgaataatgaaagattctcaaccctgtgagagcgtcaaatccaacgcccctaagtatatcaaggtgaataatgaaagattctcaactacacgtcatctgctggtttcccgcatataagtatatcaaggtgaataatgaaagattctcaacttcttcttgctcttagaacgcctcggcttaagtatatcaaggtgaataatgaaagattctcaacaatgcccgaaagtacccgcgcaggtgggtaagtatatcaaggtgaataatgaaagattctcaacatcgtggctgatgcatcagctccaggcttaagtatatcaaggtgaataatgaaagattctcaacgcttcctttcggtttgggtctttcgtaataagtatatcaaggtgaataatgaaagattctcaacctcgtccgagtcagagctcaccccgcagtaagtatatcaaggtgaataatgaaagattctcaacgcggcacgctgcggaagaccgtagatgataagtatatcaaggtgaataatgaaagattctcaacatctggatgccgtaggtgttgccggtcttaagtatatcaaggtgaataatgaaagattctcaaccgacgtgagttacagcgcctgtgtgctgtaagtatatcaaggtgaataatgaaagattctcaacgggtttgtcggttgttgccttttgctcgtaagtatatcaaggtgaataatgaaagattctcaacactctagcgcgcggttttcggcttccattaagtatatcaaggtgaataatgaaagattctcaacggcggccaggtcagcagcgaggcgcgcataagtatatcaaggtgaataatgaaagattctcaacgatttgctgtcggctgcaccggttggtgtaagtatatcaaggtgaataatgaaagattctcaacggcacgcggtagatgtgccgggcgatgataagtatatcaaggtgaataatgaaagattctcaacggttgaactctacgccgtcgcgttcccataagtatatcaaggtgaataatgaaagattctcaaccggtactacacgctgggctaaggttcgctaagtatatcaaggtgaataatgaaagattctcaaccggattcctcactaggggcaaacgcggctaagtatatcaaggtgaataatgaaagattctcaacatgaatatattgttcaacccgtttctactaagtatatcaaggtgaataatgaaagattctcaacgcgacgcactatcacgattcccgatcagtaagtatatcaaggtgaataatgaaagattctcaacgaattttaccgatattgaacgtaccagctaagtatatcaaggtgaataatgaaagattctcaactgcatcatagcctgaacgtgacgtcaattaagtatatcaaggtgaataatgaaagattctcaactaattcaggcacttacgaccgcaagtcgtaagtatatcaaggtgaataatgaaagattctcaacagatgcgttaactagccttgatttaccttaagtatatcaaggtgaataatgaaagattctcaactttccccggtctttgcggagcttacccgtaagtatatcaaggtgaataatgaaagattctcaacattggtcgttgctgccacggttgaagagtaagtatatcaaggtgaataatgaaagattctcaaccccgattgcgtggtttgtggacggcatttaagtatatcaaggtgaataatgaaagattctcaacgagtggagcgcgcctgatggtgctgacctaagtatatcaaggtgaataatgaaagattctcaacaaaatgaccggatacattggcaccccggtaagtatatcaaggtgaataatgaaagattctcaacgtgtccccggcagataccggcgcggtcgtaagtatatcaaggtgaataatgaaagattctcaactgaatgaatacactgcgccgcggcttcgtaagtatatcaaggcgaataatgaaagattctcaaccggtccagctagcagtcggcttctcggttaagtatatcaaggtgaataatgaaagattctcaaccaatctgtcgggtgctcatggccacccttaagtatatcaaggtgaataatgaaagattctcaacgtacgacgaaatggtcgttgtggcttcctaagtatatcaaggtgaataatgaaagattctcaacggatatttgggcgcatcaaattacagcctaagtatatcaaggtgaataatgaaagattctcaacctgacacgtcacggttcaaggctgagactaagtatatcaaggtgaataatgaaagattctcaaccaaggttagccaacttctttaggcgctttaagtatatcaaggtgaataatgaaagattctcaaccgccacaggttttgtccgtgctggcatctaagtatatcaaggtgaataatgaaagattctcaacggttctggtcaagccagcggtcgatgactaagtatatcaaggtgaataatgaaagattctcaacggtgctggagagtgccgccggtgggggctaagtatatcaaggtgaataatgaaagattctcaatgctccagcacaacagagaacgcgccgtataagtatatcaaggtgaataatgaaagattctcaactttcggtgagcttgcgttcgttctcgactaagtatatcaaggtgaataatgaaagattctcaacaccactgcacattccttgccgccgcaggtaagtatatcaaggtgaataatgaaagattctcaacatgttcgtgagtgtgtgttcggttaatgtaagtatatcaaggtgaataatgaaagattctcaacttataagcgtactcaatgcctgcttccttaagtatatcaaggtgaataatgaaagattctcaactgcatgacgttcttgatgtgacgggcgctaagtatatcaaggtgaataatgaaagattctcaaccgcagatgctgcgttccatcagacgttgtaagtatatcaaggtgaataatgaaagattctcaaccgcggcacgtgcgtatggctgcgcgccgtaagtatatcaaggtgaataatgaaagattctcaactaaggaagtggaggctctgcacttcctctaagtatatcaaggtgaataatgaaagattctcaacacgccgtcgatggttgcgataccgtcgttaagtatatcaaggtgaataatgaaagattctcaacccgccgtgaacgtggtgacggagaaggctaagtatatcaaggtgaataatgaaagattctcaaccaggtgaatttggggcagcggacgctgttaagtatatcaaggtgaataatgaaagattctcaacggctgagttttcttgccctcgcgttccttaagtatatcaaggtgaataatgaaagattctcaacagtgcccgtctcgcatgttatcggggcctaagtatatcaaggcgaataatgaaagattctcaacggggcgcggcaaggaagccatcaaaagataagtatagcaaggcgaataatgaaagattctcaacatgcctccacactagcaccggaggacattaagtatatcaaggcaaataatgaaagattctcaactgatgggttcttcgatggggaagtcggggtaagtatatcaaggcgaataatgaaagattctcaacgacgcgccagcgagacgtgtaccgcctgtaagtatatcaaggcgaataatgaaagattctcaactcacacctcatgcacccagtaagtcaggtgtggtaagtatatcaaggttggttgtaaaacgctctcaggcaggggtgggcgagagtagggtgtgcattggggtcgaatcaaggtgatttaaggaaaataatatatcgaaagaataaatatttgtatttcgatctattttggataatgaaacagggtggactacaagaaatagtccaccccgcaaataccccgaagggtgtgcagtgaaatatttaagtaataaaaatatgattgaaagattctcaacattctacaacttatcacatagcacattgcaattatagcaggagtatatgtagcttttctagttcccatatctttttggggagtagttggaagctggtatttttacgggaataaaacttggggaaattatctgatatgtagccaataaacttcttgaacgataaataaatctgaaaaatctatcaatataaagaattgccgattcattagattaatctaataaaacgcaactataaagaatagagagggaggggccctccggtcgtattgccggagggcccctccctctgtgtatcgttcagcggatattcggtggctagtgctctagcgcgctagcgtacccgggggagtacccctacgccgccgccgctacagctcccttggctgaggtgccgtttcgggtccagagcaggagcgctgccacgctgttgatgatgtagaagatgtacttgccgacgttcgcgaagttgccctgagtcagcgccttgatgcactgcacggtgttgtacacgaaccagaattgccactgcatcgtgagcttgagcgcgttcagaatgttcgctgacagggacaggccgaacactacggtcgtgatccagaacaggaacgaggtctggccgccgtaaccgacatagttcgctaccagggagaacgcgaacgaacccgccacaataccgccaataatcagctggcccttcgtgccggtcggcggttccatcgccttgccgcgttcggagttctgccacctacgaatcgcgaaggtgtacacgataaaggtcaccgggtaggtgatgattgctgccttgttgcccagaatgtagtcgatcgctccggacagtgccgtgttaataatgccgagcacgttgccaacgtttgagaggcggccggtcaggcgggtagacatcattgaaatacccacgttaatcacggaaatcacgccgagggggatgaagctcgtgatcgggccccagtcaacgtatttggcgaggttggtgctcaggtatcctgaggcgattgcgatggcgatgaccagtgccacgccgaagaggtcggcgtacttggacttggcgaaaaagaggagggccttctcagagaattctttggcctccataggtaactcctttgttaggatatagaaacagtgatagggtaccaataactataactctttgaaaagggtttgaaacggcgtgtcgcacacaaaacctcagaaccccacatattccacatcccggaacacttcggcgtagagcaattcaaagccgccccatcaagaacccatgccaacttccggcaaacgttgccagataacgcccctacttcgttgaataccgaaaatgggcgtaaaatcaccgccgtttcgtcttcgctttaaacgggaccttaaggtacgctagatgactgggtcagggaactcgtgccggtctcactcaccgcgcatccgcccgacagacacccgcaccccggcatgctgcgtctcactcacgcacacaggggagggaaccaccgtatcggcctcactcaccgtttacgccgctgtccgcgcgtcctgccacccgtaactcactcaactcaaacaagaactgaataggacaatcatgcccttgattaaccatcgattctcacgacgattcttcgtaaagggtgcttctgccgcagctgccgcaggcgcactggccctgcaggcacaggccgctcatgcagacgaagctcccgcaaaccttgccccggcaaccgaggaaactaaaggcccgcgcctcgttattcagcgcgccaccatcaccgaaaccggtatgaccgtcaactacactgcacacggtctgcgcgaattcctcaccgaaggcaccaccctgaccgtacgccacggctacgttcgtaacgactctttcgaaactctgcgctcctggccgctcacccccgaattcgatggtgacgctgacagcttcagcggtagcgaccagttccccatcgagctgatgcagggtgagggtgttgatcacgccctgcagctggatatttgctccgacccgtggggtcaggagatcacccaccagattgctgcgcgcatccccctggctgagaccaagatcctgaagacttctttcgaggatgttccggataaccacccgttcgctgaggatatccgcatggcgaaccagaagaagtggctgatgccgaacccgcagactggcgcgtttgagccggaccgcccggtgacccgtgaggagcttattgctctgctgaaccacgctgctggtcacgctggcgtgagcgaaaactcggatgttgcacccttcgcggatgcggcaggccgcccgaccgcgaacgcgctgcactgggctcgtgaccgcaagatcaccgagccgctcactggtggcgacaagattgacccgaccgcaccggtttctcacgaggagctggcggctgtgctgttccagtacaacgcggaggttcagctgaccgaaatgaaggagggcgctggttctcgtttccgtgacgttctgggtgcgggtactctgcaccgttacgttgcgtgggctggcgcgaacgacatcgtgctggatgcttcgggtgtgttcaacccgaccgcgccgactactcgcgcggagctggctcgtttcattcgccgctacaagctgcagaacctgctgttcactgacttctcgtatgtctcctaatttttagtcaccccggcaccgtgtcacttcggcactgtgtattggggtgtgtggaacccccgtcttctggctttgctggaggcgggggttttgctgtgccccgttgcgcctcgctgttatattgccgcacctcgggggagttttagtgacaggctgtgcctggcatatgaaattttgcgtcatatatacctgaaatcttgaaaaatcctgtgcgctaagtaagtattacctagaaggtaagttaacggttgccttacttaatactgtgtgaagactagtttccttcctcgtgggcccacgaaacccacaccagagagcaggaaaaacgcggtacctcaccacccatcggtgggggagagacgcacctttacacaccacccacgaaaaaggacatacatatgaacctcgcttcgagcaaggcattcaagggcctcgccgttggatcgctggcactggcaatttccggcgttgccaccatccccgcatcgttcgcggcagaatccaccccggcagcaagccagagcagcgacgctcgcaccatcaccgacaaggcgatggcaaagatcacccagggcttgcccggtcagttccaggtctcatactccaagaagaccaacaagatttgggttgctggcactgcagaccgcgacgagcacgtttctacgattgctcgcattgacgcaaactccctgaagattgaggcagtcgccgagctgcccattatcaagggggactcgggctactcctacgagggtgcgtacggtatcaccgtcgatgacgaggaaggtaccgtgtgggtgaccagcacccgcgataactccgttgccgtatacgatcaggcgaccatgaagcagttgtggaccaatgcgggtctgagcaaggacgacccgaactggatcgagcacccccgcgaggtgcgtgtcgatcacgagtcgggtaaggctttcgtgaccggtcgcttctttgtctcggctatcgatctgaagaccaagaaggtcgagaagattcagcttgagggcgcgcccgatggcggtacccgctacatcagcatgaacattctggtggacggcggtaagctgtacgtgcccgaacgcaccggcggcaaactcttcgtgatcgacaccaagaccttcaaggtcgagaagaccatctctgtgaagggcgataaggacggcgaggttcgcccctccgacgtggctattgaccactcgcagaacgaaatttacgtctcttcgcagggcgtgaagggcgagaactccggtgtatccgtgtacgatgcgaccacctacgagttcaagaagttcatccccttcggcacccaggcgctctcactcgataacgatgaggcgaacgacctggtgtacgtctctgacttcg

SEQ ID NO: 3631 - DNA, 14930 bp, synthetic construct
  variation 1879..2197: note = note, n is a, c, g, or t
  misc_feature 1..14930: note = Synthetic
  source 1..14930: mol_type = other DNA
cctcagcctgccgtcagccacagcggcctgcaactgcgcgccgccctgctcaaataccagcacactggcggctacaatgcccaagaaattgctgcccaagaggctgccctcggggtaagcttcacccccgatttcaagttttaccggtccctggtcaaggagggcctggtagcccactacctgggccaggaggtctacgcttcaccggctgaggctgattttggtgcctcccagattccggccggcagccccctacctgccggcggggacgccgctgttcagggcctgctgacccatagactctgggtagagtttgcccacagcgaccagcagctctttgccctagattttgccccggccgcccaggggcaagtgggccaggtactagcccgccagaagggccaggccagcctgccggtcaaggtcgctgattctctggccgacttcattattggggtagttcccgcccagcctgcaccggttactgctggacgcaaacccgggcagaccctagcctgggctggtcaggtggaggctgtggccctgcctgctctactaggttggacgctggcccccagcaccgtctaccgtctagaggaagaccaggagcctgaagagcaagccccgcttgaggagccagtagcccccagctcggagacccaagcagagggcgaatctgaggcttcaaccgttcagggtctcttctcagaacccttggctgaagaacctgctcttggctacctagcggttgaatctcaagaagccgctgaggtagaagatgagccgggcaccagccgtcctcaggtggcctccctggcagatcaggtggcttctttggctacctcacccatcacccaggtatcagttccccagagccccctggagccagctcagcctgctactgcttcactggcccagcaggaagctgccccctcccaggaagcccaggacctagaccccggagtggcccgtaatccactttctcccgagcagcaggccatggcccagtcgatggctaccctggccttcggtagcaaggaggagcgggaaccctattctgaccctgaaagccctagcccccgccacaagctagctagggaagaagagagccaggtaccccaggaagagcctagtgagcagggcaagctggtttctgccctccgcaaatttttcattggtgactaggggaaagggcaggctagctcttccctctaggctggtcagggcctagactgcctagagtagacctagacaaggagagaccgtggcccgtattccccgtgactcaattggtagcacccccctagaggtatttatcccagccccgggcgccaacccggctgaccctcaggacgcccagcgtcaggccttcctggaggaggcccagcagctgctagaggctggcctggatatcgctgtctactctcccgagagctacccgtcagcctttaccgactgtgagccggttgctgaccagctggccatgagcggccaggaggttctgcctatcttgctggtggagggcctggtcaaggtctcttacatgtaccctacggccgagcagctgcgccgcttttcccatttccagcagctcaagcccaaggagccggttaatgctgccgctgccgcctgtggtggtggctctgaccaggctatgactgcccccagtctggaaccggctggttttgcagccgtgctggcgggtgtcaccccccagcctcagggtggccctgacatgggtggacgggtcaacctcttgggcgctgctggcggggatgctggccagggtggaggctgctgtggtggttcctgcggctgcggtggccactagctccctatgaaccccaccagataggctgaggccccctaccaacttagnnnnnnnnnnnnnnnnnnnnnnnnnnnnnnnnnnnnnnnnnnnnnnnnnnnnnnnnnnnnnnnnnnnnnnnnnnnnnnnnnnnnnnnnnnnnnnnnnnnnnnnnnnnnnnnnnnnnnnnnnnnnnnnnnnnnnnnnnnnnnnnnnnnnnnnnnnnnnnnnnnnnnnnnnnnnnnnnnnnnnnnnnnnnnnnnnnnnnnnnnnnnnnnnnnnnnnnnnnnnnnnnnnnnnnnnnnnnnnnnnnnnnnnnnnnnnnnnnnnnnnnnnnnnnnnnnnnnnnnnnnnnnnnnnnnnnnnnnnnnnnnnnnnnnnnnnnnnnnnaggctgaggccccctaccaacttggtagggggcctcaaccttttccatgagcccgccgagctaggccagctagaggctagatgaccgcgctacgcagggcccggatagccacctgcaggacggccaggcgggggctgccgtccttagccggagcagcctgctgaatctcctgcaacatggaatccacgcgagaaactcgaaccgggtgctgaccaacccaggcctccagggcctggtctccgctagcagaagcaccagcatccgcctgaacaacgttcagagccagggaggcagtgatctcgtagagggagtcccgcagagaggagcgggccagggtctcccagcggtcgttgcggggcaggcgagaaatcgtggtcagcagctcgtccaccttgaagcggtcgtagaccgagtagtagaccttagccacgccgtcagtctccaggtcgttagcccgggcaatacgcaccacatccatgagagcgaaagcctcaaagctacgaacccagctgaccagcagctcctccggcaggccccaggactcagccagggcacggcgaccctgagcccgggtgcgggtgccctcagagaagtactggttgagagaaggaatcagctcggtcacaggcttgaaacggtcaataatctcggccaggggcaggcccgccagaatagaacgctcagccaggaaccagcgggtcaggcggtccaggattcgctgccagtcgcgaataacagcctgccagccctctagcggggtagaagccggcagatcgcggtgcagctgggcagagcggtcaataccgaatgtttcacgggaaacatagaaggcccgagccagagaatcaaccccaacaccggtctcttccagggcacggaagacataggtgatgccgcccagattaaccatctcgttagcaacccgggtgcagataatctgcttacgcagggggtggttacggatctcgtcaccgaagcgctccaccagggcaggcgggaagtaatcctccagcacagactccaggtaggggtcgtccgcaatatcggttgcttccagctgctcagtcaggtgaatcttgacgtaggcagccagcacagccagctcagggccggtcagggtcttaccggtcttagagtaacgcttgcgaatctcctgatcggtgggcaggaactcaacctcccggttaaggccagcctcccgctccagctcctgaatcaggcggatgtaaacctcaacaccgggcacaaccccgtgccgctcagcctgcagcaggacgttctgctcccggttggtcttgagcacctgctggccaacctcttcacgctgggcctcaataaaggcggcccgctcctcggcgctgagcttaccggcgctgaccaggcggtctaccagaatcttgatgttcacctcgcggtcagaggtctctacaccagcagagttatcaatcgcatcggtgttgagaataatgcccttgcaggcggcctcaatacggcccagctgggtgaagcctaggttgccgccctcgcccacaatccgggcccgcaaatcgcggccgtccacccggatagcgtcattggccttgtcgcccacctgggcgtgagtctcgctggaacccttaacgtaggtgccaataccgccgttgtagagcaggtctaccggggccttaaggatggcagatagcagctcggtgggggccagctcggtgacgccctcctccaggcccagaacctcgcgtacctggggtgagaccggaacagacttagcgctacgggagtagacaccgccaccctcagaaatcagctcagggttgtaatcagcccaagaagaacgaggcaagttgtaaaggcggactcgctcctggaaggagacctgagcgtccgggttgggatccaggaagatgtcgcggtggtcgaaggcagccaccaggcgggtagcctcagaccgcatcagaccgttgccgaagacgtcgccgctcatgtcaccaataccaaccgcggtgaactcctgggtctggcagtcctggcccagctcagcaaagtggcgcttgactgactcccaggcgccgcgggccgtaatgcccatagccttgtggtcgtagcccacagaaccaccggaggcaaaagcatcgcccagccagaaaccgtagtcggcgctaatagcgttagcagtatcagagaaggaagcagtgcccttatcggcagccaccaccaggtagtagtcgtcgccgtcgcgggccaccaggcgggggttacgtaccagggtctcgctgccatccgccccaatgctcagattgtcggtgacatccagcagagaggcaatgaagaccttgtaggactcgcggccctcagtaatccaggcgtcgcggtcgacggcaggattaggcaggttcttgggtacaaaaccgcccttagcgccggtgggaataataaccgagttcttaaccatctgcgccttgaccaggcccaggacctcagtgcggaagtcctcgcggcgatcagaccagcgcaggccaccacgggccaccttaccgaagcgcaggtgaacaccctcaacccggggtgagtaaacgtaaatctcgaagagaggacggggcaggggagcgaaatcaatctcgcccggggccactttcagggccaaggacggacgatccaggtaggcgttagtgcgcagggtggccttaatgacggtggccaaggcccgcatgaaacggtcaacgtccagggtaggaatctgatccagcacagcggtcagctcctgccagacctgctcacgggcctgctcacgctcctggtcgctggcaaaaccggcgtccgggtcgaagctggtgctgaagtagcgggccagcaggcgggaagcctgagggtagccgaccaggctgtcagccatgaaacggttggtgaagacctgacccagctgcaccaggtagtgggtgtaggcccgtagcacctgcacctgccgccagtctaggccctcagccagaatcagacggtctagggtgtcagactcacgctgacccagcaggtaggcgttgagggcgtcctcgtagagaccggttagcttctgctggtcctggctgccctggggcagctcaacaccgaagtcgtagagccagtagctggcgccaccctcgggggtcagctggtagggcttctggtcgatgacggtcagacccatattctgcatgatgggcagaagctcggtcagggtatgggctgccgccaggtaggtcttgatgcgggtgccctcgctaccttcctcaatacggatggcagcgggcttgctggggttgagggattcgaagatggtgatgtcttccacggcgttgtgtacctcgtaatctgctcggtaggtcatgggcgcagcttccgcccaggcgcgggcctgagcaatcccctgctgggggctgatgccggctgctgtggcggcatcctgtagggcggtggcggttgcctcgccccatgagcgggccgcctcttggagacgacgctctaggtcttggtgattaataataggcaaagcttgcgggttttgcaggcgaatccggaaaaatattctggccaaagaagaagtagacaggtaggtctgatagtcaatgctgtctgcccccatggcctccgtcaggacggcctccagccgggtacgcacccgcgtgttgtagcggtcgcggggtagaaatactgttgccgtaataaaacgtccaaaagcgtccgggcgaataaagagacgagtagtgcgacgctcctcaagaccaacaattcccaaaaaagtttgggttaattcatctaaactggcctgaaaaagttcaagtcgcggataatcctcaataatactgaccagggttttatcagaatgagaaccaggctgataacccaggcggttacgaataatagccacccgctcgcccagcagcggagtctcagaagccggtagggcataggcctgacgagagaaaaggcccaaaatgaggtactcacccagaatctgtccagaccggtcaaaacggcgaatcccaatataatccaggtactcgtgccggtgaatccgtgaacgactattagccttcgtaatgtagaggggcttaggttgcagggcccgatcccgctcctggccggtcagaaccagtggctcctgcctgccctgccgtagaagccccaggccagaaccgggacgatcagccagggccagctgctgggggccactggtcagaacccgttccttgatgcccataaaaatgaagttgccccgggttagccagcgcaaaaactcctgcaccgactcaatccgctccatggggtcaataatgccgcggggagtatcccggtagtagaggtgaccgcccagggtgacaccgcccagctggctgagggaatcagcaatatctagggtgcgctcaagcatggcccggccgtcctgggctaccgtgtgaacctcagccaacagggtttgcatctcttctagcagggctgcttcctgagttgggtttaggtggctggctaggcgaaccgtaatccaggactcaacccgggtgttctggccggacggcagcttctgcaaggtcggtagggtggcagtatcgccactagccaggggcagggccaggccagtgctttctaggctgaccagctggccagcctggtcgcgtcctaccaggaaagtagggtgaatcaggccggcaataccgccccactgggcggcaatctgggcggtgacagaggaaaccaggtagctggtgtcatcaacaacaatgagcagggtgctgctgccgctgggctccttatagagggtgaccagggcctggccgggctggcgaacctgggctagctgccggtgggcctgagccagctgggtactttcctgcggggtgaggccctgaagctcatcctgggaggaatgtaggtagtagtcccggatccaggactgaggcccggcccagtctctctctgctggccaggttgggctctctcctgtctgcattatctttgcctttctggtctgtcacgtcctcgtgagtcaccggcccgcctcctcgcggggttacaccatcatacccctttaagtgtgacatgtggcctaagacatggcctatttgagctattgaaggtggtagttctttcgctgtctcacctgataaacaccttcttttctcctcttctgctggcccttatactgaaacaaacacaatcgcatatatagccacaaaccccaacatgagatctggagaaaaggccatgcaaaacctccaagaggcagtcctcgcaacctacaccagctacctctcccagctaggaaaaacccaagaagcccaagcagccaaccaggccctcacccagaaccctgaccttgccaaggcaatcttcaggatcttcgatagcagcttcaaccctgcccataactccagtacccagcacagaactcagacggcccaagctcaagcccacgaaattattgcttccctccctagccttcaggacgccacccagcaagaagccctcaaaaagctcattacctgcctcctcgccaccgtccgaaccaacgcctaccaaaacaagcagactatcgctatcaagctagcaacccgtcgcatccccttcgcgcccctccccaagccactctttgaaatcttcgtctccggccccgatttggaaggcatccacctacgcttcggcaaggtagcccgcggcggcctgcgctggtctgaccgtcctcaagactttcgtaccgaggtgctgggcctagttaaagcccaggtcaccaaaaatactgtcatcattcctaccggctccaagggcggcttcgtccccaaaaacctacccgaccgagaccaagaaccagagcgctaccagcagatgggcctagcagcctacaagctcttcatctcctccctgctagatgtcaccgacaacctcattcaccagcctgacggcagtcaccaaatcatcaccccccaaaacctggttgccctcgacgaacccgatcactacctggtggttgcagcagacaagggcacggccaccttctctgacaccgccaacgccattagcgccgactacggtttctggctaggtgacgctttcgcctcaggtggctctatcggctttgaccacaaggaaatggggatcaccgcccgcggcgcctgggaatcagtcaagcaccacctgggtgccctggggcaggattcccagaagcaggacttcaccatgattggtatcggcggtatggccggggacgtcttcggtaacggagccctgctctccccacatatccggctgctcggagccttcgactcccgccatatctttgtagaccccaacccggatgcggcgagctccctggcagaacgccagcgcctcttcaacctgccccgggcctactggacagactacaacccccaactgatttcagaaggaggcggtgtctactcccgtaaggaccccgcaattcccctgactgagcccctacgccgggccctagacctagctcatgcaggtgagaccatcagcggtgaccagctcatccgggccctgctcaaggcccctgctgacctgctctacaccggagggaccggcacctacgtgcgagccagcgacgaagacaacaagcaggtaggtgaccccagcaacgaccacctgcggatcaccgcccccgaactgcgggtgcggctcatctcggaaggcggcaacctgggcctgactcagagggcccgtatccaggcagcccagcaaggaatcctggtcaatacggacgctgtagataactcggcaggtgttgaaacctcagaccgggaagttaacctcaagattctgctgcaaagcgccctccaagctggcgaactgacagaagagggccgggaggctttcatccaggagcaggtagaagaagtagggcagcgggttctggcctctaatcgagaacagaacatcctgctctgggctgaacgggtgggagcctttgagaccaaccaggtagctgacggcttcatgacctacctggaagaagcagcaggccttgaccggtcggtagagttcctgccggataaccagcaactggcccagcgagctgaggctggacaggaccttacctcacctgagctctctgtgctcatggcttacgctaagattgccgctacctccgccctgctgaaggacggttatgcagatcagcctgacctgaatctcaccgatattctagaggattatttccctggaacagccactcaacgttttgggcatcactttgataggcatcctctgcgtaaggagattattgcaacccgggccgctaatagggttattaaccatactggtattactttcttttatcagatgcaacaggaatttggcgcctcagctggccaggtagctagggccttccggcaggcccgccagcagatgggatccctgccacatattccctacaccggggatatccaggactgggctaaacaggcaaagagcctgcgtcaggcaacagtaatgatccttcaggagatgatggcttagggggtctccttcgactttcctgctgcgattaccggcagttttagccttttgcctggttcgccttgactaactctacggtcagctagggtaaagccccccaagttcttctggaagctggggggcttaccttgtacttggggcgcggagattatctaactcacgatttttataattttaaataaaaagtggccgagtttggataagagcattttaagctagccacgccgagaatatgctgtggtttgcgtctagtttgggcatatacttggagggaactccactactgtcctggaggaggcagtcatgactcaggaagctaccaagtatcgcattggcatcgatgtaggagaccgctcagttggccttgcggcctttgagtttgatgatgccggttttcctcttcgcaaactagctatggtgacctaccggcatgatggcggtctagatcccactcagaataagagtcctaagtcccgtaaagaaactgcgggtgtagcccgtcgggtgagacgtctgcggaagcgtcgcaaggaaaggcttaagaagcttgacctgaaactgctagagctcggttatcccctgcctgaaggggaagaggctcagacctatcaggcctggaagtcgcgtgccctgctcaccagccaaaaaattgaagataaggcagagcaagcagaccacctagtgcgagctcttcgccatatggcccggcatcggggctggcgtaacccctggtggcagtttgggcagctggattcagctcctgttccttcagagaccatggtggagaatcttaaccatgctcgcctgctttggcctggttatattacagaccagacaacggtgggagaactgggttccctggctgcttcacctgatattctgcttcgcccacgcaccagggatattaagaagaagcccaatggtctacaccaccaggaaggcgtcagggcagttctgggaagcaaggtacgtcaggaagacctgcttgctgaggtgaaaaagatatggcaggttcaggggcttccagtctctcactatgaggagcttgctcgcgctctctttgagcaggttcggccttatgtaccagcccaaaatgtagggcgtgaccccctgcccggccgtcaccatctgcctagagcccctcgtgcctctctggaatttacggagttcaggattaggcaggctgttgcaaacctgagggtaagggagggacgagaaaaggttcctcttactagcggccagcacattgcagcggtcaactatctgatgaattacgcagataaacagcctcctacttggggcgatgtggcagaacagattggggtggagcccactcgtctagtggctccggttatagatgatgtgcgccttaataaggcaccctataaccactcgacctctgttttcactcgtgccctgcctaaaaaatcagaggctatgcagtggtggaactctgctgatgtttctcttcgttccttgctgattatcttcctcagcgaccccacagaagaggctactgctgccgctgatgaaagcggtttgagtgctatttttgagagttggcctgagaaggaacgtgaaaagctagaagggctagattttgagtctggcagggctgcttacagtatccaatctctgaacgaccttaaccagtatatggaggagcatcagtctgatctgcatactgcccgtaaggaagtatttggtgttgatgattcctggcagcctcctcgcgagaacctgcatgagcctacaggccagcctgctgttgaccgtgtgctgaccattgttcgtcgctttgtgatggcctgtgaacgtaaatggggtaagcctgatcgtattgtgattgagcatgcccgaactgccttgatggggccgactcagcggcacgaggttttgcgggaaatccaacgaaaccgagacgcgaatgaacggataagagaagagctacgtgctgacggtataactagccctacccgtgctgatgtgcgtcgtcaccgagtggtgcagaaccaggactgcaagtgcctttactgcgggactatgattactactgccacagcagagcttgatcatattgttccccgtgctggtggcggttcttccaagattgataatttggttgcggtctgccggggctgtaacgctgataaggggcggaaaacttttgcagtttgggctgaacagaccagcagggaaggtgtttctctggacgatgtcctcaatcgtctctggtctttcgataaggtcgtttataagggggttgctggcagaaagcttaaggctcagattgcgcgccgccttcggcaaactgaagaagacgaacccattgatgagcaatcactagaatctacagcctactctgcggtagcaatccgtcatcgcttggagacttactttaacaccagccgtggtttggtacgaggggacgacgacttcacctttattgatgtctacgctggagccttaacccgtgaagcccgcagggctggtggcatcgatgagcagattcttctgcgcgggcagcgggataaaaaccgctttgatgtgcgccatcatgcggtggatgcggctgttatgactgttttggatctttcagtagctcgtaccttggctcagcggaacttgatttaccgggaggataggcttaaacgccgggagaatcaggacgataccaggtggcgagaatttaccggtcttgggggcgaggctcaagagaagttcttggtctggaagcaaaagtcttatgtgctcgcagacttgctggctgaggccattgcagaggactctatccccgtcattaatcctctgcgtttgactcctagaaacggttcggtccacaaggacacgctttcatccctagatatgatgtatctgggcggtagctggagcagcaaagagattgcgcgtgttgttgacccagatatttatcttggcctgctggatttgctaggacgctccaagactcttgaagaagaccctcagcgttctctaactgtggaggggaaggtacttcaagctgaccaggagattaagctcttccctgaagcagcagcttcaattctggctgggacaggtgccgtaaagattggtgactctctgcaccacgctcgcctttatacctggcccactaagaagggcactgagattggtatgttgcgcgtctttggtgcagagttcccttggctcttcagaacctacggcacaaagaacgccttgactgtgcctatccatcctggttctcagtcttaccgggatatgaaggacactctgcgtaagaagattgagagtggtgaggcccgagagattggttggattacccagggggacgaaatcgaaataaagattgagtcttacctgcaggaaaatgacgaactgggcaggtttattaatctgattcctgagaatcgctggagggtcgacgggttctacgataatcgtcgcttgcggttacgtcctatcttgctttcttacgaagagattcctgaaagttacagcgaggaagccttgggtctggagaattaccagcttattcgtaaggtcctggaaaagggcgcatttgttaccgtaggaaaaattctaggtgcggaaggaaccaaggttctgcgacgcaactacctgggggcaccggtctggcggggccagcaggaagcaaggtctttggatattagccgggctattgtagagaagctggaaggctaaatcatggatagcaagtggcgcattcttgatctaacggcctatgagggtttcctttcttacgagagggggcgaatcaaggtaggggagcggagtgcgccacttgctgaagtggattttatcctggtaggccaagcctgtacctggggatacggtctcgttgctgggctagaacgttttgacgtggctatggctatctgcgactggcgtaaccagcctatctcagttctttaccactggtcagagaatacccgggtttttgcccgccatgaggctcaggcgcagttgagtttacctcgccgtaagaatgcctggatgcgtattatcaaggcaaaaatccgtggacaggctaaggttctgagcctacataaccctgtggtggctgctcgcttggaggatctggctaagaaggtgcgttcaggggacccttctaatgtggaagctcaggctgctcgcctttactgggagcattatctttcagatcagcgtttctatcgggaccctaacgcggatgatctggtgaatgggctcctcaactatggttatacgattctgcgaggtagggtcttaacccggattgttgctactggcctgtccccgaccttgtccctttttcaccggaaccggggaaacgtttttgcgctcgcagatgatctcattgagccctttcggcccgttgtagacaggctggttctgggcttgcttgcagagggttcttctgagcttggccctactgaaaaatctaggttagctgctgtgttagaagaaaaagctggggacggcgatgtgactgtgcggacctcgctagaacggctctgtcagaactttgctctctatgtggaaggggaacgggagattctttctgtccctgtctgtggcctcgaagctgaagagtctgttgaggctgaggatggctaaacccatgtggcttttagtgatgtttgacttgcctgtcaaaactaaggagcagacccggcgggctacccaataccgtaatctgctcaaggataggggttttgatcggattcagctgagtgtctattgcaagtactatctgaacagtaactcgacggagcgggatctaggttctctgaagatgaatgttccggtgggcgggcaggtttgggttctgaagatttcggatatacagtgggcttcaaccatcatgtttatggggccgaagaagaaaaagcccgaggcgccgcctgaacagctcatgatcttctaaggatgtcccttggtctggagaggggcggccttctagtccaggacgctagttaaaaacatagccgccgcacccgtgaagggttgcggcggctgataaatcaacatccacattgctgtggaagcttgttaggaacacttcacctctagtccttaactagaaccagactagcagattttctctatctgacggagtcatttggcctagtagagggccgtgtcgaaccgtttttaaggccgaaaaaatcgccttaaagctgatctgacaaggtattttattcagttatttaagtctacctgggactagagg

SEQ ID NO: 3632 - DNA, 11838 bp, synthetic construct
  misc_feature 1..11838: note = Synthetic
  source 1..11838: mol_type = other DNA
ggagaatcattccgataaaaatggcgaaaacaggtgctcccacaacaggcagaaatcctcctaaaacccaagagatgatagaaatgatcagacaaactgacagtcctgcccaattttttgatagaaatgacataaaaacccccaaaaataaatagtccttattattattatcttatttgtcagaaaagtaaaatagaaagtaggaatacagacccagcccggggtgcacacgacctcagcctccgcacccgaacgcccatgccctcgcattcccgccctaccccctccccatgcccgtaatgtggcgggcaactcatgccgctcacgcggggtgttagacagtactacacttaaagcggaagtcacatcgccgtcactgaagaaaagagtttttgtgcccaccacgaccgtacacttgaccgaccgcatccctcgcgtttctgctgatgagttgctggcgggtttccgcccctctgagcgttttggtgaagtgtcttttgatagctacattcctgatccgaatcagccgtcgcaggctgaggctgtgcagaagctgaaggattttggcgacaagattaatggtggcggcgctggtgccggtttctttggtcgcctgtttggtggcaagaagaaggattcgacgaaggctggcctgtaccttgacggcggttttggtgtgggtaagactcacctgttggcgtcgctgtggcattatgtggatggcccgaaggcgttcggtacttttgtggagtacacgaacctggtgggtgcgttgacgttccgtaagacggttgaggcgttgagcagctacaagctggtgtgtattgacgagtttgagctggatgatccgggtgatactgtgctcatgtctcgtctgatgcgtgagctggcggatgctggcgtgaagcttgtggcgacgtcgaacacgctgcctggtgcgctgggtgagggccgtttcgcggctgaggattttaagcgtgagattcaggtgcttgcttcgcagtttgaggtgcaccgtgtggatggtgaggatttccgtcaccgtggcctgcctgctgcgccggagcctgttgctgatgatgcgtttgatgcgaaggttgaggaagtgttcggcggccagactgttggcgttgataacttcgctgacctggtggagcacctggcgaaggtgcacccgtcgcgttaccgtcagctgattgatggcctggatggtattgcgtggcgtgatgttcacccgattactgagcagtcggtggcgctgcgttttgtggtgttggctgaccgcctgtatgacaaggacttgccgattgtttcttcgggtgtgccttttgacaaggtgtttactgaggagatgctggctggtggttatcagaagaagtatttccgtgcggtgtctcgtttgactgcgttggctcgtgagggcatgctcggcgaatctgagtagccgccgcctgacgctgcgaaaccctgcagtgtgaatgcgtgaactgcgccgaaaagttttatatgcaaaaggcccccgccggatgctccacgagaggatccgggcgggggtctttgtttgtcttggctcgtatggtctgcgggctcataaatacctgcagtagatagggaagttaaaaacataccgcccgttcctaagaggagccggacggtgagaagtcagcatcggaaggatgccttattaagaatctttcgttactgattctagcacaggggcttactacttctgcaagcgcttcacataaaaattttttttgcgcttttgggggtgtgaatgacggttttgaatgcatatatggcgtagtcaggttattgttagtctcagatgagcgcaatgatgcttatcaagagtgcaatgtctgcacttgattgcaatcactcacaaaggagtatgacatgtccacggacatgaagaactaccgtatcggtgttgatgtcggtgaccgctctgttggtcttgccgctatcgaatttgatgatgctggtctccctattaagaagttggctttggtaactttccgccatgacggcggcttggatccgacgaagaacaagaccccgatgagtcgtaaggaaactcgaggtattgctcgtcgtacgatgcgcatgactcgtcgccgtaagcagcgtctgcgtgaccttgataaggtgcttgagaagctgggttacaccgtgccggagggccctgagcctgagacttatgaggcgtggacttcgcgtgcactgttagcatccatcaagctggctagcgctgatgagctgaatgagcatttggtgcgcgctgtgcgtcatatggctcgtcaccgtggttgggctaatccgtggtggtctcttgaccagctggagaaggcgtcgcaggagccgtcggagacttttgagattattctggctcgtgcacgtgatctgtttggcgagaaggttccggctaatccgactctcggtatgttgggtgctcttgccgctaataatgaggttcttctgcgtccgcgccgcaactacaaagcgaaggaagctaataaccctaagaaggctgagaagtacctggctgattacggcactcagccgctaatggcggcgaaggtgcgccaggaggaccagctggctgagctccgccgtatttgcgaggtgcagggtattgaggatcagtatgaggctctccgcgaagctgtctttacgcacgtgcgtccctacgtgccgaaggaccgcgtgggtaaagacccgctgaaccccgatgaaatccgtgcaagccgcgcctcgctggaattccaggagttccgcattcttgattcggtggcgaatctgcgtgtacgtaccgattcccgtaccaggcgcgagctctccgaaagcgaatacgataccgcagttgatttcctgatgtcgtacacgggtaaggagcagccgagctgggccgatgtagctgaggagattggcgttccgggtaaccgtctgattgccccggttcttgaggatgttcagcagaagaccgcaccctttgaccgttcgtctgcagccttcgagaaggcaatgaaggcgaagaccgaagcacgcaaatggtgggaatcgaacgatgatgaccagctgcgcagcctgttcattatgttccttgctgacgcaacggatgacactaccgctgctgctgaacaagcaggtctgtatgatttgtttgcgagctggcctgaagaggaacgcgaaactctttctaatatcgccttcgaatctggccgcgcaggatacagcgcgacgaccctatctaagctgagcgagtacatgcacgaacaccgtgtgggtcttcacgaggcccgcaaggctgtctttggtgtggacgatacctggcgcccgcccctggctaagctggaggagcagacgggtcagcctacggtggaccgcgttctgactattctgcgccgctttgtgctggattgtgaacgccagtggggtcgcccgcaggcaatcacggttgagcatgcccgcaccggtctgatgggtcccgctcagcgtcaggacattctgcgtgagcagaagaagaaccgtgaagagaacgaacgtattcgcaacgaactgcgtgagtctggcgtggagaacccgaagcgcgtggatgttcgccgtcatttgattgtgcaggagcaggagtgccagtgcttgtactgcggcacgatgattacgacgactacttctgagctggaccacatcgtaccgcgcgctggcggcggctcctctcgtcgtgagaatttggcggcggtgtgcagttactgtaacgggcagaagaacaacaccccgttctaccgctgggcttccccggagaggttcaaagagaccattgaccgtgtccgccagttgaaggcctttaaagaccccaagaaggcgaaaatgttcaagaatcagattcgccgcctcaagcaaaccgaggctgatgagccgattgatgagcgctcgctggcttcgacttcgtatgctgctgtggcggtgcgtgagcgtttggaacagcactttaatgagggtcttgcccccgatgataagagccgtgtggttctagacgtgtatgcgggttcggtgactcgtgagtctcgccgtgctggtgacattgatgagcgtattcttctgcgtggtgagcgtgataagaaccgttttgatgtgcgccatcatgcggttgatgctgcggtgatgactttgttgaaccgttcggttgctttgaccctggagcagcgtagccagctgaggcgcgcgttttatgagcaggggctggataaactggaccgtgatcagctgaagccggaagaagattggcgtgactttaccggtctgtacccggcttctcaggagaagttcttggagtggaaaaatgccgctaccgagttgggcgacctgttggctgaggctatcgaggaggactctatcgcggtggtgagcccgcttcgtttgcgtccgcaaaatggctcggtgcatctggaaactatctctgcggtgaagaagcagactttgggttctgtctggtctgctgatgctgtgaagcgtattgttgatccggagatttacctggcgatgaaggaggctctgggtaagttgaaggagcttcctgaggattctgcccgtacgcttgaattgccggatggccgctgcattgaggctgatgatgaggtgctgttcttcccggagaacgctgcatcgattttgactcctcgtggtgtggctgagattggtgggtcgattcatcatgctcgcttgtacggctggctgacgaagaagggcgagctgaaggtcggtatgcttcgcgtgtatggtgcggagttcccgtggctgatgcgtgagagcggtagccgcaatgttttgagtatgccgattcaccggggttctcagtctttccgtagcatgcaggaagaaaccattgaaatgattgaaggagggtttgcagaggagattgcttggattacgcagaatgacgagctggaatttgatcctgtagagtacatcaatctttctggaagaagcgataagcttacccgtttccttacctacatgccggagactcgctggcgtgtagacggatttccagagagccggaacatcaggattcgtcccttgatgctttctcaagaggatcttccttccgacgttaaaaagcataaggacgataggcaactgtcggtcgaagagaaacttctagtggaagcgctagagacagggctcatcattacttctaataaaatcttggggctgaagagcataaagatccttcgccgtaataatttgggcttcccccgctggcgcggtaacggtagcctgccgacctcgttcgaggttcgttcttcggcgttgcgtgctctgggcgtggaaggctagggtagcgtgatggatagtaagtggcgtgttcttgatttcactgcttatgagggcttcctgtcgtatgagagggggcgaatcgtggcgggggagcggagcacgccacttgctgaggttgattttattctccttggtatggggtgctcctggggctacggcctggtggctggtctggaacgttttgatgttgctgccgcgatttgtgattggcgtaatcagccgatttctacgttgtatcactggtctgagaatacgaaggtgtttactcgtcatgaggctcaggctgagttgagtgtgccgcgtgcaaagaatgcgtggatgcagattgtgaaggctaagcttcgtggtcaggcgaattgtcttgatgcgatgggacggcatggtgctgcagatattcgcgcgttggctcgttcggtgcggtctggtgacccgtcgaatgctgaggcccagggggcgcgcctgtattggggtgcgttcctgccggagcaggggttccgtcgtcagcagctgtctgatgacgtggtgaatggcatgctcaattatgggtacacgattcttcgcggcagggttttgactcgtgtgattgctacgggtttgtgccctacattgtcgctgttccatcgtcatcgttctaatgcgtttgcgttggttgatgatctgatggagccgttccgccctgctgtggattatgcggtgtatcagttgatttctgctggttctactgagttgggtcggcaggagaaggctgctctggttcaggtgttgtctgatgcagtgaatagtgattcgccgtttaagctccgtactgtggtggaggatttttgttctgagtttgctctctatgttgagagcaagcgtgataggttgtcggttccggtgtgggagctgactgctgctgaggagtcgtgtgaggatggctgatcctgtgtggttgatggtgatgtttgatttgccggtgaagacgaagaatgagcggaagctggcgaatcgttatcgtcatgttctgctggatttgggttttgaccgtatgcagttgagcgtgtatgcgaagtactatctgaacgggaatgcgacgggttctgatttgttccggttgcaggttgaggttccgccgggtggtgcgattcgtattatgcgttttacggatgctcaatgggctgggtcgattcgccatttgggaccggaggtgcaacagatggaggagaagccggaagcgttagatattttctagctgagcttcataaaatgagccggtggggtagcgatcgtgtttggttgttgctccaccggctcatttttcctcgcggacctcgtctagagagggtatctgatgcaggtatggggcagtttttcttccgaaaaactgccccattgatgcccctgactaggggaaacgctcgattacttaagtatatcaaggcgaataatgaaagattctcaaccatcggcggtcagaccggcctggagttgtaagtatatcaaggcgaataatgaaagattctcaacgccccaagcgtcgggtcccacccggatttaagtatatcaaggcgaataatgaaagattctcaacgctggaacgttcgaggcgactacaagcctaagtatatcaaggcgaataatgaaagattctcaacaatcccacgcaatcgcgaccgccagcagtaagtatatcaaggcgaataatgaaagattctcaactcatgtctagagtccactcgcggcggcgtaagtatatcaaggcgaataatgaaagattctcaacgatttcatccatgctcaagatagttttttaagtatatcaaggcgaataatgaaagattctcaacaatggatcccatcgagcgctacggtatctaagtatatcaaggcgaataatgaaagattctcaacaccatcgccgcgctacccctgattatgttaagtatatcaaggcgaataatgaaagattctcaacagctcgaatgcgtccatgtttacgcttctaagtatatcaaggcgaataatgaaagattctcaacttatgtcgccgggtgttgcgggtaaagctaagtatatcaaggcgaataatgaaagattctcaacctacctcacagacctccacggctgggctctaagtatatcaaggcgaataatgaaagattctcaacctgtcttcaaaggtgtcaatcaccttgctaagtatatcaaggcgaataatgaaagattctcaactgagcgggtcgtgtacgccgcggatgtctaagtatatcaaggcgaataatgaaagattctcaacgggataactatgctgagatggacgcatttaagtatatcaaggcgaataatgaaagattctcaactggaagtgcacgataacggcaccgtcactaagtatatcaaggcgaataatgaaagattctcaaccattccagcgtccagcgtttagccaggttaagtatatcaaggcgaataatgaaagattctcaacggtaaccggagctgccggcacctctacataagtatatcaaggcgaataatgaaagattctcaacgctgaaaaagcctcacgccctgcaactgtaagtatatcaaggcgaataatgaaagattctcaactgatacaacgggatttgggactatcttttaagtatatcaaggcgaataatgaaagattctcaacggtggggtgcatgggttgctcctgtgcgtaagtatatcaaggcgaataatgaaagattctcaactacgtaagcatgaccctaatttcagccttaagtatatcaaggcgaataatgaaagattctcaacattaccaattgctttagctaacttatgataagtatatcaaggcgaataatgaaagattctcaacctacgtgctggcgaacggctacgcctggtaagtatatcaaggcgaataatgaaagattctcaacagggcaagcaagacacgaagccgcaagctaagtatatcaaggcgaataatgaaagattctcaacactataaatgtaaggttgaggggcgggataagtatatcaaggcgaataatgaaagattctcaaccaaagactattcaggacggcatcgctattaagtatatcaaggcgaataatgaaagattctcaaccaatgacaagctgttggttattcttctctaagtatatcaaggcgaataatgaaagattctcaaccgagacgacagttgaggatgtgcaccattaagtatatcaaggcgaataatgaaagattctcaacgctctcgacgccacagcctttgtatctctaagtatatcaaggcgaataatgaaagattctcaacactggatgtggcgcaaccgcgtagaccctaagtatatcaaggcgaataatgaaagattctcaactatcaacacaattaccggcgatttggctataagtatatcaaggcgaataatgaaagattctcaaccctttggcaagcgcgccaaggtcgaaactaagtatatcaaggcgaataatgaaagattctcaacgcgtgaacagtcaagagaggagcgtgcgtaagtatatcaaggcgaataatgaaagattctcaactgcggcgcgaacgctgacgaacctgcagtaagtatatcaaggcgaataatgaaagattctcaacacggaagcatcgtttcgatggtctggtctaagtatatcaaggcgaataatgaaagattctcaacacctccgtcgcacatcaaactccggacctaagtatatcaaggcgaataatgaaagattctcaacccaacagggttcagggcgttgatggtcataagtatatcaaggcgaataatgaaagattctcaacagggaaagtttagcgctacagctgtagctaagtatatcaaggcgaataatgaaagattctcaacgatgagcgtgaagactgccgcaaaggattaagtatatcaaggcgaataatgaaagattctcaacgctcggtgagcgtgttgatgggcgctggtaagtatatcaaggcgaataatgaaagattctcaaccgaatcgagtcgctagaacgagccttgataagtatatcaaggcgaataatgaaagattctcaaccggtgagttggcgggtgtgggttgcttttaagtatatcaaggcgaataatgaaagattctcaacgaagcgtctggcttctcacttttccccgtaagtatatcaaggcgaataatgaaagactctcaacacgaattctctgcgcaaatcgatgcagctaagtatatcaaggcgaataatgaaagattctcaacgtgatgcgaggccacagaacctcatccctaagtatatcaaggcgaataatgaaagattctcaaccgacactatcacgcttgatgttgcaccgtaagtatatcaaggcgaataatgaaagattctcaacctgtatccgcatgtgtcgccgcttctagtaagtatatcaaggcgaataatgaaagattctcaacaaattgccggattcgatcgcgagatggttaagtatatcaaggcgaataatgaaagattctcaacgagggttagccgcgcggtacgtctgctttaagtatatcaaggcgaataatgaaagattctcaactcgattttgagatggtggtgagtgttcttaagtatatcaaggcgaataatgaaagattctcaacgatatgctgccgggaacgatggcctccataagtatatcaaggcgaataatgaaagattctcaacgagtttagcgtcacgtggcgattgcggctaagtatatcaaggcgaataatgaaagattctcaacgctgcggcggtgcccatggtgcgggcgataagtatatcaaggcgaataatgaaagattctcaacggctttggcgcggtaggtgcggtcactgtaagtatatcaaggcgaataatgaaagattctcaactgccggtgtgggtgtcgccggggttggttaagtatatcaaggcgaataatgaaagattctcaaccgggtgcgtgacggtcgtgacggtttggtaagtatatcaaggcgaataatgaaagattctcaacttgaacgcctcggtaagctgtagcgtggtaagtatatcaaggcgaataatgaaagattctcaaccatttggaagtttcttagtttctacaaataagtagatcaaggcgaataatgaaagattctcaacccagccacttccacgcgccgatgtcctctaagtatatcaaggcgaataatgaaagattctcaaccccgtctacctgaccagacggggaggaataagtatatcaaggcgaataatgaaagattctcaacgatgtggggctggagctgaccacttaaataagtatatcaaggcgaataatgaaagattctcaaccgctaaaccaaccactcgaaggaacacataagtatatcaaggcgaataatgaaagattctcaacttgccgcgcacggcgtcaagccatgacagtaagtatatcaaggcgaataatgaaagattctcaaccgcctcggacgcatgaccaagctgcagataagtatatcaaggccaataatgaaagattctcaacacacaccaacccgcatgcacaccaagcataagtatatcaaggcgaataatgaaagattctcaacggagccgcccgggtgggatgggtctacgtaagtatatcaaggcgaataatgaaagattctcaactctgtctccaccttgaagtgatcgatattaagtatatcaaggcgaataatgaaagattctcaacgggtttgggttggtcagtgaaagggggttaagtatatcaaggcgaataatgaaagattctcaactccgaaatatacctaaaaatatagggtttaagtatatcaaggcgaataatgaaagattctcaacaaggaaggtgtcactcgtgagcgtgctctaagtatatcaaggcgaataatgaaagattctcaactcagtcttcaccttgaagtgatcgacattaagtatatcaaggcgaataatgaaagattctcaacgctcttcaatgatggagataatgccctctaagtatatcaaggtgaataatgaaagattctcaacctggggcagcggtacagatggcttttttaagtatatcaaggcgaataatgaaagattctcaacaagacgcaggtttcctgtctactctgattaagtatatcaaggcgaataatgaaagattctcaactcggtcggtcggtcggccggtcatgaaaatattaaacaaatattgaaagattcttagtcctcaatgaaagcccctccggtctatttattttaacaaatatgcgtacttctgggtgtaaatagcgagaatattaaaataggcccctcgacccgtaaccgtaagctacaggtcgaggggcctctcattatgcgttagcaactagggtggagtctggcgctgtcaccgcccggggggagcacccctacgccaccgccgctacagcccccttggcggcggtgccgtttcgggtccacagcaggagcgctgccacgctgttga

SEQ ID NO: 3633 - DNA, 11674 bp, synthetic construct
  misc_feature 1..11674: note = Synthetic
  source 1..11674: mol_type = other DNA
gaaagataagagctgccaagacattgaagaaaaagataacagaaatggcttgggctacttctttttccttggcgtgaataacaggagcagtcgctgcaatggcagaaccgccacagatagaagatccaactccaatcaaggtagctagctttgtatcaaggttaaaaaagcgttggaaaaagaaggctataatcaatgcaattgaaatagttgaaaggataataggaagggaagatgttccaactgcaaaaacttgtgagatactgagtccaaacccaagcaaaataacagcatactgaagcagttttttggagctataagtcaaaccggcatccagttgtgtataggaagtgagaaagggatggagaatcattccgataaaaatggcgaaaacaggtgctcccacaacaggcaggaatcctcctaaaacccaagagatgatagaaatgatcaggcagactgacagtcctgcccaattttttgatagaaatgacataaaaacctccgaaaataaatagtccttattgtaatcttatttgtcagaaaaataaaatagaaagtaggaatatagacccagcccggggagcacaccacctcagtctccgcacgcgaacgcccaggccttcgcaatcccgccctccgcatcccagcccagcagcccctcccgcatatcccaccccactccctcctcatacccgtaatgtggcgggcaactcatgccgctcacacggggtgttagacagtactacacttaaagcggaagtcacatcgccgtcactgaagaaaagagtttttgtgcccaccacgaccgtacacttgaccgaccgcatccctcgcgtttctgctgatgagttgctggcgggtttccgcccctctgagcgttttggtgaagtgtcttttgatagctacattcctgatccgaatcagccgtcgcaggctgaggctgtgcagaagctgaaggattttggcgacaagattaatggtggcggcgctggtgccggtttctttggtcgcctgtttggtggcaagaagaaggattcgacgaaggctggcctgtaccttgacggcggttttggtgtgggtaagactcacctgttggcgtcgctgtggcattatgtggatggcccgaaggcgttcggtacttttgtggagtacacgaacctggtgggtgcgttgacgttccgtaagacggttgaggcgttgagcagctacaagctggtgtgtattgacgagtttgagctggatgatccgggtgatactgtgctcatgtctcgtctgatgcgtgagctggcggatgctggcgtgaagcttgtggcgacgtcgaacacgctgcctggtgcgctgggtgagggtcgtttcgcggctgaggattttaagcgtgagattcaggtgcttgcttcgcagtttgaggtgcaccgtgtggatggtgaggatttccgtcaccgtggcctgcctgctgcgccggagcctgttgctgatgatgcgtttgacgcgaaggttgaggaagtgttcggcggccagactgttggtgttgataacttcgctgacctggtggagcacctggcgaaggtgcacccgtcgcgttaccgtcagctgattgatggcctggatggtattgcatggcgtgatgttcacccgattactgagcagtcggtggcgctgcgttttgtggtgttggctgaccgcctgtatgacaaggacttgccgattgtttcttcgggtgtgccttttgacaaggtgtttactgaggagatgctggctggtggttatcagaagaagtatttccgtgcggtgtctcgtttgactgcgttggctcgtgagggcatgctgggtgaggaggcggagcgctagttccgctgttcgccggggccgagctttggccggctcgggttttgatgcgctgttctttctagtcccgtgagactcgaagctcgcccggtttgcatggttagcttggttagtctggtttacctgaaccgcgccaacccctctcatacgtgaagaccctcgccgggtcgcttaggaagcacccggcgggggtctttgtttgtcttggctcgttatattctgcgggctcgcaaatgcctgcagtggatagggaagttaaaaacataccgcccgctcctattggaaaacggacggtgagaagtcagcatcggaaggatgccttattaagaatctttcgttactgattctagcacaggagtttgggggttctgcaagtgcttcacataaaaattttttttgcgcttttgggggttagaatgacggtttcgaatgcgtatatggcgtagtcaggttattgttagtctcagatgagcgcaatgatgcttatcaagagtgcaatgtctgcacttgattgcaaccactcacaaaggagtatgacatgtccacggacatgaagaactaccgtatcggtgttgatgtcggtgaccgctctgttggtcttgccgctatcgaatttgatgatgctggtttccctattcagaagttggctttggtaactttccgccatgacggcggactcgacccgaccgagaataagagcccgaagagccgtaaggaaactcgcggtgttgctcgtcgtacgatgcgcatgaaccgccgccgtaagcagcgtctgcgtgaccttgatacggtgcttgagaatctgggttacaccgtgccggagggccctgagcctgagacctatgaggcatggacttcgcgcgcactgttggcatcaatcaagctggctagcgctgatgagctgaatgagcatctggtgcgcgctgtgcgtcatatggctcgtcaccgtggttgggctaatccgtggtggtctcttgaccagctggagaaggcgtcgcaggagctgtcggagacttttgagattattctggctcgtgcgcgtgagctgtttggcgagaaggttccggctaatccgactctcggtatgttgggtgctcttgccgctaataatgaggttcttctgcgtccgcgccgcagctacaacgcgaaggaagctaataaccctaagaaggctgagaagtacctcgctgattacggcactcagccgctaatggcggcgaaggtgcgccaggaagaccagctggctgagctccgccgtatttgcgaggttcagggtattgaggatcagtatgaggctctccgcgaagctgtctttacgcacgtgcgtccctacgtgccgaaggaccgcgtgggtaaagacccgctgaatcctgccgaaatccgcgcaagccgcgcctcgctggagttccaggagttccgcattcttgattcggtggcgaatctgcgtgtacgtaccgattcccgtaccaagcgtgagctctccgaaagcgaatacgataccgcagttgatttcctgatgtcgtacacgggtaaggagcagccgagctgggccgatgtggcagaggagattggcgttccgggtaaccgtctgattgccccggttcttgaggatgttcagcagaagaccgcaccctttgaccgttcgtctgcagccttcgagaaggcgatgaagacgaagaccgaagcgcgcaaatggtgggaatcgaacgatgacgaccagctgcgcagtctgttcattatgttccttgctgacgcaacggatgacactaccgctgctgctgaacaagctggtctgtatgatttgtttgcgagctggcctgaagaggaacgcgaagctctttctaatatcgccttcgaagctggccgcgcaggatacagcgcgacgaccctatctaagttgagcgagtacatgcacgaacaccgtgtgggtcttcacgaggcccgcaaggctgtcttcggcgtggacgatacctggcgcccgcccctggctaagctggaggagcagacgggccagcctacggtggaccgcgttctgacgattctgcgccgctttgtgctggattgtgaacgccagtggggtcgcccgcaggcaatcacggttgagcatgcccgcaccggtctgatgggtcccgctcagcgtcaggacattctgcgtgagcagaagaagaaccgtgaagagaacgaacgtattcgcaacgaactgcgtgagtctggcgtggagaacccgaagcgcgtggatgttcgccgtcatttgattgtgcaggagcaggagtgccagtgcttgtattgcggcacgatgattacgacgactacttctgagctggaccacatcgttccgcgcgctggcggcggctcctctcgtcgtgagaatttggcggcggtgtgccgctactgtaacgcgatgaagagcaacaccccgttctaccgctgggcttccccggagaagctcaaggagaccattgaccgtgtccgccagttgaaggcctttaaagaccccaagaaggctaagatgctgaagaatcagattcgccgcctcaagcaaaccgaggctgatgatccgattgatgagcgctcgctggcttcaacttcgtacgcggctgtggcggtgcgtgagcgtttggagcaacactttaatgagggccttgcccccgacgataagagccgcgtggcactggacgtttatgccggcgccgtgacgcgcgaatcccgtcgcgcgggtggcattgacgagcgtattcttctgcgaggtgagcacgataagaaccgtttcgacgtgcgccaccacgcaattgatgcagcggtcatgaccctcctgaaccgttcggttgctctcaccttggagcagcgccaccagttgaagcgtgagtttaatgagacgaagcgtgagaatggctggcgtgactttaccggtctgtacccggcatccaaggagaagttcttggagtggcgtaaggcagctactgttctgggcgacctgttgactgaggctatcgaggacgactctattgcggtagtgagcccgcttcgtttgcgcccgcagaacggagcggtgcataaggacaccatcgccgcggtgaagaagcagactttgggttctgcgtggtctgctgatgctgtgaagcgtattgtcgatccggagatttacctggcgatgaaggatgctctgggtaagttgaaggagcttcctgaggattctgcccgctcgcttgaattgccggatggccgctttgctgaggctgatgatgaggtgctgttcttcccgaagaatgctgcatcgattttgactcctcgtggtgtggctgagattggtgagtcgattcatcatgctcgcttgtacggctggctgacgaagaagggcgagctgaaggtcggtatgcttcgcgtgtatggtgcggagttcccgtggctgatgcgtgagagcggtagccgcaatgttttgagtatgccgattcaccggggttctcagtctttccgggatatgcaggacacaacgcgtaaagctgtggaaagcggtgaagcggttgagtttgcctggattactcagaacgatgagttggagtttgatccggatgactacattgctcatggcggtaaggatgagctgaggcaattcttggagtttatgccggagcgccgctggcgtgtggatggttttaagaagaactatcagatacgtattcgccctgcaatgctgtcacgtgaacagttgccttctgacattcagcgtcgtctggaatctaaaactctgacggaagacgaatccctcttgctcaaagctctagatacagggctggttgttgcgattggcggtttgttgcctctggaaacgttaaaggttatccgccgcaataacttgggtttccctcgttggcgcggcaacggtagcctgccgacttcgttcgaggttcgttcttcggcgttgcgcgctctgggtgcggaaggctaggagagcgtgatggatagtaagtggcgtgttcttgatttcactgcctatgagggcttcctgtcgtatgagagggggcgaatcgtggcgggggagcggagcacgccacttgctgaggttgattttattctccttggcatggggtgctcctggggctacggtctggtggctggtctggaacgttttgatgttgctgctgcgatttgtgattggcgtaatcagccgatttctacgttgtatcactggtctgagaatacgaaggtgtttactcgtcatgaggctcaggctgagttgagtgtgccgcgtgcgaagaatgcgtggatgcagattgtgaaggctaagcttcgtggtcaggcgaattgtcttgaggctatggggcggccgggtgctacggatattcgtgcgttggctcgttcggtgcgttctggtgacccgtcaaatgctgaggctcagggggcgcgcctatattggggagcgttccttccagaacagggattccgccgtcaacagctctcggatgacgtggtaaatggcatgttgaactatggatacacgattcttcgcgggagggttttgactcgtgtgatttctgcgggtttatgcccgacgctgtcgctttttcaccgtcatcgttcgaatgcttttgcgttggttgatgatttggtagagccgttccgccctgctgtggattatgcggtgtatcagttgatttctgctggttctactgagttgggtcggcaggagaaggttgctctggttcaggtgttgtctgatgcagtgaatggtgattcgccgtttaagctccgtactgtgatggaggatttttgttctgagtttgctctctatgtcgagggtaagcgtgataggttgtcggttccggtgtgggagctggctactgccgaggagtcgtgtgaggatggctgatcctgtgtggttgatggtgatgtttgatttgccggtgaagacgaagaatgagcggaggctggcgaatcgttatcgtcatgttctgctggatttgggttttgaccgtatgcagttgagtgtgtatgcgaagtactatctgaacgggaatgcgacgggttctgatttgttccggttgcaggttgaggttccgccgggtggggcgattcgtattatgcgttttacggatgctcagtgggctgggtcgattcgccatttggggccggaggtgcagcagatggaggagaaaccggaagcgttagatattttctagcggagcttcacaaaaatgagccggtgggggcagcgaccacgtttggtcgctgccccaccggctcatttttcctttcggacctcgtctagagaggagctccgaggcaggtatggggcagtttttctttcgaaaaactgccccatttatgcccctgactaggggaaacacttgattacttaagtatatcaaggcgaataatgaaagattctcaacagccctctgatgcccccgcctcccccggctaagtatatcaaggcgaataatgaaagattctcaactcggcgacctcgcaccggcacaccgacgtaagtatatcaaggcgaataatgaaagattctcaactgtgtccgtctgagggtcgctctaggcttaagtatatcaaggcgaataatgaaagattctcaacgcctcattcgaggtatggccaccgtagataagtatatcaaggcgaataatgaaagattctcaaccagttaggctgagggacaccggcccgtttaagtatatcaaggcgaataatgaaagattctcaactagcccattgcttcaccaccggcggcggtaagtatatcaaggcgaataatgaaagattctcaacaacttcttacctttaccgcacccgcatctaagtatatcaaggcgaataatgaaagattctcaacgcagaaacccacgtatcagccgcatcagtaagtatatcaaggcgaataatgaaagattctcaacaccggattcataacggcatcaaacccgataagtatatcaaggcgaataatgaaagattctcaaccacaccagaagcaccagccgcagcagcataagtatatcaaggcgaataatgaaagattctcaacacttgatgctgctctacatcgtgccgcctaagtatatcaaggcgaataatgaaagattctcaacagacacaggcgcttatcacccgcgccggtaagtatatcaaggcgaataatgaaagattctcaacacaacgaaggtgtacggtgtgaagccgttaagtatatcaaggcgaataatgaaagattctcaacgtcagagcttcgtactcttgcggagtaataagtatatcaaggcgaataatgaaagattctcaacccttgtcgtgagagtcaggcggggtttctaagtatatcaaggcgaataatgaaagattctcaacctacgctcggactattctggggggctcttaagtatatcaaggcgaataatgaaagattctcaacgcggcgcggtagacgatacgcccgacattaagtatatcaaggcgaataatgaaagattctcaacagttcatcgttcaggtgttcaacctccataagtatatcaaggcgaataatgaaagattctcaacttcagctgctcgatgccgccggtagcgttaagtatatcaaggcgaataatgaaagattctcaaccacatggagtgatgccttaacatggcactaagtatatcaaggcgaataatgaaagattctcaacacccagaggtagtactcccctcaatttttaagtatatcaaggcgaataatgaaagattctcaacacagctctaacggcaaggtgctcgaccttaagtatatcaaggcgaataatgaaagattctcaactcgctttcgcggtggctatgctacttcttaagtatatcaaggcgaataatgaaagattctcaacctagagggtgatactgctactactgaagctaagtatatcaaggcgaataatgaaagattctcaacgggccgggggtcttagcaagccacgggttaagtatatcaaggcgaataatgaaagattctcaaccacctttcgctacaaaaccccccaccttttaagtatatcaaggcgaataatgaaagattctcaactctgtgagcttgtcaccaacggcacccgtaagtatatcaaggcgaataatgaaagattctcaaccctacggaatcaactaccgccctatcgttaagtatatcaaggcgaataatgaaagattctcaaccatctcaatctggacaccgtaagtgttgtaagtatatcaaggcgaataatgaaagattctcaacgatgtttacgattgccatttttaggctttaagtatatcaaggcgaataatgaaagattctcaacacatcaccaaactccaggcagacatcgctaagtatatcaaggcgaataatgaaagattctcaacactttgactgtgccatgcgtgaagcctttaagtatatcaaggcgaataatgaaagattctcaacgactccagccgttgaacgcgacacaatttaagtatatcaaggcgaataatgaaagattctcaacctcgatagccaggggagcggtgggcgcgtaagtatatcaaggcgaataatgaaagattctcaacacggtctgcaagtaaccgtaatcgtgaataagtatatcaaggcgaataatgaaagattctcaacaggtgtcttcctttgagagcgccgcgcttaagtatatcaaggcgaataatgaaagattctcaaccagacgagcgctacctcaccgcagaccttaagtatatcaaggcgaataatgaaagattctcaacgcgttcgcacggcggtcgccccggtgtttaagtatatcaaggcgaataatgaaagattctcaaccaatcttgcgaagaatgttcagccatgctaagtatatcaaggcgaataatgaaagattctcaacagtcagtgcgttttgaccctagattttttaagtatatcaaggcgaataatgaaagattctcaacgggtctgcgtactcgccatacatgagtttaagtatatcaaggcgaataatgaaagattctcaactcagccagccggtgctagagaggggaagtaagtatatcaaggcgaataatgaaagattctcaactgaccatacagtgcaacgtccagccggttaagtatatcaaggcgaataatgaaagattctcaaccgaattcgaagctctaggttcgacggcataagtatatcaaggcgaataatgaaagattctcaaccccccaagcctgcaaaacccaaaaagcgtaagtatatcaaggcgaataatgaaagattctcaacttcatggtcagtgggggcgcgtcaaggctaagtatatcaaggcgaataatgaaagattctcaactagccgatgaggtatcctatcccctcgctaagtatatcaaggcgaataatgaaagattctcaactcattaactcgtctgcggccgccacggctaagtatatcaaggcgaataatgaaagattctcaacgcgcgcatcctggacagccttaatgccgtaagtatatcaaggcgaataatgaaagattctcaactagctgcccgccggtaggaacaccgtactaagtatatcaaggcgaataatgaaagattctcaactttcgcaaatcgcgtgttcgtctggtgctaagtatatcaaggcgaataatgaaagattctcaacatgctgattcgcgcggcgcagcggtacgtaagtatatcaaggcgaataatgaaagattctcaaccaaattctcagggtaagccgcttgggtataagtatatcaaggcgaataatgaaagattctcaacgtgccgcgccccgctacccacacagtagtaagtatatcaaggcgaataatgaaagattctcaactgtcgggttcgggtggtgttattcctgctaagtatatcaaggcgaataatgaaagattctcaacgacgcgggcgcgtgactctggatattcgtaagtatatcaaggcgaataatgaaagattctcaacttccctacaccgaggagaccgtgtccgataagtatatcaaggcgaataatgaaagattctcaacaaatctgtaccggtacctccgcagattctaagtatatcaaggcgaataatgaaagattctcaacgcgctgctactcgccgccacgccgctgataagtatatcaaggcgaataatgaaagatcctcaacttcatcacgttctcgatacctccggtgctaagtatatcaaggcaaataatgaaagattctcaacccgcgaaacaccttatgcatggcttctataagtatatcaaggcgaataatgaaagattctcaacacctgcacgaccatctggtgatttcaaataagtatatcaatgcgaataatgaaagattctcaacgggtggagaggcaacccacccggtgcgataagtatatcaaggcgaataatgaaagattctcaacccaggcgtgatgcctggcggggtctgaataagtatatcaaggctaataatgaaagattctcaacgcctgtgtggccgaccgatgcgaccgattaagtatatcaaggtgaataatgaaagactctcaattcggtcggtcgcgtcggtcagtcggtcataaaaatatcaaacaactattgaaagattcttagtcctcaatgaaagcccctccagtctattcattttagcaaatgtgcgtactgctgggtacaaatagtgaaaacattaaaataagcccctcgacccgtaaccataagctacaggtcgaggggcctctcattatgcgttagtaactaagctgcagagtggcgctgtcaccgcccgggggagtacccttacgccgccgccgctacagctcccttg

SEQ ID NO: 3634 - DNA, 8830 bp, synthetic construct
  misc_feature 1..8830: note = Synthetic
  source 1..8830: mol_type = other DNA
ttagcttggttagtctggtttacctgaaccgcgccaacccctctcatacgtgaggaccctcgccgggtcgcttaggaagcacccggcgggggtctttgttcgtcttggctcgtatggtctgcgggttcataaatgcctgcagtagatagggaagttaaaaacataccgcccgttcctaagaggagccggacggtgagaagtcagcatcggaaggatgccttattaagaatctttcgttactgattctagcataggtgtttgctacttctgcaagtgcttcacataaaaattttttgcgcttttgagggtgagaatgacggtttcgaatgcatatatggcgtagtcaggttattgttagtctcagatgagcgcaatgatgcttatcaagagtgcaatgtctgcacttgattgcaatcactcacaaaggagtatgacatgtctacggacatgaagaactatcgtatcggtgttgatgtcggcgaccgctctgttggtcttgccgctatcgaatttgatgatgctggtttccctatccagaagttggctttggtaactttccgccatgacggcggtttggatccgacagataatccgaagagtcgtaaagaaactcgcggtgaagctcgtcgtaggatgcgcatgactcgtcgccgtaagcagcgtctgcgtgacctcgataaggtgcttgagaatctgggctataccgtaccggagggccctgagcctgagacctatgaggcatggacttcacgcgcgctgctggcttctatcaagttggctagcgctgatgagctgaatgagcatctggtgcgcgctgtgcgtcatatagctcgtcatcgtggttgggttaatccgtggtggtctcttgaccagctggagagggcttcgcaggagccgtcggagacttttgagattattctggctcgtgcgcgtgagctgtttggtgagagggttccggctaatccgactttgggtatgttgggcgctcttgctgctaataatgaggttcttctgcgtcccagggctgagaagaagaaaaagactggatatgtacgtggtactcctttgctggccgcacaggtccgtcagatagatcaggtagctgagcttcgtcgcatttgcgaggtgcagggtattgaagagcagtatgagactcttcgcaatgcaatttttgcgcataaggttgcatatgtaccgacggagcgtgtggggaaggaccctctggctccttctaaaaaccgaacgattcgcgcgtctctggagtttcaggagttccgtattcttgattcggtggcgaatctgcgtgttcgtactgattctcgtgcgaagcgtgagctgactgagggtgagtatgatgctgctgtcgagttcttgatgggctataccgctaaggagcagccgagctgggccgatgtggctgaggagattggcgttccgggtaaccgtctgattgcgccggttcttgaggacgtccagcagaagaccgcgcccttcgaccgttcgtctgcagctttcgagaaggcaatgagcaagaggactgaggctcgtcagtggtgggaggctaatgatgacgaccagttgcgcagtctgttcattatgttccttgccgatgcaacgaacgatactgaagaggcggcggctgtggcaggtttgcctgagctttatatgagctggccggctgaggaacgtgaagcgctctctaatattgattttgagaagggccgtgttgcttatagtcatgagaccctctcaaagctgagcgagtacatgcacgaacaccgtgtgggtcttcatgaagcccgcaaggctgtcttcggtgtggacgatacctggcgcccgcctttggcgaagctggaggaaccgacgggtcagccgacggttgaccgcgtgctgactattctacgccgtttcgtgctggattgtgaacgtcagtggggtcgtccgcgtgcgattactgtggagcatgctcgtatcggcttggtgggtcctgcgcagcgtcagaatattctaaaggagcaagaggacaaccgtaagaataatgagtgtatccgcgatgagttgcgtaagtcgggtgtagaaaatccgagtcgcacggaagttcgtcgtcatttggttgtgcaggatcaggagtcccaatgtctatactgcggtgctgttatcaggacggatacttctgagctggatcatattgttccacgcgctggtggtggttcgtctcgtcgtgaaaatttggcggcggtgtgcaggtattgtaattcgaagaaggaccggacgctgttctatgattgggctggttcggttcggttgcaggagaccattgaccgtgttcgccagctgaaggcctttaaggattctaagaaggcgaaaatgttcaagaatcagattcgtcgtttgaggcagacggaggctgatgagccgattgatgagcgttctctggcttcgacttcatatgcggctgtggcggtgcgtgagcgtttggagcagcattttaatgagggtcttgctcccgatgataagaaccgtgtggttcttgacgtgtatgcgggttcggtgactcgtgagtctcgccgtgctggtggtattgatgagcgtattcttctgcgcggtgagcgcgataagaaccgttttgacgtgcgccaccatgcaattgatgctgcggttatgaccctcctgaatcgttcggttgctttgactctggagcagcgtagccagctgaggcgcgcgttttatgagcaggggctggataagctggaccgtgatcagctgaagccggaagaagattggcgtaactttattggcctgtccttggcttcgcaggagaaattcttggaatggaagaaggttactactgttctgggtgacctgttggctgaggctatcgaggacgactctattgcggtagtgagtcccctgcgtctgcgtccgcagaatggcagggtgcataaggacactatcgctgcggtgaagaagcagactttgggttctgcttggtctgctgatgctgtgaagcgtattgttgatccggagatttacctggctatgaaggatgcgctgggtaagtcgaaggtgcttcctgaggattctgcccgtacgcttgagctgtcggatggccgctaccttgaggctgatgatgaggtactgttcttcccgaagaatgctgcgtcgattttgactcctcgtggcgtggctgagattggtgggtcgattcatcatgctcgcttgtacagctggctgacgaagaagggcgaactgaagatcggtatgctccgcgtgtatggtgcggagttcccgtggctgatgcgtgagagtggtagccatgatgttttgcgtatgccgattcacccgggttctcagtctttccgggacatgcaggacacaacgcgtaaagccgtggaaagcagtgaagcggttgagtttgcctggattactcagaacgatgagttggagtttgaaccggaagactatattgctcatggtggtaaggacgagttgaggcagttcttggagtttatgcctgagtgccgttggcgtgtggatggttttaagaagaactatcagatacgtattcgccctgcaatgctgtcacgtgaacagttgccttctgatattcagcgtcggttggagtctaaaactttaactgagaacgaatccctcttgctcaaagctctagatactgggctggttgttgcgattggcggtttgttgcctttgggaacgttaaaggttatccgccgcaataacttgggcttccctcgttggcgcggtaatggcaatctgccgacttcgttcgaggttcgttcttcggcgttgcgtgctctgggtgtggaaggctaggagagcgtgatggatagtaagtggcgtgttcttgatttcaccgcctatgagggcttcctgtcgtatgagagggggcgaatcgtggcgggggatcggagcacgccacttgctgaggtcgattttatcctccttggtatggggtgctcctggggctacggcctagtggctggactggaacgttttgatgtcgcggctgcgatttgtgattggcgtaatcagccgatttctacgttgtatcactggtctgagaatacgaaggtgtttactcgtcatgaggctcaggctgagttgagtgtaccgcgcgcgaagaatgcgtggatgcagatcgtgaaggctaagcttcgtggtcaggcgaattgtcttgacgctatgggacggccgggtgctgcagatattcgtgcattggctcgttcggtacgttctggtgacccgtcaaatgcggaggctcagggggcgcgcctgtattggggcgcgttccttccagaacagggattccgccgtcagcagctctcggatgacgtggtgaatggaatgctcaattatgggtacacgattcttcgcggtagggttttgactcgtgtgattgctgcggggttgtgccctacattgtcgctgttccaccgtcatcgttcgaatgcttttgcattggtcgatgatttggtcgagccgttccgccccgctgtggattatgcggtgtatcagctgatttctgctggttctactgaactgggcagacaggagaaggcggctctggttcaggtgttgtctgatacggtgaatgcggattcgccgtttaagctccgtacggtgatggaggatttttgttctgattttgctctctatgttgagggtaagcgtgataggttgtcggttccggtgtgggagctgactgctgttgaggagttgcatgaggatggctgatcctgtgtggttaatggtgatgtttgatttgccggtgaagacgaagaatgagcggaagttggcgaatcgttatcgtcatgttctgctggatttgggttttgaccgtatgcagttgagtgtgtatgcgaagtactatctgaatgggaatgcgacgggttctgatttgttccgtttgcaggttgaggttccgccgggtggtgcgattcgtattatgcgctttacggatgctcagtgggctgggtcgattcgtcatttggggcctgaggttcaacagatggaggataaaccggaggctttagatattttctagcggagcttcacaaaaatgagccggtgggggtagcgaccgtgtttggttgttgccccaccggctcatttttcttttcgggtctcgtttagagagggtatctgatgcaggtagggggcagtttttctctcgaaaaactgccccatttatacccctgactaggggaaatgcttgattacttaagtatatcaaggcgaataatgaaagattctcaacgaataatgaaagattctcaactgggccggggccttgagcgagtggattctaagtatatcaaggcgaataatgaaagattctcaacaccgatgtgcacggcaccgaactctacgtaagtatatcaaggcgaataatgaaagattctcaactgtacctgtctgtggacgtttcgcgcgataagtatatcaaggcgaataatgaaagattctcaaccgggtggtgcaatgaatggcgacctatgtaagtatatcaaggcgaataatgaaagattctcaacagcgccagctgatgttgcaattcgggtataagtatatcaaggcgaataatgaaagattctcaaccaatcatgccggtcatgagccagccgcataagtatatcaaggcgaataatgaaagattctcaacacctcaagcgcctgtagccgccgaaatttaagtatatcaaggcgaataatgaaagattctcaacagccgcgccgcgcaccgtgccgcgggcctaagtatatcaaggcgaataatgaaagattctcaactgtggtgggtagaccgagataacgacgataagtatatcaaggcgaataatgaaagattctcaacactgatcgcgccgagttcatggcgaacttaagtatatcaaggcgaataatgaaagattctcaacagcggtcaaggcggcatcatttagactataagtatatcaaggcgaataatgaaagattctcaactcctggaaagtgtgcccttcctccacgataagtatatcaaggcgaataatgaaagattctcaaccccctgctggtggaataacggcaattattaagtatatcaaggcgaataatgaaagattctcaacgcgcacgcaggtgcgagatgcagcagagtaagtatatcaaggcgaataatgaaagattctcaacacaagctaacctactgagagttggatgttaagtatatcaaggcgaataatgaaagattctcaacgctcctactttgttcggtcgccggggcttaagtatatcaaggcgaataatgaaagattctcaacaaaccgctgacaccgacaaggaacaggctaagtatatcaaggcgaataatgaaagattctcaagccggtattaagtatatcaaggcgaataatgaaagattctcaactcgaaacgtccgtcaccgaggtagaacataagtatatcaaggcgaataatgaaagattctcaacctaaggcaacggctaacgttgtttctgataagtatatcaaggcgaataatgaaagattctcaacaagatgcgtaaccgcctaacacagtacctaagtatatcaaggcgaataatgaaagattctcaacaccgagagaacgtgccggtcgtcgcgcataagtatatcaaggcgaataatgaaagattctcaaccttctccgcgactcgttccaccagcacgtaagtatatcaaggcgaataatgaaagattctcaactttagagaacgcggtcggagaccttctctaagtatatcaaggcgaataatgaaagattctcaacaaagaactagaactagaccccgcaaacttaagtatatcaaggcgaataatgaaagattctcaaccgctgggatacccgaacgcgattaccggtaagtatatcaaggcgaataatgaaagattctcaacccaatgaaccagtaatccttatcaggcttaagtatatcaaggcgaataatgaaagattctcaacacctgcacgaccacctggtgatttcaaataagtatatcaaggcgaataatgaaagattctcaacgaacgcggcaccaccggtcgcgcgcagctaagtgtaccaaggtgaataatgaaagattctcaacccaggcgtgatgccaggcggggcctgaataagtgtactaaggtgaataatgaaagattctcaactcagcacagatgactgacagcctttcgataagtgtaccaaggtgaataatgaaagattctcaactctgcggcggcgcgttgcgtgttgaagctaagtgtaccaaggtgaataatgaaagactctcaactcggtcagtcggtcggccggtcataaaaatagtaaacaactattgaaagattcttagccctcaatgaaagcccctccggtctattcattttaacaaatatgcgtactgctaggcataaatagcaagaatattaaaataagcccctcgacccgcagcaacaagctgcaggtcgaggggcctccttatgtattagcgttagctggtagaaaggttagcgcccgaaaactagggaaccgccccttacgccaccgccacggtgcccttggctgcggtgccgcttcgggtccacagcaggagcgccgccacgctgttgatgatgtagaagatgtacttgccgacgttcgcgaagttgccctgagtcagcgccttcacgcactgcacggtgttgtacgcgaaccagaactgccactgcatcgtcagcttcagtgcgttcagaatgttcgctgacagggacaggccaaacactgcggtcgtgatccagaacaggaacgaggtcttgccatcgtaaccgacattgttcgcaatcagatagtaaccgacatagttcgcaatcagggagaacgcgaacgaaccgaccacaataccgccaataatcagctgacccttagcgccggtcggcggttccatcgccttgccgcgttcggagttctgccacctacgaatcgcgaaggtgtacacgatgaacgttaccgggtaggtgatgatcgctgccttgttgcccagaatgtagtcaatcgcgccagacagtgccgtgttaataatgccgagcacgttgccaacgttggagaggcggccggtcaggcgggtagacatcatcgaaatacccacgttaatcacggaaatcacgccgaggggaatgaagttcgtgattgggccccagtcgacgtatttgtcgagggtggtgctcaggtatcctgaggcgattgcgatggcgatgaccagtgctacgccgaagaggtcggcgtacttggacttggcgaaaaagaggagggccttctcgattgagaattccttggcctccatgggtaactcctttgttgagaatataggaacagtgatagggtaccaataactataactctttgaaaaggggttgaattggcgtgtcacacataaaacttcagaaacccacatattccacatctcggaacaccgcggcattgggtaattcaaaatcaccccatcaaaaacccataccaacttccggcaaactttgccagataacgcccctacttcgttgaacaccgaaaatgggcgtaaaatcaccgccgtttcgtcttcgctttaaaggggaccttaaggtacgctagatgactgggtcagggaaccgtgccggtctcactcaccgcgcatccgcccgacagacacccgcaccccggtatgctacgtctcactcacgcacacaggggagggaacccaacgtatcggcctcactcaccgtttacgccgctgtccgcgcatcctgccacccgtaactcactcaactcaaacaagaactgaatag

SEQ ID NO: 3635 - DNA, 7322 bp, synthetic construct
  source 1..7322: mol_type = other DNA
  misc_feature 1..7322: note = Synthetic
catacgtgaagaccctcgccgggtcgcttaggaagcacccggcgggggtctttgtttgtcttggctagtcttcggggatctatagacccgcaaatgtctgcagtagataaggcagttaaaaacataccgcccgttcctaagaggagccggacggtgagaagtcagcatcggaaggatgccttattggtattctttctaccctgattctagcatgattttcaacaaagtaagtagagttacatcgataatttctatctttaacgcaagaatgaccaaacggagtgcgcatctatctatacggggttatggttagttttagaagggtgcgggaacacagaatgaacatgtaacacctacgctatattcgagtatttacgaaggagtaagcagacatgaagaattatggtattgggattgatgtcggttaccgctcagtgggctgtgccgctatcgagtttgatgatgatggtttccctattaagacgttgtctttagtgagcttccgtcatgatggcgggctggacatgaaaggagaaaaacctaaaattcgtaaggcgacccgtggcgttgctcgtcgtacgatgcgtatgaaccgtcgccgtaagcgtcgtctacgcaacctcgacaaggtactgtcgaatctgggttataccgtaccggaaaatcctgggcctgagacctatgaggcatggacttcccgtgcgctgctggcttctatcaagctggctagtgctgatgagctgaatgagcatttggtgcgcgtggtgcgtcatatggctcgtcaccgtggttgggctaatccgtggtggtctcttgaccagctggagaaggcgtcgcaggaaccgtcggagacttttgagattattctggctcgtgcgcgtgagctgtttgatgagaaggttccggctaatccgactttgggtatgttgggtgctcttgccgctaataatgaggttcttctacgtcctcgccgcagctacaaagcgaaggaagctaataaccctaagaaggctgagaagtacctggctgattacggcactcagccgctaatggccgcgaaggtgcgccaggaggaccagctggctgagctccgtcgtatctgtgaggttcagggtattgaggatcagtatgaggctcttcgcgaagctgtctttacgcacgtgcgtccctacgtgccgaaggaccgcgtgggtaaggatccgctgaatccctccgaaatccgcgcaagccgcgcctcgctggagttccaggagttccgtattctcgacgctgttgctaacttgcgtgtacgtactgattcccgctcgaagcgcgagctttccgaaggcgaatacgatgctgcggttgatttcctgatgtcatacacgggtatggaacagccgagctgggctgatgtggctgaggagattggcgttccgggtaaccgtctgattgctccggttcttgaggatgttcagcagaagactgcgcccttcgaccggtcgtctgcggccttcgagaaggcaatgaaggcgaagactgaagcacgcaagtggtgggaatcgaacgatgatgaccaactgcgtagcctgttcattatgttccttgctgacgcaacggacgacactgcagaagctgcggttgaagcgggtctgtatgagttgtttgcgagctggccagaagaagaacgcaaggagctctcgaatatttctttcgaatctggtcgtgcggcgtatagcgcagagactctttctaagttgagtgagtacatgcatgagcaccgtgtgggtgttcacgaggctcgcaaggccgtcttcggcgtggatgatacctggcgcccgcctttggcaaagctagaagaacctattgaccatccgacggttgaccgcgtgttgacgattttgcgtcgttttgtgctggattgtgagcgtcagtggggtcgtccgcgtgcgattactgtggagcatgctcgtaccgggttggtgagccccgctgtgcgccagaagattctgcgtgagcaggagaagaaccgcgaagagaacgaacgtatccgcggtgagttgcgtaagtcgggtgtagaaaatccgagtcgcacggaagttcgtcgtcacttggttgtgcaggatcaggagtcccaatgtctttactgcggtgctgtaatcaggacggatacttctgagttggatcatattgttccgcgcgctggcggaggttcctctcgtcgtgagaacttggctgcggtatgccgctactgtaacgcgatgaagagcaacaccccgttctaccgctgggcttccccggagaagctcaaggagaccattgaccgtgtccgccagttgaaggcctttaaagaccccaagaaggctaagatgctgaagaatcagattcgccgcctcaagcaaactgaggctgacgatccgattgatgagcgctcgctggcttcgacttcgtatgcggctgtggcagttcgtgagcgtttggagcagcactttaatgagggcctagcccctgatgataagagtcgcgtagcactggacgtttacgccggtgccgtgacgcgtgaatcccgtcgcgcgggtggcattgacgagcgtattcttctgcgcggtgagcacgataagaaccgttttgacgtgcgccaccacgcaattgatgcagcggtcatgaccctcctgaaccgttcggttgctttgactctggagcagcgtagccagctgaggcgcgcgttttatgagcagggactggataagctggactgtgatcagctgaagccggaagaagattggcgtagctttaccggtctgtacgaggcctccaaagagaagttcttgaagtggaagaaagcagctacagttttgggcaatttgctggctgaagcaattgaggatgattctatcgctgtggtgagcccgcttcgtttgcgtccgcagaacggtgcggtgcacgatgaaacgattcatgcggtgaagaagctgactttgggttctgcttggtctgctgacgctgtgaagcgtattgttgacccggagatttacctggtgatgaaggatgctctgggtaagttgaaggagcttcctgaggattctgcccgctcgcttgagctgtcggatggccgctttgttgaggctgatgatgaagtgctgctcttcccggcgaaagcagcgtcgattctgactcctcgtggtgcggctgagattggtgggtcgattcaccatgctcgcttgtacggatggatgacgaagaagggtgagctgaagttcggcatgctccgtgtgtatggtgcggagttcccgtggctgatgcgtgagagtggtagccgtgatattttgcatatgcctattcacccgggttctcagtctttccgtgacatgcgggatagcacgtgtgaggcagttgaaagcggtggagcggttgaattcgcatggattactcagaacgatgagttggaatttgagcctgctgattacatcgcccatatgaggcagaatgcgctgaggaagtttctagagttcatgccagagaaccgttggcgtattgatggttttaatgatgctggacgcctaaagattcgaccggcactattgtcttgggaacaacttccctatgaaattcaagttaaagtgaaaaccggcaccttgaatgaagccgaaaagaacctaatcaagattgttaaagatggcactcttgtatctatcggcgatttcttccaactggaaactttgaaagttatccgccgcaataacttgggtttccctcgttggcgcggtaacggtagtctgccgacttcgtttgaggttcgttcttcggcgctgcgtgctctgggcgtagaaggctaggagagcgtgatggatagtaagtggcgtgttcttgatttcactgcttatgagggtttcctgtcgtatgagagggggcgaatcgtggcgggggagcggagcacgccacttgctgaggttgattttattctccttggtatggggtgctcctggggctatggcctggtggctggcctggaacgttttgatgttgctgccgcgatttgtgattggcgtaatcagccgatttctacgttgtatcactggtctgagaatacgaaggtgtttactcgtcatgaggctcaggctgagttgagcgtgccgcgtgcgaagaatgcgtggatgcagattgtgaaggctaagcttcggggtcaggcgaattgtcttgatgctatgggacggtcgggtgctgctgatattcgtgcgttggctcgttcggtgcgttctggtgatccgtcaaatgctgaggctcagggggcgcgcctgtattggggcgcgttccttccggagcggggtttccgtcgccagcagctttctgatgatgtggtgaatggaatgctcaattatgggtatacgattcttcgtggcagggttttgactcgtgtgattgctgcgggtttgtgcccgacgctgtcgctttttcatcgtcatcgttctaatgcgtttgcattggttgatgatttggtggaaccgttccgccctgctgtggattatgcggtgtatcagttgatttctgctggttctactgagctgggccggcaggagaaggttgctctggttcaggtattgtctgatgcggtaaatgctgattcgccgtttaagctccgtactgtgatggaggatttttgttctgagtttgctctctatgttgagggtaagcgtgataggttgtcggttccggtgtgggagctgactgctgctgaggagatgcgtgaggatggctgatcctgtgtggttgatggtgatgtttgatttgccggtgaagacgaagagtgagcggaagttggcgaatcgttatcgtcatgttctgctggatttggggtttgatcgtatgcagttgagtgtgtatgcgaagtactatctgaatgggaatgcgacggggtctgatttgttccggttgcaggttgaggttccgccgggtggtgcgattcgtattatgcgttttacggatgctcagtgggctgggtcgattcgccatttggggccggaggtgcagcagatggaggataagccggaggctttagatattttctagctgagcttcataaaaatgagccggtgggggtaacgactgtgtttggttgctgccccaccggctcatttttcttttcggatctcgtttagagagggtagctgatgcaggtatggggcattttttctctcgaaaaactgccccatttatacccctgactagggaaaatacttgattacgtaagtatatcaaggggtatttagaaagaatcccaacatcgtgcgcattggcgctgtcggcggcataagtatatcaaggggtatttagaaagaatcccaaccgcggagaagactatttgcgctctgtcgtaagtatatcaaggggtatttagaaagaatcccaactggttcattgtcggtgaggatgtacctataagtatatcaaggggtatttagaaagaatcccaaccttctagttgccggtatcggtgccgctgtaagtatatcaaggggtatttagaaagaatcccaacagtcaaaccttcgcgaagcgtcataatataagtatatcaaggggtatttagaaagaatcccaaccgagttcaaggcgataccgtcattgatttaagtatatcaaggggtatttagaaagaatcccaacttcgccacgctggtgccgaacatgacgttaagtatatcaaggggtatttagaaagaatcccaacgcaagtcgcgcaaatattcacccatcgctaagtatatcaaggggtatttagaaagaatcccaactctactaggcacatagcagtggcctctctaagtatatcaaggggtatttagaaagaatcccaacctggtcagagtagcccgcaaggggtcggtaagtatatcaaggggtatttagaaagaatcccaacagtgccgcgatgatggtcggttccgctgtaagtatatcaaggggtatttagaaagaatcccaacagtgccgcgatgatggtcggttccgctgtaagtatatcaaggggtatttagaaagaatcccaaccggaatttgtcgctgattccgacgcggataagtatatcaaggggtatttagaaagaatcccaacaccggcgcagactatatcgattcggtcataagtatatcaaggggtatttagaaagaatcccaacaccaatctgaatgaccgccacaatgatttaagtatatcaaggggtatttagaaagaatcccaacaacgtttcagctccacagcgtgcgaggataagtatatcaaggggtatttagaaagaatcccaacgcggtggacgtgtcccctatgatttcggtaagtatatcaaggggtatttagaaagaatcccaacaagttcggctgcatcgatttgcgcagagtaagtatatcaaggggtatttagaaagaatcccaactttgtgtggtgtgcccctgaagccggaataagtatatcaaggggtatttagaaagaatcccaacatatggttattgtcggttagtgtgttcctaagtatatcaaggggtatttagaaagaatcccaactcgcgtcacgaccaatcgccgccagacgtaagtatatcaaggggtatttagaaagaatcccaacctacggcaaaacgtatggcgatcaggtcgtaagtatatcaaggggtatttagaaagaatcccaactgagccggtgccgactgtggctccgacgtaagtatatcaaggggtatttagaaagaatcccaatagagagggagtcctgccctgtgtgcttctaagtatatcaaggggtgcatataaaaaaggggggaaattataaagcttttattgaagctttgcatattgttattgaaaattatgtattttgagatttgtaagaaaaaaatatcgaatctggtgtatatatgagacccctcgacccgcagcaataagccgcaggccgaggggcctcatcgtgtgttagcaatcggggcgaagaatcgctggtaccgggggcactaggcagccaccaccgcctccttgtccgcggtgccgttgcgggtccacagcaggagtgctgccacgctgttgatgatgtagaagatgtacttgccgacgttcgcgaagttgccctgggtcagcgccttcacgcactgcacggtgttgtacaggaaccagaattgccactgcatcgtcagcttgagcgcgttcagaatgtttgctgacagggacagtccaaacaccacggtcgtgatccagaacaggaacgaggtcttgccatcgtaaccgacatagttcgcaatcagggagaacgcgaacgaacccgccacaatgccggcgataatcagctggcccttc

SEQ ID NO: 3636 - DNA, 4610 bp, synthetic construct
  source 1..4610: mol_type = other DNA
  misc_feature 1..4610: note = Synthetic
ggttcagggtattgaggaccagtacgaggctcttcgcttgggcgttttccaccataagcacccttatgtgccgaaggaacgtgtgggtaaggaccctctgaatccttctacgaatcgaacgattcgtgcgtctctggagtttcaggagttccgcattcttgattcggtggcgaatctgcgtgtgcgcactggttctcgtgcgaagcgtgagctgagtatgatgcggctgtcgagttcttgatgaactataccgataaggagcaaccgagttgggctgatgtcgctgagaagattggtgttcctggtaaccgcttggttgccccggttcttgaggacattcagcagaagacggcgccctttgaccgttcgtcggcagcctttgagaaggcgatgggcaagaagacggaggctcgtcagtggtgggaatctactgatgatgaccagttgcgtagtctgttgattgcatttttggttgatgcgacgaacgatactgaagaggcagctgctgaggcagggctgtctgagctatataagagctggccggctgaggaacgtgaagcgctctctaacattgattttgagaagggccgtgttgcttatagccaggagaccctctcaaagctgagcgagtacatgcatgagtaccgtgttggtcttcacgaggcccgcaaggctgtcttcggcgtggatgatacatggcgtcccccgttggataagctggaggaaccgacaggtcagccggcggttgatcgcgtgctgacgattctgcgtcgttttgtgctggattgtgagcgtcagtggggccgtccgcgcgctattactgtggaacatgcccgtaccggcctaatgggacctacccagcgtcagaagattctgaatgagcagaagaagaaccgcgcggataatgagcgtattcgcggtgagctacgtgaatctggtgtggataatccgagtcgcgcggaagttcgtcgccatttgattgtgcaggagcaggagtgtcagtgcttgtactgcggcacaatgattacgacgactacttctgagctggaccacatcgtaccgcgcgctggcggcggttcctctcgtcgtgagaatttggcggcggtgtgccgtgactgtaatgcgaagaagaagcggaagctgttctatgcatgggctggtcctgtgaagtcgcaggagactattgagcgtgttcgccagttgaaggcctttaaagaccccaagaaggcgaaaatgttcaagaatcagatccgtcgtttgaggcagactgaagctgatgagccgattgatgagcgttcgctggcttcgacttcgtatgcggctgtggcggtgcgtgagcgtttggaacagcattttaatgagggccttgcccccgatgatgagagccgtgtggttctagacgtgtatgcgggttcggtgactcgtgaatcccgtcgcgcgggtggcatcgatgagcgtattttgttgcgcggtgagcgtgataagaaccgttttgatgtgcgccatcatgcggttgatgctgcggtcatgactctgctgaaccgctctgttgctttgactctggagcagcgtagccagctgaggcgcacgttttatgagcaggggctggacaaactggaccgtgatcagctgcacccgggagaagattggcgtaacttcaccggcctgtacccggcttctcagaagaagttcttggaatggaaggacgccgctacagctctgggcaatgtgttggctgaggctatcgaggatgactctattgcggtggtgagtccgcttcgtttgcgtccgcagaatggctcggtgcacgatgaaacgattgatccggtgaagaagctgactttgggttctgcatggtctgctgatgatgtgaagcgtattgttgatccggagatttacctggcgatgaaggatgcgttgggtaagttgaagaagctccctgaggattctgcccgctctcttgagctgtcggatggccggtttgttgaggccgacgatgaagtgttgttcttctcgaagaaggctgcgtcgattttgactcctcgtggtgcggctgagattggtgcgtcgattcatcatgctcgcttgtacagctggctgacgaagaagggcgagctgaaagtcggtatgcttcgcgtgtatggtgcggagttcccgtggctgatgcgtgagagcggtagccgcaatgttttgagtatgccgattcaccggggttctcagtctttccgggatatgcaggacacaacgcgtaaagctgtggaaagcggcgaagcggttgagttcgcgtggattactcagaacgatgagttggagtttgatccggctgactacatcactaatggtggtaaagacgagctgaagcaattcttggagtttatgccggagcgccgctggcgtgttgatggattcaaggattctgggcgtctccgtatgcgtcctgcactgttgtctcgtgagcagttgccaagcgagattcaggctcgattggacacaaaatctctcagcaagggagaaactgtgttggtcaaagcgttggatgatggcctttatatctccattggaggattgttgcccctagagagtatgaaggttattcgccgcaataacttgggtttccctcgttggcgcggtaacggcaatctgccgacttcgttcgaggttcgttcttcggcgttgcgcgctttgggcgtggaaggctaggagagcgtgatggatagtaagtggcgtgttcttgatttcactgcctatgagggcttcctgtcgtatgagagggggcgaatcgtggcgggggagcggagcacgccacttgctgaggttgattttatcctccttggtatggggtgctcctggggttacggcctggtggctggcctggaacgttttgacgttgctgccgcgatttgtgattggcgtaatcagccgatttctacgttgtatcactggtctgagaatacgaaggtgtttactcgtcatgaggctcaggctgaattgagcgtgccgcgtgcgaagaatgcgtggatgcagattgtgaaggctaaacttcgtggccaggcgaattgtcttgatgctatggggcggcagagcgctgcggatattcgcgcgttggctcgttcggtgcggtcgggcgacccgtcaaacgctgaggctcagggggcgcgcctgtattggggtgcgtttcttccggagcagggtttccgccgtcagcagctttctgatgatgtggtgaatggaatgctcaattatgggtacacgattcttcgcggcagggttttgactcgtgtgattgctgcgggtttgtgcccgacgttgtcgctgttccaccgccatcgttctaatgcgtttgcattggttgatgatttggtggagccgttccgccctgctgtggattatgcggtgtatcagttgatttctgctggttctactgagctgggtcggcaggagaaggctgctcaggtgttgtctgatgctgtgaatggtgattcgccgtttaagctccgtactgtgatggaggatgtttgttctgagtttgctctctatgttgagggcaagcgtgataggttgtcggttccggtgtgggagctgactgctgctgaggagttgtgtgaggatggctgatcctgtgtggttaatggtgatgtttgatttgccggtgaagacgaagaatgagcggaagctggcgaatcgttatcgtcatgttctgctggatttgggttttgatcgtatgcagctgagtgtgtatgcgaagtactatctgaatgggaatgcgacgggttctgatttgttccggttgcagattgaggttccgccgggtggtgcgattcgtattatgcgttttacggatgctcagtgggctgggtcgattcgccatttggggccggaggtgcagcagatggaggagaagccggaagcgttagatattttctagcggagcttcacaaaaatgagccggtgggacagcgaccaaacatggtcgctgccccaccggctcattttttcctttcggacctcgtctagagatgagctccgaggcaggtatgggacagtttttctcttgaaaaactgccccatttatgcccctgactaggggaaatacttgattacttaagtatatcaaggcgaataatgaaagattctcaacctttaccccggcgcggctctatcacccgtaagtatatcaaggcgaataatgaaagattctcaacgagcaggccattgtgaacggcgattttgtaagtatatcaaggcgaataatgaaagattctcaacgacgaccagggatgccagctgcggaatgtaagtatatcaaggcgaataatgaaagattctcaactatggattcacagttgctttcaaatctttaagtatatcaaggcgaataatgaaagattctcaaccaaaaacggcattgttcaccgtgaaatctaagtatatcaaggcgaataatgaaagattctcaacgtctccgctgtcggccatgcgcttaatataagtatatcaaggcgaataatgaaagattctcaaccggtgctcaccctcacgtagccgtagattaagtatatcaaggcgaataatgaaagattctcaacgccaaaaacatggtgtccaggcgt

SEQ ID NO: 3637 - DNA, 23375 bp, synthetic construct
  source 1..23375: mol_type = other DNA
  misc_feature 1..23375: note = Synthetic
  variation 14906..14958: note = note, n is a, c, g, or t
agagttcgacgtgcagctccggcttggtcgacttggtcatgaacgtgttcccgcaagaacacgtcaccttggagtcgacgtactccgggtggatatcgttacgcacttccggttcacctccgaatatgcgcctggtttccgaccaggcgccgggacagccgggctaggataacacctcggtgtcccgcgggcaatctacgtcacgtgctttacaggtcgatcccgttggtattgcgcttgtcctcggccttgcgtgccatcttggtgaggaactccgtgttagactgcgtctgcttgaggcccttgatgagcatatcgagcgcacgctccgaggaatcgacaccgtgaaggatcctgcgcaggccccagacgaacggcgcctccatcggatcgaggatgagctcctccttgcgggtacccgaggtgacgacgtcgatcgccgggaagatccggcgatcggccataccgcggtcgagacgcagctccatgttgccggtgcccttgaactcctcgaagatgacctcgtccatcttggagccggtatcgacgagcgcggtggcgaggatcgtgagcgagcctccgtgctcgatattgcgcgccgcgccgaagaacttcttcggcgggtacagcgccgtcgagtcgacaccacctgacaggatgcgtcccgaggcgggagtggcgaggttgtacgcacgcgcgagtcgcgtgatcgaatcgagcaggatcacgacgtcgtagccgctctcgacgaggcgcttcgcgcgctccatgacgagctcggcgacggcgatgtggttctcggaaggcatgtcgaaggtggaggaaacgacctcgccgtggatggagcgctccatatcggtgacttcctcgggacgctcgtccacgaggaggcacatgaggtagacctcggggttgttcgcactgatggcagcggcgatatccttgaggaccgtcgtcttgccggccttcggcggcgacacgatgagaccgcgctggcccttgccgatcggcgccacgaggtcgatgacgcggaccgtcatgaactgcgggccgtgctccagacggagacgatcgtcagggtagaccggtgtgaggtccttgaagttcttgcgatgcttggcggcctcgggctcaagaccgtttatcgcgctcaccttgaggagcgccggatacttctcggactccttgggtgggcgcacctgacctttgatcaggtcgccacgccgtagctcgaagcggcgaacctgcgacatcgagcagtacacgtcgtggtcgcctggcaggtagccggacgtacggatgaatccgtacccctcgggcaggacgtcgaggatgccgacgatatcgatgaatccctcggctttgaccttcgcctcgtagacggcctcgacgatctcgtccttcttcttgagtgccttgacgtcgaggtcgatctccgcggccatctgccgcaattccggcacggtcttggcagcgagctcttctttggtgatcgagggtgctacctcggactgcggggcaccgccgcggcggccgcgcttgcgtggacgagcactcatgcgttcttcactttctcccagtcggccaggaaggaatccaggcccctatcggtcaaaggatgcttcaccagcttctccagcacgttgaacggcacggtggcgatgtcggcgcccatgagggctgccttcgtcacgtggttcgcgctgcggatcgaagcggcgatgacctcgacctggtggccgaagtcgtagttgctcagggcggcgacgacctgctcgagctgatcgatgccgtcctcggagatgtcatcgaaccggcccacgaacggagacacgtacgccgcaccggaccgagcagcaagaatcgcctgcgggaccgtgaagcagagtgtcatgttcaccttgatgcccttgtcgaagagcgccttggtggcagccaacccctcgggcatcgtcgggactttcacgacgagattcggagcgatctcggcgagctcaaggccctctcgcacgatctcatcgcgcttgaggcccacggtctcgccgctcaccgggccgtccacgatgtcgcagatgcgcttcaggtgaccgtggaagtcggcgagcttgccgccctcgcgggcgtagagcgtggggttggtggtcacacctgcaagcacaccccagcttgcggcctcttcgatctcggcgatgttcgcagtgtccaggaagaacttcatgtacgactactctccttccgtcgcaggatccatctgcgacgacgctgtccggtcctctccgcggatagccgcgttgacgacgagctcgagcacctcggcgaccgttcggtcgagttggtgactgtggacgatcgggactccatgctccacggccagatcctcgatgtaccttccaaggagccggatgttcccgaagttcgcccggtacttttcaaacggacgtgtgccgtccgtttggacttccctgatgtagaagtggctccggtgggcctcttcgtcatcgaccgtcaccagcatctgaacgacggacgcgttcttgaactgggaaggctcgatgtagcccggaaccatgtgaacgccctcgatgacgagactctcgccttcgaccgatgcccgctcgatgagcgacctgatgccggtgataacggcggcggtctgctcgcggaagccgacgatgacgggattcgcaccgtgggggacgggtaccctcagtccgcgccacgcgttgaacgagctttcgtagatcgctggcatgaggtcccgcgtaaagataccacgcatcacctctcgaatggaatcggtagagacaatccgggtgataccgaggcgatgggcgatctccgtagcaatcgtggacttgccgactccggtggtgccgccgatgagaatcacaagcggccgatccaggctcgcgagctcccgtagcttcatgtagcggcgggcgaactcggggccagcctgctcctcaaggaccgccaccgccatcgattggatctcttcaagcgatacctctcgaaggtcacgttcgcgcatctcatcctggatgcgctgtgccgcgaggtatgcacgggctggcgacagaccggttgcggtgaacgactgcgccatcagacccttgctgtacggaagcccgtgcttctcatccttgatgaggatcggggggttcgccgtcggcatcaatcactcctcggactcccgcgccggagcgcgagatctgctgacatgtcgataaggtcgtcaacgggcagtcccccgagcgccaccggaacgttgtcgcacagcaccgtgggcactcccgcctgcacgccggcagccgcgaccacgtcgatcgcggcggccttcagctcgctcagcaagacatcgaaggtgcctgcagcagcgtcaagatctgcgcgtagcaacgcgcggttcgagagatgcggactcgccgcgatcacgatgcagccatgctcggcctccaggtgacggacgagtctgggcagaagcgctgccggggccgtcgtcgcgaagaacacgcgcttcccggcaacagagtgcagcggcgccggccggaacccgaccgtcgccaccggaaggtcagggcgctgaatggcgatagcggcgagcatcgcctcgacctgggcggcggaagcaacgggttcctcggcaccggtgagcacgacggcatcggcgcgctcgagccggaagggaccgaagtaatcccgcacgtagccgggaccctggccagcgccgatcaccaggatcgtcgcgtcggcggcaaccggcggaatcgcggcgcccgacccctcgagcatcacaagatccatgcccagaccgtcagccagccgtgcgccctcgggcacgttgctgaagaaggtgtcgcccgccatgccgccgccgcagcgtcggcaaccgaccgttgcaacgcgactcatcacggcgtcctcgtagttgtccgaggacgcgtgtttgccctgcgccgcaagcgccagaaggtcctcggtggagagctctatctcgtcgccgcggatcagctcgggctcggcagggccgccccggcccatcgccagcacgacgacgcgctgtcctttggctttcagatacctcgccacgtatgccgagaaccccgtcttccccactcgcttcccggtcccgacgactgcaagcgtcggcgtgcgcaagtcgagcttcgggcatggtggtgtgaagaggaagtcggcgccgcggtatgagacgcccgccccgagcgctatcgacgcgaggcggaaccgctcggccgcgctcacgaccggctcgtccgagaggtcgacgaccgcgtgcgggctgtaccgcgctatcgcggtgcgcagggcctcctcggctgtggatgcgaagaccaccgggaccccgtagatgtcgggatccgatgcgtccaccttctcggtaccaccgataaaagcggcggtgacgatgtcgaattcagcggcgagcgcactgagcgcggcccgaacgacaggcggatagtgctcgccgtcgatgagagcgaccaccgtgctcatctcgggtcacctcccgatgcgggatgccagacgcactcacgccgcggtgatcgctcgaaatccgcgaccggctccgggtcgccgaacgggtgcttgagcacgacgcgcacgcggtccgggtagatctcgatgatgttgtacgaggcctgggtgttgccacgaagccgatgcgtgcatgcggtgcctgcattcacgacgaccatgctctccaggcgccacacatgcggcacgtgcttgtgcccgcacagaaccatgtcgcacccgcttgaggtgagcacccgcagcaggtcgcctgcgtcaaaaacgatgttgcgctcgcggccggtacccggcacgggaaggaggtggtgatgcaggcagacgatcttgaactcgtctggatccgagaagcgctcctcgatccagcgataccgctcgcggccgacgcgaccgccatcgaggtccggctccgaggagtcgagcccgagaatccgcaccccgggcaatcgcagttccgtcgaacgcgcgccgaagagctcctcgaagtgcatgtcgccgacgttgcgtgcgtcatgattgccgagcagcaccatcgcctgttcgacggccatgcgcgagatcaggctacgcgccgccttgaactcctgccggaagcccatgtcggtgaggtcgcctgtcaccacaagcacgtcaggatcgaggtcgttcacctcatcgacgacgcgggtggcgagactcggtatgtggtaccgcgagccgcagtgcagatcggagacctgcgcgattacgagtggcttgacgtcgctcatggaatcctccggtcgcagagacaaccgtggaacaagcggtgggaatcggggacatccctattgttcccagataacggacgttcacgtcaagggcagcgacgccgcttcctcacacggcatgcgacctgggcggtcgcaacagcaacgcctcgcggaagaccgcgatcacgagcccgagcacgagaccgaagacgagcgccccggcgatggtagcgccccgccgacgcaccggcgagatatcgggtgccttcacgtttccattgtagtagtaggcgttgcggagcgtgcgaagtgcgagcgtgtcttcgtaaaggcgcatgcgcatctcccactgcgtgcccgctgccgccagcttgaacgcctcgtccgcgttgcgaccggcctcggagctgatcttcagcacctctttgagcgctcgctgggtctcgctcacacgacgctgcaactcccagatctctttgccgccgataacaccggcacgctcggccgcatagccggccgcgatcgtggcgactcgtgaagccaaggtttcgtccggcgattcgaatgtaacgataagctggctctgcgggtcatctcgagtcgacgcccgaagcccggcggccaccgtctcgctcggcacgaccgcgcggcttgccacctcggatgagaattctgcgctcgtgacctcccggatcatggcatccggcttgggaaggtcggggaacttcgagagcgtcggcgcgtcgatgacgatcacggcgcgcccttcgtacagcggctcaggattcgccgatgcgatgccgagcgcgatcccgccggcaagcaccatcacaacgacggggatccaccactcgcggcggaccgcttccagaaacgtgggatgggcattgtcaggcaccggggacctccctgcgatggaccgatacggctgccagaagcgccaggaacagccagaggtactcgaagtacagatagtactggaagaacgactcgacgaccaaagcgacggagccggcgagcaccgctgcgctcacgcccggatacccgcgcaggtgcacccgacgccacgcgatcgcgatgcccgccacaatgacgagctccgcaagcaagccgagcagccccatctcgacccacagtgccaggaacagctggtgcgggtggaggatccgagcgagcgaacccggttgccgatacggcggatacgccagctcgaacccgccgagaccggtgcccccgagccagtactggccgagcatctgaacgctcgagaccaccatgagatagcgggtggagagcgagccgctcgcttggggctcgaagatcgtggcgactctcgcggtgatcgacgacggcaggaacggcaccgccgcgacagcgatgacgacagcgacgatgatgagcttcttgcgcctctcggcaggagctgtgagaagcacgagcaccgcgccgaccgcgaaaccgacccaggcggttcgggagaacgtcacgagcatgccggcagccgtgatggcacccggcacggcccacacgagcccttcatgccacgaacgcgcacgcacgagcatcgctccacacgcaagcgctgcggccgagaggtagccggcgaggaagttggggtcgaggaagaacgccgccggccgaacgagcaacgcagtcgattcgaggccctgcgtagcgatccttccgacgccgagaccgggcagtaggtactgcaccgcctcgacgcccacgagcgcgaccgcgacccacaccagcagacgcacgagcgagaacgccccttcgggggtagatgcacgccacatcaccaccatcgcgaggaggaagagcgcgagaagccggaacgtgttgaaggccgtcgtcgcgggtgcaagcgatgcgatgagcgaaccgaggccggcgaccaccagcagtccgagcccaccgagaagcggcgtgaaagccggaagcgccgtggagcggtcccgaaccaccctggcgagccagccgaggatcgttccgccgagcaacacgtgtgcggcagtgaacggtgcgctcggcggaccgagcgtcgcgaagtcgaaaagcgggatcgccatgagcaggagcacgagaccgctgcgcggactcgccagcgccacagccgcgagtgtgaccgctatcgtgcccgacaagagcacgcccgcggtcggccactgcacccccgcgaatgagaggaacgccgcaagcgccgaggcgaggacgattgcccctgcgagcgcgagataccgccacgcgcgccggcccgtgggccgtgcttcatgggcgatcgcgtgcgacacgtcactcccctccgggcatcagtgcactgtagcgccctcgcggtcgatgctcagtgcgaacacatgccgtccgccaagccctcccacgcgggtcgccacggcgcgggcttcttcaagcgcgaggtcgtcgccctcggccaccgcgactcccaggacggtgggtccggcaccggagagcaccgcgcccacggcgccggccgagacgagcgcgtcgcgcgtctcggcgatgtcgggcatcagccgttcgcggtacggttcatgcagccggtcggcgagcccggccgcgatcaggtcgctgcgccccagcgtgatgcccgcggcgagcaggcccgcgcgtcccgcagtgaaggccgcgtcgacgtgaagaaccgtctcgggcagcgcatccctggcttcggtggtcaagaacgcgacgtcgctcagcgcgaccacggcggcaactccggctcccggctcgactctggccgcatgccacgcgtcatcgcgccagcacagcgtgaacccgccgaagaccgcggcggcgacgttgtcggggtggccctccaactcggacgcgagctcgaagatgcgctcccggccaagctccgaacccgcgatcagatcgccgaggagcagtccgccgacgatcgccgctgccgaggaacccaggccgcgtccgatcggaataccattctcgcatcgcacggccgccgcgccggagtagccgacggtggcgaagagatggcgcatcgacctgacgacttcgttgccctcgtctgtgcgaaggacgccttctccttcgccgacgacttccaccgtccactcctcggcaggctcggcttcgaagacgtcgtagagggcaagcgccagcccgaacgcgtcgtagccgggaccgaggttcgcggatgtcgcggggacgcggacgcggtgcgtcacgatgccctcacagctcctcgacccggatgatcgcgttgatcgaatcgacgacgtcgagcgcgtcgatctccccgagcgccgcacgcaccgcccgctcggagccgcgatgcgtgacgtagacgatctcggcgcccttctcggtggtccgcttctggatgaccgaggcgatcgagacgccgtgatcgccgaagacgctcgccaccgcagcgagcaccccgggctcatcggcaacgagaagccgcacgtagtagcccgtctcaaggtccccgatatctcgcacagggagctcctcgtggcaggtgcagcccacaagcgcgaggcagccactctggatgtgccgcgcaacctcgatcacatcgccgacgaccgccgaggcggcaggcagggagcccgcgccctcgccgaagaacatcgtctcgcctaccgagtcgcctacgacgtagatggcgttgtacacacccgagaccttcgcgagcggatggcccgagcggatcatcgtcggatgcacgcgaacgtcgatgctcccgtccgcacgccgggcgatggcgatgagcttgatcgtgtatcccatctcggcggcgtacgcgatatcttcgggcgcaagcgagcggatgccctcggcgggcacttgcgcggaggtgacccgggagttgaatgctatcgaggcgaggatggcgatcttcgcggcggcgtcgagcccgtcgacgtcggcggtcggatccgcctcggcgaacccgcgctcctgggcctcaagcaacgccgcatcgtagtcgaggccgtcctcggccatgcgggtgagcatgtagttggtggtgccgttgacgatgccgtagacggccgtgatctcgttgctcacgagcgagtgcttgagcggcccgatgatcgggatgccgccaccgacggccgcctcgaacatgatgtcgacgccgcgcgtgtcggccgcatccatgacttcgcgaccattgctcgccatgagcgccttgttcgcagtgacgacgctcttgccagcggagagcgcgccgagcacgatgtcgcgagcgacgcccgtcccaccgataagttcgatcaccacatccaccccgggatcgccgagaatgtccgccgcgtcagtggtgcacgcttcggcgggcagaccgagctcggcgaagcggtcggcgttgcggtcggcgaaacgcgagagctcgatgtcgacgccggcgcgtgtggcgaagtcagcgcgatgacggcgaagtatctcgacgacgccgctgccgacggtgccaagtccgatgaggccgacccgaactgtacgcatgacatcctcctggaagctcgatccgcacgcttctcggcgctgcggttctcacattgtaccggagcctatgagagaagcctcaccggactctcatcgactgctcataccgcctcccgatagcagtcgaagcaatccggtgagaggcgcaccggtcgttgttgcaccgtgtcagaggacggtggtaccctcgtcctgcgctcgcaaatccagtgtctcgtaccatttcggagtgtggcgggcttgctaggataagcgaaagcgtaaggcgccgccccgttgacctcggtcagcggggcgtccttcttgcccaccgaaagcatggcatttgtctatgtcagaccgttccggcaatctgtaaagcggcatgtcgccttggttcggggggtctcatggggattcacgtcggtctggacattggcatcgcttccgtgggttgggcggttcttgaccctgaagccgagcgcatcgagggtcttggtgtccgtacgtttcctagagccgagaacccgaagaatggcgcctcgctcgcgctgcctcgacgtctggcgcgttcgagtcgacggcggctgcgcagacgccgcaatcgtatgcaagacttccgggggctacttgtgtccactggcatgatctcggccgacgacatggatgccgcgttcactcccacagccggtgatccgacgccgtaccagctgcgggcggaggggttggaccgtaagctgaccgaggttgagtgggcgcgcgttcttagccagatctgcaaacgtcgcggctatcgctcgatgaagatggcggcagaatccgcctcatcgaaagacgaagacggcgtcgtaaaggccgcgatcgctctcaacgaagcacacatgattgagcatcactacaggactgcgggtgagatgctgtggcttgacgagcgcttccaggaatcccgccggaacaagggggactacaaggcggtgctatctcgtgaactcgtgttggacgaagtcgcccacctattcgaggcacagcgcatccacgggaactcacacgcgacaccagccatcgaggccgcctaccttgagatactgcagcgccaggcgacgattctggaaggcgacgaactgcgcgccagggtgggcctttgttcaatcgatcatgtcaaccgccgaattccgatcgcgtgtcccacgttcgagcggtttcgcatggtcgacaagctgcataacgtacggtacacagtgagcccttcggggagcagagtgaacctcagtgtccctcagcgcgatgctgtcatcgagaaggcgttcgggaagaccgcgagactcacgtatgccgacatccgaacgctctgctcgctgcctgataatgcccggtttgtcggagtgcgctacggtcgtgaagagggtgatctcgcggccgagaagaaggagacgattcccctccccagggcatggcacgagatgcgaaaggccctggccagtctcccgccagagttgtgggcaacgctctcaagcgacatcgatctgctcgactcagtcgcagaggtcctaacctactacaagtacgagacctcgattgccagggagctgtcgggtcttggactgcccgaagcagccgttgcagccctcacgcagctgcgcttctccggcaacgcccatctttcacgcagcacgctgcgcgcgattctcccccacatggaggctggtctttcttactccgaggcatgcgaagccgctggtctccatcactccaagcgcactggtggcgagcgccacgcgaagttgccgccaattccaactgacgatctcaggaatccagtcgtcctccgcgcgttgacgcagacccggaaggtcctgaacgcgattatcgatgagtttggatcaatagaggagttgcacgtggagctggcgcgcgatgtcgcgcgctcgtacgaagaccgtcggcagattgagaagatgcagaaggacaaccgtgccagaaacgacggagtcctcgaggacctggcatctgaatacgggatcgagaaccctcgcccgctggatatcgtgaagttcaagctctggaaggagcagggtggtcgatgcgcctatagtggcgactacatcgatccaaagcgcatgctgaatggcgagcccggcgtggctgaggttgaccacatcctgccgcattcacgctcatttgatgacggctacatgaacaaggtgctcgtcacagcatccgagaaccggaagaagcgcgagcggactccgttcgagtacttgggcggcgacgaccaacgatggcacgagttcgaggagcgcgttctcgcgatgcatctgcggcgtccgaaactggagcgtctgctgcgcagggactttgacgagcgcgcctccaatgagttccgcgaacggaacctcatagacacgcagtacatcgcgcgcttcttcaagaacttcgtggaggagaacctgcgcttcgcaggtgagggcaaggcgccggtggtcaccgtgaacgggcgcgccactgcatacctacgcacggcgtggcagctacagaaggtgcgcgccgatggcgacctgcaccatgctcttgatgcagccgtaatcgctgccaccaccagaagcatggtccagaaggttagccgcttcttctccgtgcgcccactccgcaacccagacggcgtctatgtggacgccaccacaggcgagatcatcgcagcgaaacacgttcctgaaccttgggtgggcttcgcggcggaccttaaggatcgcctctcggcgcgcttcagcgacgatccgttcggcgaactcacggatggaatgcgtgaacccgtgcccatcctcgtcagccggatgccgaaccgaaccgtccgaggcgaggtgcataaggagaccgtgaagcgcgtcgagggccaggacgcgaaaggtcgaatcgtcacgagcaagaacgtgcgtctcacagatctcacgccgaagctgttggagaagatggtggggcgtgaacaagaccgcgcgctctacgaggcactggggtctcggcttgcacaattcggaggggacgccacgaaggcgtttgctgagccgttctacaagcccacccgtgccggacgcgccgcgccgcgcgtcaagtcgatccgcgtgtatgacgaaccatcgagtggcggcacagtagtgcgcggcggtttcgctgacaacggcgagatggtcagaaccgacgtcttcgaacgcgatggcaagtactacctcgtgccggtctacctcaaggacactgtgacaaaagaactgccgagcagggcgatcgtcggcggaaagccagagagcgaatggcgcttgatggacgaatcatacagattcgcctttagtctttgtttgaacgacccgataaggcttgtgcggaggacgggggatcaaacggttgctgtttctggctacttccgcggctcggatcgctcgactggtgccattcatattgaggccgcagactcatcttggctgaagcgcggccagggtgtcgcccagaacgtcgtgaccttcgagaagtggggtgttgacgtccttggaagagcggctcaccgcgtgaagcaggagaagcgctgtggcttttcgaacggtggtgataagcaatgaggccgaactgcacgtgcagtccggacagcttgtcgccgttcaggcgcaaacggtctggattccactcgaagacatagctgttctggtcctggaacacccgcgcacgaacatttcggcggcggcgctgtcgcttctcgcggagcagggcgtcgccgttgccgtgtgcgacggcaagcatatgccgaccggtctgctgcttcctcactgtcggcacagcaggcaactcgcggtcacgcggcagcagcttggccagactctgccccaacgaaagcgtctgtggcagcggatcgtccgctccaagatcgagaatcaggccgcctgtctggagcttctcgacctcgggggcgctgcgaagctgcgcgagtacgccgccgctgtgcagtcaggcgatgcatcaggcatggaggcagcggcggcgcgtctctattttcgtcgactgattcctgacgccacgagaagatcaccagagggtcctggcgcatcactgaattacgggtacgcgattctccgggccgctgttgcacgcgcacttgtcgggcacggcttctaccccgcgatcggcgtccaccatgacagtcaactgaatgcgttcaatctggcggacgacatactcgaaccgtaccgtccattcgccgactatctggccgtcagccgcagtgtcgatgtcaaggtacgcactggcagacagaccttggtctccgtacttcagctctcatgcagtctgcaggacaggctccactcgatcttgacggccatcgaggcaacggcctcgagtcttgccaaggccatgagcgagaaggacgccgcgcttctcgccgttccgcgtctgtcggcgccgtgtctcgtggcggaactgctgccggagtaacacaggtgaaagccatgcgactcatcgtgctgttcgacctaccggtcaagacgaagccgaacaaacgcgcctaccagcagtttcacaagttcctgatctctgacggctacgcgatgatgcagctctcggtgtatagtcgagtcacgaacggactcgatggggttcagaagcatcttgcgcgtctgaaggcgaacctcccgccgaggggcagcgtgcgagcaatgacggtgaccgagaagcagtacgagtcgatgttgttcctcgtcggaaaaccgacgatccaggagaaaaccgtggcatctcaaatgcagatttggctatgaagcaacgattttgtccgatagagaccatgaaaggcgctgctcagcagcgcctttcatggttctcgagcgtaccacttcggagtgtggcggggagctaagacgtatccgtgtcatcgtgtccctctttcctcagcgtaccacttcggagtgtggcggggagctaagactgatgcagtgtgatggaacgtgcgacaaaaagcgtaccacttcggagtgtggcggggagctaagaccgaacgggccgaggtagtacgtcggcgagaagcgtaccacttcggagtgtggcggggagctaagacgagctcggcctctgctgccgctgcagcatcagcgtaccacnnnnnnnnnnnnnnnnnnnnnnnnnnnnnnnnnnnnnnnnnnnnnnnnnnnnnccgccccgtcttagctccccgccacactcggcattgagtgcgcctccctagcgacctcggaggtcatcgggaacgggatgggctgcacatcccacagaacccggattcgctgcgatcttgacttcccgttgccggaaagggataagtcgggtcgggccacctcttcagacgtcagcgagaacaggagtgtgagcgtcgaccgttcgcgcccctacccgacctcgcacttcatcaggtcgtcataggtctcacggcgaacgatcacgcgcgcctcgccatcgttcaccatcacgacggcgggccgcacctgcttgttgtagttgctgctcatcgactgacagtacgcgccggtggcgcacacgcacaggatgtctcccacctcgggacactgcaacggggcgtcgttcacgatgatgtccccgctttcgcagtgcttgccggcgacggtcgcgaccatctcgcgcggctggtcggccttgttggcgatcagcgcttcgtagtgcgcgtcgtagagcgaggtcctgatattgtcggacatgccgccatcgacggccacgtaggtgcggatgttcgggatctccttgatggcgccgaccgtgtacaaggtgacacctgcattcgcgacgatgctgcgtccgggctcgacggccattctcggcacgggaagaccgtgctcttcgacatgctccttgatgccgtccacgatgaccttgccgtagtccttcactgtcgacggctcatccggcagtccgtacgcgatgccgagcccgccgccggtgtcgagctcacgcacgacgtagccggtctcagtacgcacctcgtccatgaaatgcacgatgacctcgatcgccttgctgaaactgtgaagcgcgaagatctggctaccgatgtgcatgtgcaggcccgccaggtcgaggcccggtagctcaagcgcgcgcttgatggcccgcatggcgagaccctcgttcatgccgaagccgaacttggagtcctcggcaccggtctggatgtagctgtgcgtgtcggccgcgatgccgggcgtgacgcgaatgaggatgcgctgccgcttgccgcgctcctcggccatcgccgagaggcgctccatctcctcgaagctgtccacgacgatgcggccaacgcccgcgtcgaggcactcggcaagctcctggtcggtcttgttgttgccgtgcacgtagatgcgctccatcgggaagccggcgcgcagcgcgaaggcgagttcgccgccactggacacgtcgaggcagcatccttcctcggcaacgatcctgcacatcgcaagcgacatgaacgccttgccggcgtacaccacgtcgacatccttccagtggtaccgcgtccagcggacgtactcgcgcagctggtgtcggatcgtcgcctcgtccatgacgtacagcgccgtcccctgcgtgcgtgcgagctcgaccgtatcgacaccgccaacgaagagatggccgtccttgacctcggcagtcatcggcagcactgccgcaagatcggtaccggtcttcatgtccggcactgcgggtggtcggggtgtcgtcggcctgcccatctcgctcatcctctcctacgcaaacggcgcccgtgcggacgccgcggtgatcctacatccgctgcggcgcgttcacgccgagaagccccagcaccgattgaagcgctatccgtgtagcgtccaccaccgccagccgggcgaccgtaagcgcaggagcatcagggtcgacaaccctgcacacggtgtagaactgatggaacgacgcggcaagctcctcggcgtaccgggtgagcctgtgcggcgtgtactgctcggcggccgcctcgacgacctcgccgaactcggcgagcttgcggaagaggcccaactcggcgtcggtggtcagtagcgacaggtccgcatcggcaggcgcaagcgcagccgcgagtgcgtccacgtcctcggcctcgggagtgcccgcggccttgcgcagtatcgagcagatgcgcgcatgggcgtactgcacgtagtagaccgggttgtcgctgctctgctccttggcaagcgcgatgtcgaagtcgagcgcctggtcggtggagcgccgcaggaagaagtagcgagcggcatcgggcccgacctcgtcgagcaggtcctcgaaggtcaccatctcgccggtgcgcttggacatgcgcacgacctcgccgttgcggaagaggttcaccagctgcccgatgatgagcttcagctgccccggatggccgagcgccgccaccgcagcttccatgcgcttgacgtagccgtggtgatccgcgccccagatatcgatgacgaggtcgaagccgcgctcatcgagcttgttccagtggtacgcgacgtcggccgcgaagtacgtgtagctaccgtcggccttgagcagcacgcggtccttgtcgtcgccgaaatccgtggagcggaaccaggtcgcaccttcgtgctcgtagatgtagcccgcctcgcgcagctgcgcgattccgcgctcgatggcgctgggagcgccatcagcgcccggcgcgtgcagggtccgctcggagaaccagacgtcgaactccacgcccattccggagagcacgtgcttgaggtgcgcaagcacctgcgcgtacgccttctccttgaagtggctctcgcgcgtctcggccgaggtgtcggcccaccgctcgccttcctcggccaggatctcgcgggcaatctcggtgatgtaggcgccgcggtagccctcctcggggaaggtcacctcgcggccggtcagctcgaggtagcgcgcggcaacggactccgcgaagacatccatctggacgccctggtcgttcacgtagaactcgcgctggacgctgtagccggcgtgcgtgaggatgcgcgcgagcgaatcaccgagcgccgcccagcggccgtgaccgacgtgcatcggacccaccgggttcgccgagacgaactcgacctgcacggtacgactcgcgcccacattcgaactgccgaatgacgagccctgcgcccgcgcttcacgcacgacgcgctgcagggcggcgtcggaaaggcggatgttgatgaaccccgggcccgcgatctcgaccgcggcgatatcggtatggcccgagatgcgggcggcgatgatctcggcaacagcgcgcggaggcatccccgccggcttggcggcgcgcatggcgacattcgtcgcccagtcgccgtgcgcgacgtcgcgcgggcgctcgatggtgatctcgggcagcccagacaaggccagctcgcccgaagcgacagaggccgcaactgcgtcgcggacgagggtctcgatcaggtgctgcacggcgaacactcctcggggctgcggtgtgagtgttcaggatacccttccggacccgcagcgaccagagtcagcgagccacggtcgtctcgcagtccaccgccgccggcagcgtgaacgtgaacgtggagccctcgccaagcgcgctctccaccacaaggtcgccgccgaggatacgggcgagccgcagcgagatcgcaaggccgagccccgtcccgctgggcttcgcctcatcgtgtggcgcgacctggtggaattccgagaagacctcgctgagttccttccgtggaatgcccacgccggtgtcggaaaccgcgaactgcaccgtctcccgtccgtcacaggtcacgcgcagaaccacgccgccctcgtcggtgaacttcacggcgttccccaccaggttcaagaggatctgccggactttgcggcggtcgctcctgacgaccgacatgggtgtcgactgttcgacccgtacatcgaggcgtttcgccgcggccgccggacgcaacgactcgatgacggagtcgagaagcggcgcaagctcgaactcctcaggctcaagcttcacgctgcctgactcgatccgggccaggtcgagcacgtcgttcacgagctccagcagatgcttgcccgaggtgttgatcatgccgacctgccgctgctgctccgcatcaagagagccgaccagccccgagagcagcatgtcgctgaagccgatgatcgagttgagcggcgtgcgcagctcgtggctcatgttcgccatgaactggtccttgaccgcgctcgcagcctcgagctcacgataggcacgctcaagctccgcggtgcgctcggagaccatctccgagaggcgctcgcggtttccggccagttcgcgttcggcggcaatgcggtcgctgatgtcctgcatggttgcgaacacgagccgctgcccgttcacatcgatcggtccggcgtggatctccatgtcgcgaatctcgcctgatgcaagccgctgtctattctgtcggatgccacccgggccagccgcggtcttcgcgagccgggagaccatttcgggaatctcgacgccattgaggtcagcaatggtcttctccaggaattcgtcatgggcatacccgaagaagtcgcaggcggcggcattgacgtccacgaacctcgccgtctccgggtccacgagcaccatgatggtgtggctgttctcgaagaggctggcgaaatgctccctgctggcacgcagcgcgtcgacctcggcattgagccgcgtgatgtcctggaggatgcagtgcgtgcgatggatcgatccatcctcggaatgcgcgatccgaccgtacaccgcgacctgccggtgcgagccgtccttgcagcgtaccgagaactgcgccccctcgacggaccccgtgaccttgaatcccacgaaccgctcggcgaacaccctggcctgtccctcttccagaacgtccccgaaccacgtgccgagaatctcctcgcgcttgtagccgaacagatcgagccacgcgtcgttcacgtcgaggaagcttccgtcgacgtccagagactggtatgcgagcggcgcacgttcgtagagcagcctgaacgagagctcccgctcggcaagctgctgttcggccgagcgacgttcggcgatctgctgcagcagcgactcattggcgcgtgtgagctcaacagtgcgctcatcgacacgtcgctccatctcagcgcgcccacgctctgcggctgccgcgaggcggctgcgctcttcgaagagcagcacgagcattagcgaagagatgctgaacacggagataacgagattgagtgcgatgaccgattcgtgcggcactgcactcgcgaacggccccagaccgcgaagcgttcccacggtcgagatcatcgacaccgacgcgacggcgatcgccatgcagcgacgacccccgcgatacgctatccacgtgaacgtcggcatgagggcaaagggagcgatgcgctcgagcggctccgaaagcgcaaaggcgtttgcgaagtacgccacgccgagcgtcaccaggagcgccgcgacggcatccggcgcggcggggggcgaatcctcatgccgcgcccagacaagcgcgacaggcgcgatcgccagcaccgcagaagtctccgcaagccaccacatgattactgcctcagggaatgggacagcattcattcccagcgccacgagcgtgccggagccgagcaaggcgggcacgaggctggcagcgaccgcggcaaaaccgaaagcgaacgcatcggacaacgtcgcgagcttgaatgaaggaccgcgggtcttgcgcaggacgaaccacagcgcaagcggcccggtgactccgatgagcgccatgccaagagccattgctggcggtgcgatcatgatcgcacccgcgatcgaaccgaggaagacgaacggaagcaccgtcggcccgatcgcaatgatcgccgcagccgcgatgccgctgggaatccatagggcaaccgcacccgaaggatgcagcacgagcggcataagcgtgcgtgtgaacgcgaagatagcgatacccgtcgcgatcccccaccagagccgcgtgcgggtcgtactcatgtcggacagtcccaaggcactctcgattcgaatggctagcgtgggcatgagaaaggcaaaaggcgtgccagcgagtccgaagggtgcctggaatgcgacaggcggcgacgcgtccgagtgtcgtctagacgccgtcgagataccgtcgcacgagcgaatagctacgggctcgaatccgggctcgaatccgctcgggtgctgcggcccagtcatccggattccgaccccagcccaactggaacctgatgtgcgccaggcccaacacgccatgggataccgcgtcttgggacgcgtggagcgctctgccgagcgcttcgggcgagcgggtggcgatcgccagccgcaggtaccgccagacccagaagtgcgcccagggagcgaaatgccgggtcagattcgcaaacgacccgcgcgcaggatgctcgaagtccactgacacatcagcacgtgctacacgatcggcgagatcgcccatccccgcgtcacgcgcccactcccgtgtgagttcgaagtgcacgagcggtcccacgctgcacgtcccgccagacgaagtgatcggacctaccgatgatacggttccccgcgcatgatgcggaagccccggtagagctgctccaacaggacgacccgggcgagctgatgcggcagtgtcatcgctcccagcgagaggcgctcgttcgcacgggcaagcacggatgcatcaagacccgccgccccgccaaggatgaaggcgaccgagctccgcccctccacccctgcgagctccagccatgccgagaacccctcggagctcatctgccgtcccccgatctcgaggacgaccacatgcgcgccgtcgggcacggcccgcagtatgccctcggcctcgactttgagcgccccccgctcgtcggcggtgacatcccgatccggcacctcgacgatgtcgatcgtcgcgtacggcctcagtcgcttcaggtactcggcggcggcgtcccgccagtacggctccttgaggcgcccgacggcgatgagcgtgatgcgcactaccgtctcgcagtatcggagccgagcgtgacctgcagcgtcgtgtgctcggtaccgcgtacgatctcgacgggcacggtctgaccgaccttctgcgaacgaatggtcgtgaacacgtcctcgacgctcgcaatgtccttgcccgcgatcttctcgatgatgtcgccctgcctgatgcctgccttctcggcaggtgagccggtggcgatgctctgcacgaggacgcctttgctcaccggcagcccgtactgcgacgccacgctctcatcgatagtgacggtgccgacgcccatgaacggatgcgacgcccgaccggtcgatatgatctcatcggcgatgctcttggcgaagtccacgggaatcgcgaacccgatgccggcagactggcccgacgtcgactggatgagcgtgttgatgccgatcagcttgccatccgcatcggcaagcgcgccaccggagttgccgggattgatcgacgcgtccgtctggatgaggctcgtgtacgccgtgatccccgagccgctctgcgcgatgctcgatcgtccaagcgccgagatgatacctgaggtaacggtcttctcaaggccgaagggactaccgattgcgaccaccggctcccccaccctgagacctgccgacgagccgagctgcgctgctggcagcccggacttgtcgaccttgatgaccgcgaggtcggtagatggatcggcgccgacgatcttcgccggcaggtcctcaacgcccaccgtgacgatgagcgcgtcggcgccctcgacgacgtggttgttggtgaggatgtagccgtcggcacggatgatcacgccgctgccgttgcccacgacctgcgtgacggtcttgccggtaaagcggtcgataccggtctgctcgatcgcgatattgacgaccgacggcgtgagcttcgatgcgacctgctcggcgaaattcgcgtctctgtcgacgacagacgtctcgaccgcggtctcgaccggcgccggtgtcgtgacggccgtctgcgtggtcgtccgcgtggcggggtagccgagcacgaacacgaacgcagcgacgacgactgcagcaccgatgatgccgccgaagatgcccgcaagcagcagcgcgaaaccaccgcggcgacggggtgcgggcggcacgaccggcggctggtacgccacgaacgacggctcgggcacggcggactgctctacgggagtgctctcatcggtcatcggacacctcgctcggaaggaaacgcgctacaacgtgcgactatacccgagcctgtgtacccggcaggcgtgcggcacaaccacgacacaacctcttcacacggtcttcgctagaacgccgcggtaagccatctcacgagcggcccggtgaacacgccaagcgcgagggtcgccgccgtaagcagcgcaacggcgacggctgcgggcagcacccgggggacccgctcggcgcgcccc

SEQ ID NO: 3638 - DNA, 23249 bp, synthetic construct
  variation 14994..15036: note = note, n is a, c, g, or t
  misc_feature 1..23249: note = Synthetic
  source 1..23249: mol_type = other DNA
gggaggctcgatgaacgcgggctcgccgtcgtagcggacgtagcgctgcgactgctggttgtagctggccagccgatgccgtacgagctggtgcgtgagcgcgcgcgagacaccgtcgatcgcgaacgtgtacgacgcgtgctcgagcgccgagagatgccccgacgtgatgatgatcttgagcaccttggcgacggcttcgtccgacatgctctccagaagctccgcagccccgacaggtgcgtagcagagcctcgcggccgcggcaacggcccgctcagggtcgggcgtatggtagagcagtacgacgtccatcgagtgcccctcaagcgcggcatcggccgctccgaaaacaaaggaggcgagcaagctcgcctcctcatcataccagtgctttggctacgactactccgcagtctcctcggcgggcgactcttcagcgctctccgtgacgtcggcagtggcgtcgccgctcttgaccgcttccgcgacctcgtgcttggcagcgttctttgccttctcggcgtccttgacctcgcgcgccttgcgggcgacctcggcggactcctcggcggccttcacgcgtgcctgcttgaccgcagcttccttgtcgagagcggcctgcgcggcgttaccgaacttgtcggagaaacgctggacgcgaccaccggtgtcgacgaacttctgctggccggtgtagaacgggtggcacttgttgcacagttcgacgtgcagttccggacttgtcgagcgggtcatgaacgtgttcgcacacgaacacacgaccttggaatcgacatagtcgggatggatacctttacgcacttccgattcacctccgagaatgcacctggtttccgaccaggtgccgggacagccgggctaggatagcacggctcccacaaagcgggcaatcgcaaatctagagttcgataccgttgttgacgcgcttgtcgtcggcgcgcttggccatcttggtgaggaactcctggttggacggagtctgcttgaggcccttgatgagcatgtcgagggcgcgctccgaggagtccacgccgtgcaggattcggcgaaggccccatacgaacggcgcctccatcggatccaggatgagctcttctttacgggtgccggacgtgacgacgtcgattgccgggaagatacggcgatcggccataccacggtcgaggcggagctccatgttaccggtgcccttgaactcctcgaagatgacctcgtccatcttggagcccgtatccacgagcgcggtcgcgagaatcgtgagcgacccgccgaactcgatgttgcgcgccgcgccgaagaacttcttgggcgggtagagcgccgtcgaatcgacaccgccggaaaggatacgaccggatgccggcgtcgcgaggttgtacgcgcgggccaagcgggtgatcgagtcgagcaggatgacgacgtcgtagccgctttcgaccatacgcttggcgcgctccatgacgagctccgcgacggcgatgtggttctcggacggcatgtcgaaggtcgaggaaacgacctcgccatggatggagcgctccatgtcggtgacttcctcgggacgctcgtcgacgaggaggcacatgaggtagacctcggggttgttggcggtgatagcagccgcgatgtccttgaggacggtcgtcttaccggccttcggcggcgagacgatgaggccacgctggcccttgccgatgggggcgacgaggtcgatgacccgcgtcgtcataaactgcgcaccgtgctcgaggcgcaggcggtcatcaggatagaccggcgtgaggtccttgaagttcttgcgctgtttggccgcctcgggctcgaggccgttgatcgagctcaccttgaggagcgccgagtacttctcggtctccttgggcgggcgcacctggcccttgacgaggtcaccacgccggagctcgaagcgccggacctgcgacatggagcagtagacgtcgcggtcaccgggcaggtagccgttggtccggatgaagccgtaaccctcgggcagaacgtcgagaacacccatgatgtcgatgaagccctcggccttgaccttggcctcgtagacgacctcgatgatctcgtccttcttcttgagcgctttgacgtcgagctcaagttcggcggccatctgacggagctcggtcaccgttttggtggcaagctcctcgcgcgtgatggagggtacgacggcttctgcttgcggcgcgccaccacggcggccacgcttgcggggacgtgaactcatgcgttcttcactttctcccagtcggcgaggaacgattccaggccacgatcggttagtgggtgcttgacgaggttcttgagtaccgagaagggcaccgtggcgatatcggcgcccatgagagcggccttcgtcacgtggttcgcgctacggatcgaggcggcgataacctcgacatcgtgcccgaagtcatagttatcgagtgcgataacgacctgctcgagctggtcgatgccgtcctcggagatgtcgtcgaagcggcccacgaacggcgagacgtacgcagcgccggagcgcgccgcgagaattgcctgcgggaccgtgaaacaaagggtcatgttgaccttgatgcccatgtcgaagagcgctttggttgccgcgaggccctcgggcatggtcgggaccttcacgatgaggttgggagcaagcgctgcaagctccacgccctcgcggatgatctcatcgcgcgtgaggccgacggtctcaccgctgacggggccatcgacgatgtcgcagatgcgcttgaggtggccgtggaagtcggcgagcttgccaccctcgcgggcgtagagggtcgggtttgttgtgactcccgaaagcacgccccagcttgcggcctcttcgatctcggcgatattcgccgtgtccaggaagaacttcatgtgcgcttacgctccttctcccgcggggtctatccgcggtgtcgcggtccggtcgtctccgcggatggccgcgttgacaacaagttcaagcacctcggcgaccgtgcggtcgagttggtggctgtggacgatcgggatgccgtgctcgacggcaagatcctcgatatacctgccgaggagccggatgttcccgaagttcgcccggtacttctcgaacggacgagttccgtccgtctgtacctctctgatgtaaaagtggctgcggtgagcctcttcgtcgtccaccgccacgagcaactgcacgacggacgcactcttgaactgcgaaggctcgatgtaaccggggaccatgtgaacgccctcgatgacaaggctttcgccttcgatcgacgcccgctcgatgagcgacctgatgccggtgatgaccgcagcggtctgttcgcggaatccgacgataacaggattggcaccgtgagggactggaacccgaagcccgcgccatgcgttaaacgaactctcatagatggcaggcatgagttctcgtgtaaagataccacgcatcacctcccggatggaatccgtcgagacgatacgcgtgattcccagccggtgagcgatctccgtggcgatggtcgacttgcccacgccggtcgtcccgccgatgaggatgacgagcggacggtcgaggtttgcaatctcgcgaaggctgcggtaacgccgggcgaactcggggcccgcctgctcctcgagcacggcgacggacatctcgacaagttcggccatcgagacttgcttgaggtcccgggcgcgcatgtcgtcctggatacgttgtgcggcgagatacgcgcgcgccggggagaggccggtcgccgtaaaggactgcgccatgaggcctttactgtagggcaggccgtgcttctcgtccttgatgaggatcggcgggaggttggtgtttggcatcatgcgctcctcgcgccgcagcgctcaaaagcaagcgcaacggtggtgtcgatgaccgggccgatgtcgtcgccgtccaccgtgaccggcaggttgtcgcagagaaccgtcggcacaccggcttccgcgcccgcggctgcaacgacgtcgatcgcggctgccttcaactcggtgagaagcacgtcgaacgtgcccaccgcagccgcgagatccgcgcgaagcagcgtgcggttcgacaggtgtgcgctcgctgcaacaacggtgcagctgtaggtgtcctcgagataccgcacgagtgtgggaagcaccgctgccggagctgtcgtcgcgaagaacacgcgtcggccctcgacgggttcgatcggcgcgggtcggagcgtgatggcgacgaccggcacgtcaggccgcaactcgtgaatggccgagcggatctcggcgacctcctcggcgcgtgccgaagcatccccgaccccggcgatgatgacggcgtcggcgcgcgcgactctgaacggtccgaagtaatcgcggatgtagccggcgccctggctcgcgccgacgacgagaatggtcgcgtccgccgcgactggcgggatagcagctcccgagccttcgagcatgacgagatccttgccgagaccgtccgcgagacgggcgccttcctccacgttgctgaagaacgtctcccctgccataccgccgccgcagcgccgacaaccgacggtcgtcacgcgactcatgacggcatcctcgtaattgtccgatgaggcgtgcttgccgagcgcggcgagcgcgagaaggtcctcggtcgtgagcgcaacctcgtcgccccggatgagttccggctcggcgggaccgccgcgccccatcgccaggacgaccacgttgcgtccgcttgctttgaggtgccgcgcgacgtatgcggagaacgccgtcttgccgacgcgcttgccggtaccgatgatcgcgagcgtcggcgtctggagcacgagcgacgccgacggcggggtgaagatgaagtcggccccgcggtacgtcacgcctgcctcgagcgcgatggatgcgagacggaagcggtcggcggcgctcaggatcggctcgtcggaaagatcgacgatcacctgcggccagtactgctcgatcgccatgcgaagcgcatctgcggcggtggccgcccgcacaaccgggacgccgtatgcatctccggacgcgggatcgaccttctcggtgccgccgacaaacgcagcggccacgacgtggtactcctcggcaagcgcctcgagcgcgctacggacgaccggcgggtagtgctcgccgtcgatgagcgcaacggccgtgctcatacgccctcaccgcagtttgcgtcgcgctcggaaccgggactccacacgcatgcgtgacgcgatgcgcgatcgaagtcagcgaccacttcgggctcgccgaaggggtgcttcaggacgatgcgcacatggtcggaatagatctcgatgatgttgtaggacgccttggtcttcccccggagacggtatgagcacgcggttccggcgttgacgacgaccatgttctcgagccgccacacgtgcggcacgtgcttgtggccgcacaagaccatatcgcagccgctcgaggtcagcacgcgcagcaggtcgccggcgtcaaagacgatattgcgctcacgaccggtgcccggaacaggaagcaggtggtggtgcaggcagacgatcttgaactcatcgggattcgagaaacgctcctcgatccagcgatagcgctcgcgaccgatgcgaccgccgtcgaggtcgggctccgatgagtcgagtccgagaatgcgaataccgggcagcgcgagttccgtcgaccgggcaccgaagagttcctcgaaatgcatgtcgccgacgttgcgtgcgtcgtggttgccgggaaggatcatcaccttctcgacatccatgcgagagatgaggcgctgggcgaccttgaactcctggcgaaaacccatgtctgtcagatcgcccgtgaccgcaagcacgtcgggcttgagctcgttgatctcatcgacgacgcgcgtcgccaggctcgggatgtggtactgcgagccgcagtgcaggtcagatacctgcgcgatgagaatcggccgttcttcgcccacgttacctccagcggaatagtgcgaggtgtgcccggagtccggcacgagaaggttggaatactctattgttcccctaaacgacgggtatccgtcaagatgcggccgcccccgaaaccttgcgcgctctgctgaaggcgagacgtcaggccgtatccgagacagctttcgctgataccggaacgcagatgagcgcggcgagcaaccacataacctcgtagtacaagaagtactgcaggaacgtcccgagcgcgatggccaccagtgccgcgacgagcccgacatcgtagagcgtcttgcgtcgtagccgtgcaagaccgcgccacaccagcaacgcggcaagcgccaactcggcgagcagtccggcgatgccggtctcgacgacgaacgccagcggaagctggtgtggatgcgagacttcggtctcggctccggggagtcggtacgccgggtagacgtcgtcatatgcctcaagccccgtaccgaagatgggccgatccagcatcatgttgaccgacgcccgggccataaggtaccgcgtcgcgttggagccgggcttcgtcggttgggcgatggatgcagcgcgctgcgaaaccccgcttgaccccatgaaggccacaccgatggccacggagaccgcgatcacggcgacgatcgacacacgcacccgccatggcgagagcacaagcatcatgacgatgccgacgccaagccccagccacacggtacgggaatacgtcgagatgatgatcggcaccatgacggcggaggcgacaagccaccaagcacgccgcgcattcgttgacgccacagcggcgagtccgagcgccacgagacatgccgcggccaagtacatgccgtagaagttcgcatcgagatagaagcctgccggccgggtgacggactcgccgaagagaagctgtgtgttcgcggttccgagtccgagcgcgggcacgaagcgctgcaggtagccgacagccgtggcgccaaccgcaccaataacgaacgctgtcaacgcgcgcagacgcacgacctcgcgcgcgcacgcgctgatgatcagagccgcaacaagccagagcaccataagccgaagactgtagagaaacgtcgtggggcggtctgcagactgtatgaccgaccagaggcccgcgagaaatggcgtgccgaagacccacagtgccgggtcggtcacgcctttcggtcgccaaccgtcgcgcaccgcacgaagcgccttcagcccgccgaggattgccgcaacggtaacgccgaagtagaagaggttgacctggaaggggaagcgcacgaggaggatgccgtctttcatcgcgatggcgatgaagagcgcgacgaccgaccactcgaaggcatcgaggcgctgcgggtgcgctggggctccatcgcgcacggcgctcacccctcgcacacgatctgcgtgccgacgcgctccacgccaaccgccatgatgcggcggttgccggaggtagccacgatgcgcgcgtgagcggtatcggcaactcctcgcgctctgaccagtgcgtcatcgtcggtggcgccactcacgagtccgatcaccgtaggaccggctcccgaaagggccgctccgcatgcgccgctcgaaacgaggacgtcacggatctccgccatatcgggaatgagggccgcgcgatagggctcgtggatgcgatcgtgcagcccggcgctcaacatcggctcatcgccgagggcgacgccgagtgcgacaagtgacgcacgggccacgtttgccgcagcatcctcgtgtggcacggtctcaggcaacgcctggcgagcctcggaggtcgggagcacggcatcgctgagtgcgacgaccgcagcaagcccaccgccgggctcgatgcgcctgacgcgcggcgtgtcgccatcgcgccagcacacggtgaacccgccgaagagcgcggccgcgacattgtcgggatgcccctcaagctcggcgccgagctcgaagagtcgctcgttggagagcccggcgtccgcaagctcgttacccaacagcagaccaccgacgatagcagcagccgaggaaccgagtccccgaccaaccggaatcgcattctcgcagcgaatgcgcgctgcaccggtgtagccgacttccgcgaacacacgttgaatcgcccgggcgacctcgttgtccccgtcggtacgaagctctccggcaccctcgccgcttacctccaggaaccacgcatccgcatgcactgcctcgaaatcgtcatagagcgcgagcgcaagtccgaaggcgtcgtagcccgggcccagattggccgaggatgccggaaccctgacgcgaacagtcacgggagccgtcacagctcttcgacgcgaatgatggagccgaccgaatcaaccacttcgagcgcctcgatctcatcgagcgcggcacgtacggaccgctcggacgcccgatgggtcacgtacacgatctcggcgccgacatcggtcgtccgcttctggatgacggatgcgatcgagacgccatggttgccgaagacgctggcgacggccgcgagcacgccgggttcatcggccacgagcagccggacgtagtactcggtcacaagttcgcccacatcacgcacggcgagttcctcgtggcaggtgcagcccacaagcgcgagacagccgctctggatgtgccgggcgacctcgatgacgtcgccgactactgccgacgcggcgggcaacgagccggcaccctcgccgaagaacatcgtctcgccaaccgaatcgccaacgacgtagatggcgttgtagacgcccgagacgctcgcaagcgggtggtcctcgcggatcatcgtcgggtggacgcggacgtcgatgccgccctcgacgcgtcgcgcgatcgccatgagcttgatgacgtagcccatctcgaatgcgtacgcgatgtcctcgggtgcaagtgagcggataccctcgacgggcacctgcgggaacgtcacgcgtgagttgaaggcgatggacgagagaatcgcgatcttggccgcagcatcgaggccgtcaacatcagcggtcgggtctgcctcggcgaatccgcgctcctgcgcctctgcgagtgcggcaccgtagctgaggccgttctcggccatgcgcgtgagcatgtagttcgttgtgccattaacgatgccgtagaccgccgtgatctcgttgctgacgagcgagtgcttgagggggccgataatggggatgcccccgccgaccgcagcctcgaacatgatatccacgccgtgggtatccgcggcgtccatgacctctcgcccgtggctggccatgagcgctttgttggcggtcacgacgctcttgccggccgcgagggcatcgagcacgacaccgcgcgctacgccggtcccgccgatgagctcgatgacgatgtcgacgtccgggtcagcgatgacgtcggcggcatcggtggtgcaggcgtctgccgggaggcccagtgcggcaaagcgctcctcggagcgatcggcgaaacgcgttatctcaacgtccacgcccgcgcgcgtgacaaagtcagcgcgatggcgactgagaatctccacaacgccactaccgacggtgccaaggccgatgaggccgactcgaactgtacgcatggaatcctccagagaagtgaccggtgtcacgattaggcaacacagtgaatccattgtagcggagcgcggcgactcggttggagtgggcgcttaacaggagcccaccttggtcccgcgtcgcccgtcaaagtagagtggactcactagcgggatcagttgaaccgttgtcaatgtcacagctcggtgttaggctcaacgagcgcttgcgaatccagtcctcgtaacatttcggagtgtggcgggcttgctaggataagcgaaagcgtaaggctccgacccggtgatttcgatcaccgggtcgtcctttttgtagggggaacacgagtggtatttgtctatgtcagacccttgggtcaatctgtcaactagtatgtcgccacgactggggggtctcatgggtacacacgttggcctggatatcggcatcgcttctgtggggtgggcagtcctcgatccagagtcgtgcgaaatcaaaggtctcggggtgcgaacgtttcgcaaggcagaggatccgaagactggcgcgtcactcgcgctcccgcgacgtctcgcgcgctcaagccgccgtcggctacaccgacgccgcgcccgcatgcaggacttccgtgaacttctaacgtcgagtggaatgattgcgcccgacgacctcagcaccgtgttcacgccaatcgccggcgacaccactccataccaactgcgggccgaaggtctcgatcgactcctaacagaaatcgagtgggcacgcgtgttgagtcagatctgtaagcgacgcggctaccgctccatgaagcaaacgacgaaggaatccgcgaaggacgatgacggtgttgtgaaggctgcaattgcccagaatgcagctcacatgtccgagcataagtaccgcacagcaggtgagatgctgtggcttgatgaacggttccaggagtcgcgacgaaacaagggcgactacagggcagtcgtttcgcgcgaacttgttctagatgaagtcgcacaactcttcgccgcacaacgaactctaggtaacgcgttcgccactccccaaatcgaggagacctacctcgagattcttcaaactcaggcatcaatcctcgagggcgacgctctcagggataaggtcggccgctgctctatcgaccgcacgaaccgacggattccactggcgtgcccgacattcgagcgattccgacttgtcgacaaactccacaacgttcgctacaccctgggcacatcaggtagccgcatcagccttgatgccgaacagcgcgaagtcgttatcgacaaggccttcaatagagtcacgaaactcacctatgccaatatccgaaagctatgcgaactgcccaccgacgcccgctttgtgggtgttcgctacagccgtgatcccgatgaccttactgcggagacaaaggagaccatccccgctccgaaggcctggcacgagatgcacaaggcgctctccgagtgtccgcccgaggtatggagcgcgctttcctcagacactcagttgctcgacgcagtggctgagattctcacgtacttcaagtacgacgaatccatcggtcgagaactgaagatgctcgggctttccgatgaagccgttgatgcgctcgcccaactgcgcttctcaggaaatgggcatctgtcgcaaaacacactgcgcgcgattctgccccatatggaagacggtctcccctactcggaagcatgtgaggcggccgggttccatcactcacagcgatccgatagcgagcgacactcgaagcttccggcgattccgacggaagaactccgcaaccccgtcgttctcagagctctgacccagacgcgtaaggtactcaacgcgatcatcgacgagtatggcccgattgagcagctccacatcgagctggcccgcgacgtggcacgttcgtccgacgatcgtaaacagattgagaagatgcagaaggagaacaggtctcgcaatgattcaatcctcgaccaactggcagatgactacggcatcgaacgcccgcgtccgctcgacatcgtgaagttcaaactatggaaggagcagggtggtcggtgcgcctatagcggcgcatacattgaccctgagcgaatgctctcaggcgagccggggattgccgaagtggaccacatccttccccactcccgctcgttcgatgacggctacatgaacaaggtgctcgtcaccacggccgagaatcggaacaagcgcgagcggacaccgtttgagtatctgggcggagatgctgaccgcttgcatgaatacgaggaacgcgtgctttcgatgcatcttcgtcggcccaaacaagaacgccttctgcgaaaggacttcgacgaacgggcgtcagatgagttccgcgagcgcaacctcatagacacccagtacatcgcgcgtttcttcaagagttttgtcgaggataacctgcagttctcgggcgacagcaaggcacctgtaatgaccgtcaacggacgggcaaccgcatacctaagaacggcatggcagcttcagaaggtccgtgcggaaggggacctgcatcatgcgctcgacgcggcggtcattgccgcaacgacccgaagcatggttcagaaggtgagtcgcttcttctccgtccgcccgttacgtaacaaaaatggcgagtacttcgaccctgcgactggcgagatagtgcccgccaaacatgtgccggagccatgggaggggttcgccagcagcctgggcgaacgactttccgcccgatttggcgaggatcctttcggcgagattgccgcgagcgagttcgaactacagccgattctcgtgagcagaatgccaaaccggacagtccgcggagaggtccatggggagactgtgaagcgcatcgaaggcgaagatgcgaagggacgcacggtcaccagcaagaaggtgcgtcttgttgatctcactgcgaagactctggagttgatggttggacgagtgcaggaccgaactctctatgaggcgttgaagtcacgcctggcggaattcgacggtgacgccgcgaaggcgttcgccgagccgttccacaagccgacccggcttggccgcaaggccccgttggttcgatcggtgcggatctccgacaagccctcaagcggtgggactgcggtgcgtggtggacttgcgaagaacggcaagatggtccgaaccgacgtattcgtgtgcgacggcaagtactatctgatccccacctacgtcaagcacactgtggccgacgagctgccgaacatggcaatcaaggcgcataagcctgagagtcagtggcgcaagatggacgagtcctatcagtttgtcttcagtcttcaccaagatgacccgataaggcttgtgcgggagagttgcggcatgattgtagccctctccggctactttggggggacggaccgtgctgcaggggcaatcagcatcgaagcaaccgactcatcttggacgaaatcgggcctgggtgtggctcagagcatcgtgtgtctagagaagtaccaggtcgaccttctcggcagatcagtgcacgtcgtgaaacgggagaagcgctgtggcttttcggacggtggtgataagcaatgagaccgagctgcacgtgcagtctggtcagcttgtcgtcatccaagagcgtacggtacggattccgcttgaggatatagctgtactcgttctcgagcacccacggacgcacgtctctgccgcggccctctcgctcctcacggagcagggggtcgcggttgctgtttgcgatggaaaacacatgccgaccggcctgctactcccctgctgtcagcacagcaggcagctcgccgtcactcgccagcagctgggccagacacaaccacagcgaaaacgactatggcagcggctcatccgttctaagatcgataaccaggcggcatgcctagatgctctgcacctcactgactcggccagactacgcgagtactccgcagccgttcagtccggcgatgtgacaggtatggaggctgccgcagcacgcctctattttcgacgcctgattcctactgccacgaggcggtcaccggaaggtcccggaggatccttggattactgctatgcggtgcttcgagcggcaattgcccggtcgctcgtcggacatggcttctatccggccgtcggagtgcaccacgacagtcagctgaacgcattcaatctagcggatgacattcttgaaccgtaccgtccgttcgccgactatctggccatcaaagaagagaccgacgtccagattcgagcagacagacagaggctcttgtccgtcttgcagactccgtgcctaatccaggacaaaatgcactcagtactcacggcaatcgaaacaacaacctcaagtctcgctagagcaatggccgagagagacccgacggcactcgcacttccgtcgctgatcgcgcaagccgtcgtccccgaactgcttccggagtagtcaggtgaaagccatgcgactcatcgtgctgttcgacctgccagtcagaacgaagccggacaaacgcgcctatcagcagtttcataagtttctggtcgcagatggatacgccatgatgcaattctcggtctatactagaattaccaacggtctcgatggcgtgcagaagcacctagcgcggctcaagggaagcctcccgccgaaggggagcgtgagggcaatgtcggtcaccgagaaacagtatgagtcaatgctttttctcgtgggaaagccgacggttcaggagaaaacggtggcatcacagctacagatatggctatgaataaccgatttcgatcggtagcaagcaagaaaggccctgctcagcagggcctttcttgtgtctctagcgtaccacttcggagtgtggcggggagctaagactacgattctccgcataatgaacgcctacctagcgtaccacttcggagtgtggcggggagctaagaccgacgagttcggtgtagccgcacatgacgtagcgtaccacttcggagtgtggcggggagctaagacctcaatgacgctgttctgatgatgtgcttcagcgtaccacttcggagtgtggcggggagctaagactgggttcctcgtgggagtgttcacgagactagcgtaccacttcggagtgtggcggggagctaagactgcgcacgtgttctccatcacgaccccgccagcgtaccacttcggagtgtggcggggagctaagacttccgccacgagcgcccaataggtgtctggagcgtaccacttcggagtgtggcggggagctaagactcgcaaggtctggggcgctttccgctccacagcgtaccacttcggagtgtggcggggnnnnnnnnnnnnnnnnnnnnnnnnnnnnnnnnnnnnnnnnnnnttagctccccgccaccctcatcaaggaagaagttcgtcctgcgacgcgcgccgttcggcgcggacaagggccctatgatctcggcctaacgcgcagttgatccttcggcgcgacgctcaggcaacccgctcatagacaacccgcccctcacgcaaggctgctctaaggatgtcgcccggaaggtccccccgccgttctatctcctgcatgtctgtggggatcgggtccacgctcacgtcaaggactgcgaccgcttcgagcatctcaccgagcagatgccgcttgtgacccatcttgtccaccacgaccagaacatctatatcgctcgcaacgccagcggtacccctgacatgtgagccgaagagcacgatgcgaaccgggttgaagccgagcacaagcgcatcgactgcgtcctgaagaccgggcacttcatgatccagacccatcgcgtcctcccctctcgcatagtcaatagtatagcgccggctcgcgcgcgcccctaccccagctcgcacttcatgaggtcgtcgtaggtctcgcggcggacgatcacgcgggcctcgccgtcgttcaccatcacgacagctggtcgcacctgcttgttgtagttgctgctcatcgactggcagtaggcgccggtcgcgcacacgcacacgatgtccccaacctcgacgtcttggagcggcgcgtccgttacgacgatgtcgccactctcgcagtgcttgcccgcgatagtcgccaccatcgtgcgcggctgatcggccttgttggcgatgagcgcctcgtagtgcgcgtcgtagagcgacgtccggatgttgtcggacatgccgccgtcgaccgcaacgtaggtgcggatgttcggaatctccttgatcgagccgacggtgtagagcgtcacgcctgcgttggcgacgatgctgcggcccggctcgaccgccatcttcggcaccggcagcccgtgcgtctcggcgtgctccttgatgccgtcgacgatgaccttgccgtaatccttgatggtgcttggctcatcgggcaggccgtatgcgatgccgaggccgccgccggtatcgagctcgcgcacgacccaaccggtcgcgtcgcggatggcgtccatgaagtgcacgatgacctcgatagccttggtgaagctttgcagcgcgaagatctgcgagccgatatgcatgtgcagcccggccaggtcgagtcccggcagttcgagcgcgcgcttgaccgcccgcatcgcgagcccctcgttcatgccgaagccgaacttggagtcctcggcaccggtcatgatgaagtcatgggtgtccgcctcgatacccggcgtcacacggatgaggatgcgctgctgcgttccgcgagcctcggccatggccgagaggcgctccatctcctcgaagctatccaccacgatgcggccgacaccggcgtcgaggcactcggcgagctcaaggtcggtcttgttgttgccgtgcacgtagatgcgctccatcgggaaatcggcgcgcctcgcaaaggcaagctctccaccgctggagacgtcgaggcagcagtcctcctcggcgacgatcttgagcatcgcgagcgacatgaaggccttgccggcgtacacgacatcgacatcggcccagtggaagcgcgtccacttcacgtagtcgcgtagctgctggcggattgatgcctcgtccatgacgtagagcgcggtgccctgctcgcgggcgagcttcaccatgtccacgccgccgatccacaggtggccattctcgacgtcggccgttgacggcagcacggacatgaggtccgcagccgtcaggtcgtcgggaaccgcgggtggtctcggtgtggtgggccttcccatggtgaatcctctctatgcaagcggcgccccgtgaggcgccgcgcttctcctacatgcgctgtggtgcactcactccgagaagtgccagaacgagctcgaggacgatgcgcgtggcatccaccaccgcgagccgggccgccgtgagcgccgggtcatcgccgatgacgtgacagacggtgtagaactggtggaacgacgctgcgagctcctcggcgtaccgcgtgagcttgtggggcgcgcgctgggtggccgcgatctcgaccacctcgccgaactcggcaagcttgcggaagagcgcgagctcggcgtcgtgaccgaggagtgcaaggtcgacgtcggcaagtacgagcgcggccgcgagcggggcgacgtcatcagcgtccggctgcacggccgccttgcgcaggatcgagcagatgcgcgcgtgcgcgtactgcacgtagtagacggggttgtcgctcgactgctctttggcgagcgcgatatcgaagtcgagcgcctgatcggtcgagcgccgcaggaagaagtagcgcgccgcgtcggggccgacctcgtcgagcagatcctcgaacgtcaccatttcgccggtccgcttggacatgcggacgacctcgccgttgcggaacaggttcacgagctgcccgatgacaagctcaagcttgccggggtgtccaagtgcggccgcggcagcttccatgcgcttcacgtaaccgtggtgatccgcgccccagatgtcgataacgaggtcaaatccccggatctcgaacttgtcccagtgatatgcgatatccgcggcgaagtacgtgtagtcgccgtcggccttctggaggacgcgatccttatcgtctccgaagtcagtcgagcggaaccacgtcgcgccttcttcttcgaagatgtagccggtctcgcgcaggcgggcgatcgcgcgcacgatcgcgctcgggccgccgtcggcgccgggcgcgtgcagggtgcgctccgagaaccagacgtcgaactccacgcccatgccggaaagcacgtgcttgaggtgcgcaagcacctgcgcgtacgccttctccttgaagtgcgattcacgttcggccgctgatgtgtccgcccacgattcgccttcatcggcgaggatctcgcgtgcgatgtcggtgatgtatgcgccccggtagccgctctcgggaaactcgacctcgcggtcgcatagctcgaggtatcgcgcggcgacggactcggcgaagacgtccatctgcacgccctggtcgttcacgtagaactcgcgctcgacgcggtagccgacgtggccgagaagcctcgcgagcgaatcgccaagcgccgcccaccggccgtgcccgacatgcatcgggccgactggatttgccgagacaaactcgacctgtgcccgcttgccgcctccaagatccgagcggccgaagtcggcccgctgctcgcgcgcagagacgatcacgcgctgaagcgcggctgccgagagtcggatgttgatgaagcccgggcccgcgatctccacagccgcgacatccgggtgcccggtcatccgagctgagatgacctccgcgacctggcgtggcggcatgccggcgccctttgcagcgcgcatcgcgacgttcgtcgcccagtcgccgtgagagagttcgcggggtcgctcgatcgtgatctcgggccgctcgacaagcgtcagctcgccggcgtcgagtgcggcgtcaagagcatcgctgacgagagacttgatgagatgctgcacgggtggacactcctcggcacgtcggtgtgagtgtccaggatacccttaccgtgcgagagcgaccagggagcgtcgattcagaccggctgctcgataggcacgaccgccggcaaccagaaggtgaacgtcgagccaaggccgacctggctgctcaccgcaaggtcgccgccaagaatgcgcgcaaggcggagcgagatcgccagtccgagacccgtgccttcgggcttgccggcctcgaccggtgcgaactggcggaactcgtcgaagatgtgatcgaggtccttctcggcaatgcccatacccgtgtcggtcacagtgaaggagaccgcgccctggtgattggatgacacctgcaagacgaccgtaccgctgtcggtgaacttgaccgcgttaccaacgagattcaggaggatctgtctgaccttgcgacgatcggtcgtgatctcggtatccggaccctccaggtcaagctcgaccgtgagtcccttctgcgccgccatgggctgaaccacctcgacgaccgactccaacacctccagaaggcggaacttctcgggctcgacgatgacgcggccgcttccgatccgcgagaggtcgagcacatcgttgaccagcgagagcaggtggcgtccggagttgttgatcatcccgacctgtttgacctgctcttcgtcaagatcgcccacgagacccgcgagcaacatgtcgctgaagccgatgatcgagttgagcggggtcctgagctcgtggctcatattggcaaggaactggtccttcgcctgtccggcagactccagctccgcgtatgcctggcggagttcgcctgtccgctctcgcacggtctcttctaccgcagcctgcgtctttgcccggtcgccaatctcgaccagcaatgccttgttggtgaccctgagttccgatgtgcgctcctcgaccacatgttcaagttcagatctcgcatcttcgagcgcaaccaccgaaccccggtattcggaaaccatcagagccagagccaccgacgagaatgcaaaaaccgagattacaagatcgagcgcgaggaacgagtcgtcgagtgcgacgcccgcaaacgggccgtgccctgccaccgtggcaaacgtggcaatcagggagactgctgcgacggtcaccgccatactgcgggcctcgcaccggaatgcaatccaggtgaacagcggcaggaacaagaatggcactgcgcgctcaaccggtgcggggaaggcgatccaatagaggaagcccgccgagacgatcgtcaggagcatcgcgctggccgcctcgagcttctcggaggctggcttctgtcgcagcgggacgctccagagaatcgcgatcccggcaatcgatccgattccggcgacttcgctgagccaccagccgacaaacgtgacaaagggtgcctgttggagtgcaccggcggccatcatggcgagtacccggagaagtgatgagacgagcggcgccaacaccatcgccccgccgattccgagcgtgttgccgaagctggtaggcgcatcacccgggctccacacacgccgcagcagccagaggaacacaacgatctcgactgccacgaccgtcgccatgactactgccgggataaccgaggagattgggagcatcgtcgcgaacgaggcgagccacacaaacgggacgacccataatccgaacacgactgacccggcagccgctattccgatcggcacccagggaggcgcggtggcggttccgctgatcaacggaatcaggaccatcgccgcagcgtagtacgcgaggccggtagccgctcccccgatgatcctcgtccgaatgctgcgcgtgccctgaggcgccatgattcctcttcacaacgttcgtgtgacactcatgaagccgcaaatgatgtgccagcaccgatgaacgctaataaattgcggacgaacggtcgttctgacccacggtcatacgtaaatcaggcagccgcgcggtatctgcgaagcagcctcatactgtatgcccgtatgcgagcctggagccgcaatggcgccgcatcccagtcgtcgggatcgcgcgctatgctcaggtcatgccgcacgtgcgccaggccaagacgcccgtgcgcggcagcatcctgaacgctgtggagtgcatgcccgagagactcaggagaccgcaggcgcacagctcgccggaaatggtacccggcccacaggtacgcccagggcgcgaagtgcctcgtgaagttgctgactgacgcacgggccgggttctcggcatcgacggtgagatctgccagcgcgatagcctcggcgacgtcaccaagcccggcttcccgggcccagtcgcgcgtcagatcgaagtgtacgaaaggccccacgtggcacacgctccgattctgccgacgtcatcacctaccgatgatacggctcgcctcgaatgatgcgaaatccccgatagatctgctcgagcatgacgaccctcgccaactggtgcgggaaggtcatcggaccaagcgagagccgctcgttcgcgcgcgtgagcaccgacgcgtcgagccccgcagcgccacccaccacgaatgcgatggtgctgcgaccctcgactccggcgagttccatccaagccgcgaatgcctcagacgagcgctgcgtgccgccaggctcgagcaccacgacgtgcgcggcctcagggagtgcccgcaagatgccctcggcctcggccttgagcgcctttggctcgtcggcgctcacatcgcggtcggggacctcgatcatctcgatggtcgcgtaaggcttcaggcgcttgaggtactcctcggcagcctcacgccagtgacgctccttgaggcggccgacggcgacgatgagtatcctcactgacgggccgcgtcagaaccgagcttgaccttgagcgtcatctcgccagcgtctctcacgaccaggacatcgatcgtctggccgaccttctgagagcgaatggcggtgaagacgtcctcgacgctcagaaccttcttgtcggcgatccgcacgatgatgtcgccggccttgagtcctccagcctgggccggggagccctcgacgacgttctgcacgagcgctcccgcttcggtagcgagcccgtactgcgcggcgacgttcgcgtcgatggtgacggtgccgacgcccatgaacggatgagtcgcccgcccggtcgcgataagctcatcggcgacgctcttggcgaagtccacggggattgcgaagccgataccggccgaggcgccggaggtcgactggatgagcgtgttgatgccgatgagcttgccatccgcgtcggcaagcgctccgccggaattgccgggattgatcgacgcgtcagtctgaatgaggctggtgtacgcggtgatgccgcttgcgctctgggcgacactcgagcgaccgagtgccgagacgataccggtggtgacggtcttctccagcccgaacggactcccgatcgccacgaccggctcgccgatcctcaggtttgccgaagagccgaactccacagctggcaacccggtcttgtcgaccttgatgaccgcgaggtcggacgaagggtcggtgccgacgactttggcgggaagatcctccatgccgacggtcacgatgatcgcatctgcgccctcaacgacgtggttgttggtgaggatgtagccgtcctggcggatgatgaccccgctgccgttaccgaccgtctgcgtcacctgttgaccggtgaaccggtcgacgccggtctgcttgatcgccacgttgacgaccgacggcgtgagctttgtggcgactgcttcggcgaacgacgcatcttgaccagacgcgcctactgaagcggtgtccgagacggtcgtcgtgacgggctgtgatacctcggtgatcgtctgagaaacgggatagccaagcacaacgatcagaagcacgcctacgagcacggccccgacgatgccaccgacgattgcagcaaccacgatggcgaggatgccgcagggggcgcgctccttggggactggcgcggcgacgggcggagcggggtcaacgtgcgcgggtggcgccggggaatccggcgcgggggcaacgggcggctctgactctggataatcactcatcgggcacctctatcacggagggaattcggcatgtctcgccttcagatgatacccgacgagcacctgcatacgacccgttcacacaacgacgccacaacctcttcacaccttcttcgtcagaagaagcggaccccgaggtagctcagcagcggtgaggcggcgatgccgagcgcaagtgttgccgcgacaaggagcgagaatgcgacggctgcactccgcgaggatgcgaggaccggcgcgtcggagcgactcgcgaagaagatcgggcgcaggattcggaagtagtagcccgcggagaccacgctcatcacgaccgcaacgatcacaagcgcgagccgtcctgccgagactgcggccgtaaacgcgaagagcttcccgagcatgccggccatcggcggcacgccgacgagcgacagcagcaacaccacgctcccccacgcgactgccggacgccggacgacaagccccgcgaggtcgtcgag

SEQ ID NO: 3639 - DNA, 14552 bp, synthetic construct
  source 1..14552: mol_type = other DNA
  misc_feature 1..14552: note = Synthetic
agacacagatacgacgcggccaggatcgcggtccccagcaccccttccgccttgagcaggaacgccgcaagcgcgaaggccatggccaccatgagcaggccgaaccatatcctgcgcaactgcttgaactcgggcgtgtcgggattgaacggcacggccgtcttcgtgccgcccttgcccttcttcccacctgccgaggaacccgcctcgcccctgccgcgcttcggcttggcgctcgcggcgctgcgcctggtgctgccgagttgcgcgctcttctggtagcgagggttgttcgggctgcgacgggccatatggcgtcacgcgcccccttccggttcgaacgtgcggcccgtgatgagctcgtatgcctggatgtagcgttcgctcgtgccgcgcacgatgtcttcaggcaacgcaggtggcgggggcgacttgtcccacccggtcgactcgagccagtctcgcacgtactgcttgtcgaagctcgcctggccgcggcctggctcgtactcatcggcaggccagaaccggctcgaatccggggtgagcacctcgtcgatcagcgtcacgcgcccgtctacgaggccgaactcgaacttggtgtcggcgatgatcacgccgcgcgacgcggcgtgctcacgcgctcgcgagtagacctccacagcgatgcggcggagttcctcggcgtgttcgaggccgatgatgtcgaccatgcgcgcgaaatcgatgttctcgtcatgatcgccgatctcggctttggtgctgggcgtgaagatcggcgagtcgagcttcgaggattcgaccagaccgccgggcagctcgatgccgcagaccgtaccctgcttgcggtactcgttccagccggatcccgcgaggtagccgcgcacgatgcactcgacggggaagacgtcggctttgcgcacgagcatgaaacgcccacgcaggtactccgcgtgcggcgcgaactgctcgggcagatcggcgacgtcagcggagatgaagtggttgtcgacgacgtcggaaagcaggtcgaaccagaacagcgaaagcttcgtgagcacctctcccttgtaggggatcgggtcgggaagcaccacgtcgaaggcactgattcggtcgctagcgaccagcagaagcttgtcaccgagatcgtagaggtcgcggacttttccctgggagtccggacgaaggccctgcggctgcatggcagtcgctcctttcgggtcttgtcgctgcggtcgtgtcgaagcgcgtgccacggcaacgtgcgatcgcatcccacgggcgcgaatgaaccgccgacactaccgatgacacgccgccattgtaggcgatatctccggttgatgcgtcccgggaattccgcgccacggcctacgctcagcccatatacaggtacgcggtgtacgctacgtagagcacgatgcctacgacaccggaccgtctgcctatccggcccgtcttgaccaggaacggcaggaccagcagcgtcgctgcgagcatcacccacatgtcgagctgcacgatctgcgggtcgatcgggatccgtttcaccatcgctgtgaccccgaggattccgagcaggttgaatatattgcttcccaccacgttgccgacggccacgtcggagtgcccacgcgccgccgccaccagcgaagtcgcgagttccggtaaagaagtgccgaacgccacgatcgtcagaccgaccaccgcctcgggcacaccgaagctcgccgccaactgcgaagcgccgtcgaccagccagcgagaacccagcaccaacgctccaagacccgcgaccaggtagatcgcgccgcgcagcggctgctgaggggtcgagtcgaactcatgcccctcgtgctcgtgcaattcggcgaccggggagacaccggatacctcactgcggtaagagaagaccaggaacatcaggagggccagcaacaggactgtgccgcgcgtcaaacctatcgaaccggtgaatgcgaaggcgatgaccaacaccgtagcgcccagcatcaccagcgaatcgcgccgcagttccgcaggcttgaagacgatgggtgctaccagagccgaagctccgagaataagcagcaggttcgcgatgttgctgcccacgacattgccgacggcgatggcgcttcgcccgtcgagcgccgccgcgatactgaccacaagctcaggagcagaggtgcagaacgccacgatcgtcatgccgatgagtaacggcgagagcccgaaccgccgcgcgactatcaccgcaccgcgcaccagcatctcgccgcccccgaacaacagggcgaacccgccaagcgccaggaggtaggtcatgtcttgcgcggaagccgtatcgtgaacaccgtacctccgccctcccgtcgtgtcgctgccgccgtcccgccgtgacgttccactatctcgcgtaccaccgcaaggccgatgcccagaccgcccgtcgaacggtcccgggccccgtcggcccgccagaagcgagagaagacccgctccaggtcctcctcggcgatcccgataccggtatccgcgatctcgatcaacgcccgatcgccctcggtgcgtacgaccactgagaccgtcccgcctgacggagtataccgtgccgcgtttgagagcaggttgcctaccgcctgggtaagccggtcgcggtccgcgcgtacgaccgcacctcgctcgatccgctcgtcccacgcaaggccggccgcgtccagcagcgcccggtgcgcctcgaccgccgccagcacgggctcgctgatgtcgacgtcctcgaagtgcagctggacgctgccgcgttcgaggcgtgtgagctccaggatgccgtcggcgagacgcgaaagacggaccgtctcgtcgcgcacgatctgcaggtgctcggcgtcggcagggtagacgccgtcctgcatcgcctcgacggtcgcctgtatcgcctggagcggggtgcgcagctcgtgcgcaacatcggcggtcaggcggcgttcgaccgcccggtccacctcgatggcgtcggccatctcgtcgagcgtgcggcccaagaccccgatcgtgtcgtcgcccgtgaaaccggttcgcgcacccctgtcgcccgcgcgcagcgcttcggccgtctcggtgatacggtcgatggggcgcacgaagatcgtcgagtacgcgagtcccgccaaagacgccgcagccaccgctatcagtgccgcggctgtcaggcccaggaagctcgagcgcctgaagcgcacgtcgttgtcggtgagcagtccctgcggcgagagcggccacactctcacataccccacgatcacgccgtccggcgcgataggcgcgaccatcacagggccctcgggctcgaacgcccccatcggaggcccggtgatgtggtcggtcgctccgaccgcgaacgaatcgtcgtagatgatgcgaccgtcaaggtccatcacctgtagtgccaaccctgacagtatcccgaagcgcggcagttgcgagaacgcctgcatcgtccatccgtcgcttgcctcgtagctgctcgcaagcaactgcgccgcaccgtccgcggtatcttgcagcccctcacgcacgtaggcgtcgaactgctgcgcccagacgagcgcgaggatgatcgcggcgagcaccatcgtaagagcggcgaccatggcgaacgcgaccgagaagcggcggctcagcgtcgcaggcgcccggtgcccggcccgggtggccctgaaggggagccgcagcataggttcactcctcggcttgtggaggatcgaaccggtatcccactccgtgaacggtgtagatgaacgtcggcgaacgcggctcgtcgcgcagcttgctccgcaggttcttgacgtggctgtcgatggtccgctcgtacccctcgaagtcgtagccgaggaccttctccaccagctccatcctcgtgtacacgcggccgggatagcgagaaagcgtggtcaggagcttgaactcgctcgccgtcagatcgagctcctccccgtcgaggaacaccttgtgagcagccacgtcgatctcgagcggcccgtacacgagccggtcacgctggggttcgacggtgacgttggcgcgccgcagaagagcccggacccgggccacaagctcgcgtggcgagaacggcttgacgaggtagtcgtcggcgccgatctccagaccggtgatgcggtcttcctcctcgcccttggcggtgagcatgattatcggcacgtccgaggtgtcgcggatggtgcggcagacctcctcgccgctgaccagcggcagcatgaggtcgaggacgaccaggtcgaactggcgcttctcgaacgcgtcgagggcggcttcgccgtcagcggcacccgtgacccagtacccttccttctcaaggtaggccgtgaccgcctccctgatggtcttctcatcttcgaccacgagtatgcgtcgcgtcgcggccatctcagcgctcctgacttgatccgggggccggcgtgatcgccgggtcatagccttaccagtgtaacgccccttcgccgaggaaggcttgactacaccgaaactccattgccctcttgaggcacgaattccaccgtgaacgtagttccgccggcctccatgctcgagaaggtgagctgggcgccgatcacctcacacaactcgcgcgcgatggcgaggccgagcccggtgcccatcggcttgctgtcctcgcccctgacctgatagaaggcttcgaagactctctcatgctcggaatcggggatgcccggaccggtgtcgatcacctcgatgacgacccgttcacgaccggagggcacccgtaccgtcacctcgcctccctccggcgagaacttcaccgcgttcgacagcagattgcgcaccacctgggcgagcttgccggagtcggtgatgatccgctcgacgtcggactcgtactccaatcgcagcctcacctgagcaccgctggcctgaggctccatctctgcgaggagaccttcgagcagctcgtcgagtcgtacccactcaacggtcgccggcgcgcgccccgcctcgatgcgtgagatatccagcacatcgtcgaccagcgcaagaagctggcggcctgaacgctccaccatctcgagttgcctgcgctgctctgcgctcacatcaccagcgaggccttggaggatgatcccggtgaatccgatgatcgagttgagcggagtccgaagttcgtgactgacgttcgccagaaacgtgctcttggccgcgttggcctcctggagctggtcgttgaggcgcatcaggtcgcgagtgcgctgtgagacgatattctccaggtcgcggcggtagttcgccaggtctgtggcggcgcggatccgctccgtgagatcgacgaaggacagaaccgcgaacgccgggcctccagactccatgcaatcagcgctgacggacaatgcggtctcaccgccgatcctgcggacgaagtggatagcgtcctcgaacggcgcccggtgcgcaagatcgcggaagccaagcgaggcgtcgataccatcacccgcgtcgcggtgaaggggtacctcccaaaaggtctcgtcgtcttgcgctatcgacggctcgagcagctcccgtgccctttgattcgagtagattacctggccctccgtgccgacgacgacgatgcctgccggcgcggcgttcatgatcgattccgtcaggtctcgctggcggcgcagtagcctctgggtctttatggcctcagccagctggatcctactgcgcatggagtacgcgatatacgcgagcaggggcacgaacaggacttccgcgtagtcctcgatcgggtcgagtccgtcccatatccgggaatgctccaacacgttcgacagcgtgacgaacgcatacaacccgagagtgagagcgagcaccacgaaggctgcccggccgaccacggcgcggcgacgcagtgcgagagccgccgagaagcccgccgccacaatgaacccggcacacgctacggcattgagcacaacgaccggattcacgagcccacgtccccgtgggcttcgaacagatggtacgccccgatcgcgaacgcgacccccgcgaccgcaagcatcagatgctccagcatgttgaacacatccggggcgacgaaaccctcgacgacggtgaacacgtacgtccccaccatcgccagcaatccgacactgaagtaccgcttacccggaacatggaagtcacgcatcgtcgcaaccaggatcggaatgaatgcgacgctcaatacgagattgacgatctcgctctcagagaacatgcgttgctcctgtggtattcgagcgttcggtgccattatgcgtcaaactcgacgggcgggcgacgccgggtgtttcagcctcttctgagcgcctcggccaacgtcggcggcaaacccacggcaaggacggccgccgcgacggcttccacgtcataagccacacggtgtaccgcgagagccgcccaaagggcactacggcccgcgtgcgccgccgccggatcggcggcggccgccgccgcggtctcctcggcagacccgagtatcagctcgacccagcaagctctgggatccccgtccttgggcttaccgacagatcccgagctcacgtagtggacgatcgcctcggcgccgtctgcggcagactgcaccggaaacgatcggtgatacggcacatggacgtggccgacacagatcacgtcggcgtgcgcttcggccgccagacgtgcgagctgggtctccgtgcggtccggcagcagatactcgttgatcttgcgggggctcccgtgcgagagcagcacccgaaccccgctctcatccagtcggatctcgccgggaagcgaggccagccactccgcgcggccgtcgtccacggcgtcctccgtgaacgcgtacgatgcggccccgtccgagcgcgcctgaccggtcgcgtagtagcagccgcactccccacgcctggtcccgatcccttcgtcgtagttgccgcgcactacaggtatcccccgctcgcgcaacagatcgatgacgccgaccgggtccgggccgtagccgaccagatcaccgagacagtacacgtcgtccagtccccgggagtctatatccgccaagaccgcctccagggcgggcaggttcgcgtggacgtccgagaagagtccgattcgcctcatcgcgccactccttccagccgctctcgcaagtcagcgcgcaactgcggcagggcctcctcggcggcggaacggccgagcgcgaccatctgatcgacgaggtcgaagtcccacggcggcatgcccgcgagcacaggcgatatcgtgcactcggcctcggcctcgtcgagagactggttcgactggatgaagatgtcgaacgccatgagcaagacgtctttcacgtcttctgggcggcgcgtgccgtcgggttcgggcacgatatccaccgcgatcacgtagtccgcacccaattcccgcgcagcccggaccggtaggttcgcgatggcgccgccgtcgatgagcagggcctcgccgtattcatcgggcgggaacagccccggcagcgccgaggacgccgtcaccgcgcgcgcgaccgatccttcgcgcacgagcacctcggctccggtgagcacatcacaggtcaccgccgcgaacgggacctcgagatcgtcgaactccctctcacccagcgagcggtcgatgaagcgccggagcggcgtggtgtcgagcagcgcgaggcggtttccccacgacagccgtgtcaggtccgtccacttgagcgtgcgcatggtctcgcgcatctcgccgacatcgagcccggccgccagacacgcgccgatgatcgacccgacactggtacctgcgatgacatccggacggatgccctcgcgctccagtacgtcgagcactcccaggtgtgcggccccgcgcacgccgcctccgccgagtgcgaggcccagcgtccgcacgggtttgcgcccgcgatccttgccgccaagccagtcgaacagacccatactccgctccgatcgtgccgaggagaccggccgccgcttcaacacccgatgaactgtgccatcctatccataccacttcgcctgccggtcgcaacgcggacgttaggctgtaatgtggatgcaacgccgacgcggccgtccgccgagcggttccatgcgggacggtccacgtgcgccgaggaaggaaacgtgtgctcaatctcatcgtcttcacatgcggagcggcgctcatgggcctggagatggctgccgcacgggtactggctccagccctgggaaactcgatctatgtgtggggcgcggtcatcagcgtcgtcatgatcgcgctgtcgctgggctactggctcggtggccaggtcgccgaccggttcggatccacgcgagcgctgccgctcgcgatcgccggtgcgggactcggcaccgtctcagtgccgctcatcgccgatgtgaccctgatgcgcatggccgagttcggcccacgcatcggttcactgggcgcctcggcgctcatcttcttcgtgccggcgctcctgcttgccaccgtctctccgctcggtgtgcgactcgtggccacgcgcggcctggaccacatcggccgctcggccggaagtctctacgccgtctcgaccgcgggcagcatcgccgggacgatcgcgacgtcgttctggctgatcccgctgctcgcgctcgagccgctgatcgtctggacaggcgtgttgctctgcgcgaccgcgctcctctcgctcacgcttccagcgtggaccgcgcgggccgccgggccggacagtcccgcgatcgcgctcccttccggccgccgctcgacggtgcccgccaccgtgacgatcgctgtagcggcggttctcctcggcacatgggttcttgcggaagtagcaccgcctccggccatcaacgagctcggcgagcgcgtgctcttccgcgcggacacgcagtaccaccgcatcaccgtcaccgaggacgacgtcgcccgccacctgcgcttcgaccgcagccaccagtccgccgtgcgcatcgatgacgagtacgaaagcgtcatcgactaccccgagtacctgcacctcgcgctcgccctcaaccccgaggcgcgccgcgtcctggtgctgggcctgggcggcgggacggtgagcaaacgcttctggcgtgactaccccgaggtgcatgtcgattccgtcgagatcgaccccgtggtcgtcgaagtcgccgggaagtacttcggcctgccgcaggactcacggttgcgcgtgttcaacgaggacgcccggcgctacgtccagcgcaccgacgagcgctacgacatcgtcatcatcgacgcgtacaacgccgactcgatgccgttccatctgaccaccgaggagttcttccgcgaagtggactcgcttctggagcccggtggtgtggtcgcctacaacatcatctcggccgtcgaaggccgccgcggccggctgttccgcagcctctatcgtacggccgaaggcgtctggcgcgatatccatgtgttccctgtcgaattcgccgccgttccgcaagtccactcgaaccgcaatatcatcatgctcgcaacgaaccaggtcatacccgccgaggaactccaacgccgcatccgcgaacgcgtcgacgggcgcgtgagcatcaagcgcttccccgccttcgccgacgacctctacaccggcgaagtgacgttcgaggaggcaccgatactgaccgacgcccacgcgccggtcgactcgctgatcgcgatcgactgagggtattcgaagagctctcgctaactttttcttggccgtgtgctatagtcgattacgcgcttcgctgaccagctactcgtaccatttcggagtgtggcgggcttgctaggataagcgaaaagcgtaaggctccgccccggtggcttcggtcgccggggcgtcctttttctgcacgtctttgccgatgtcagccctctttggcatgctgtaggttcagttgatgtctgggggatggagtccaccatgggccttcacgtcggtctcgacattggaatcgcttcggtaggttggtgcgtcgtcgacgcagacgccgggaagatcgcaggggcaggagtgcgcatcttcgcggaggcagaagacccgaaaaccggagcgtcactcgcactgccacgcagactagcccgatctgctcgacgccgaaatcgacgtcggaaagagcgcatgtctcgccttcgagaactactcacggcgcaaggcatcctatcgccggacagtagcgaaggagccttcgtgactcagacaggcgatccgactccgtacgaattgcgggtcgcaggccttgaccggcgcctcaccgaacgcgaatggagccgagtactcactcagatgtgcaaacgccgaggataccgttcgatgcggatcagcgagaccgaagatgatgaagccggggccgtaaagcaggccattgcggagaacgaatcgctcatgcgagagaaaggctaccggactgtcggcgagatgctcctcaaggatgagaagttcgcagaatcgaagcgcaacagaggagactaccggggcgtggtatctcgtgagctgcttctcgacgagattcacaagctgttcgaagcccaaagaaaccacggcagcccatttgccagccccgacttcgaggaatcgtatatcgagactctctcgatgcaggctcccatcaccgagggagacgccctggctgcacgcgtaggtctctgcagcctggaccgcacgaaccccaggatacctctcgcatgcccgacgttcgagcggttccgaatcctcgataagctgcacaacatacgctacacactcgagccaggaggtgcacgtcacacgcttactcaggaccagatgacggccgtgtcgaatgaggcattccgggcgaccgcactcagtctcactcacgttcgcaagctgtgcggactgccagatgaggccaggttcgtcggagtgagatacgacccgcgcagtcctgccgacacaagcgtggagtccaaagagaagctcccccatcccaagaaatggaatcagatgcggaaggcagtctccgatgtttcccccgacgcatgggagaatctagccgcagacttcgagttgctcgacagcatcgcaacggtattgacctactataagtacccggagagcgtggcacgtgaactcgaggccctgggccttgaagcgcctgtccgtgatgctttgggggatttgcggttctccggtcacgctcacctatcacgcaacacgttgcttgcgattctcccgtacatggaagcagggcagtcatactcggaagcctgcgccagcgctggattcgaccattcggccccgatgcaggtgaagcgccaggataaacttcctcccatacctccggatgagattcgaaacccggtcgtcttgagggctctcagccaaacccggaaagtcgtcaacgccatcatcgacacctggggaccaatcgaagagctgcacgtcgagctcggacgagaggtcgcacaagcccacgaagaccgccagaagatcgaaaagagccagaaggagaatcaggcgcgcaacgaatccgtcaaagagagtatttgccaggaactacaggtcagtgatcccaggggtcacgacatcatcaagtacaagctctggacagagcaggacggccggtgtgcgtactccggcaagcccctcgaccccacacgcgtacttcgcgaacctggctatgccgaggtcgatcatattctcccgcatgggcgctcgttcgatgacagctacatgaacaaagttctggtgtctgctaccgaaaaccagcgaaagcgccatcggacaccatacgaatacatgggcggcgacccagaacgttggcatcactttgaagaactggttgcgtcaatgcacctgcctcgcccgaagcgagaccggcttctgcggaaagaattcgacgaacgcgcagctgaggaattccgggagcggaatctcaatgacacccgctacatagcccgctacttcaagaactacgtggagtcacacttgcgcttcgcctcagacaagaagcgtcccgtcatctgcgtgaacggtcgggccaccgcatacctgcgaaaagcctggcagctgcacaaggtcagggaagacggggacttgcaccatgcgctggatgcagcagtggtggcagtcacgtctccgggcattgtgcagtcaatcagtcgcttcttctccgtccggcccctcaggaaccctaacggcgtatatgtggacacgagtaccggagagatcatcgacgccaaacacgttccggaaccttgggagggcttcgcagatgagctacgaaccgtgctggaaacgcccctgccacctgatccactcgagctgctgcgtgaccccgcgagaggaccagcgccgattctcgtcagccgcatgccgacgcgatccattcagggacaggcgcacgaagagactatacgcagaatcgaaggtaccgatgaagctgggcggataaccaccagcaagcgcgtccgtctcgaagagatcaccctgccgatacttgaccgcatggttggcaagaaccaagaccgcgagctgtacctcgcgctgaaagcacgtctggaagcccatggaggaaaggccgccgcggccttcgcagaaccgttctacaagccaacgaaagcgggcaggaccgctccacgcgttcgtggcatccgcgtccacgttaatccaacgagcggcggcacagagatccgtggcgggctggcccgcaacggcaaaatggtgagaacagacgtcttcgagaaggatgggcgctactacttggttcccgtgtacctcaaggatgtggccgccgggatccttccaaaccgggcgattatccaaggcaaggcggagaaggattggcgtgagatcgacgatacctatcgcttcgtcttcagtctctactcgaacgacctggttcgactggtcaagaaacgtggtgaagtagccgatacttggttcgggtacttcgtgggcacgagccgttcgactggctcaattacgatacgcgcccacgacaggacgtgggagagacccagcattggggttgcgcaaggagtcatgactttcgagaagctggatgttgacgtcctgggacgctccgtataccggatacacagggagcggcgccgtggctttccgaacggtcgtgatagggaatgacgcaaggatacgcgtccactcgcgccagctgctggtcgagcaggacgagaccctcgccattccggcagaggacatagctgttctagtcttggagcatccacgcatccgtgtctcctgtgcgtcgctgtcgctactcacctcgcaaggcgtcgccgtcgttacgtgcgacgatgagcacatgccgactggcattctgcttccgtactgccagcacagccgccaattgtcggccgtcaggaaacaactcgcggcgagtaaaccgctcaagaagcgactctggcagcgcatcgttcgctcaaagatagaaaaccaagccctgtgccttgaggatctcgagcgcgacggggcatcgcgtctgcgcgaatacaaatcagcagtgacctccggagacacgacgcacgtggaggccgcagcggcacggtactacttcccccgcctcatgccgggaatcactcgacacagtggacagggtcctgacgccgcactcgactatggatacgccatagtccgggcggcgattgcccgatacctcgttggctacgggctgtacccgccgttcggtatccatcacgacggtcagctgaatgccttcaatctcgccgatgacctacttgagccgtttcgaccgatggtcgacaggcgggttatcaccgatggtatcgacgcctcgacaattgaagggcgcagggagcttgttgccctacttcacgaaccctgcatgctggtcggccaactcaggacagttctgactgcaatcgatagtgcagcccagagcgtagtccgcgcgctataccgcaaagacgatgcgcaactcctactgcccgttctcgtcgatgcgacaacgcatgcgcgtgatcgaatggtggaatgacggtgagactcatgcgattgattgtcatgttcgacctgcccgtggcgaagaaggccgaccgaaaacggtatcagcagttccgcacgttcctgatcaaagacggatactccatgatgcagttctcggtgtacactcgaatcaccaatggatctgacggaattgacaagcacatgaatcgactgcggtgtaacctgccacccaaaggcaacgtacgggttctgactgtcaccgagaagcagtatgagtcgatatggtttctcgttggcaagccttcagttcaggagaaaaccgtgggcgcacagcttcaaatcaacctatgactggcagttttcacacgagactgacccgaaacggcgctgctcagcagcgccgtttcgctcgcttcagcgtaccacttcggagtgtggcggggggctaagacccatcagggtttctccgtctccattcgccgagcgtagcacttcggagggtggcggggggggaaga

SEQ ID NO: 3640 - DNA, 7663 bp, synthetic construct
  source 1..7663: mol_type = other DNA
  misc_feature 1..7663: note = Synthetic
gacttcatggacggcgagcacccctgtccggtgtgcggcgccaccgatggcgaacgtcgcgtgtacccgaccgagcgcatcagacgcctcgatgcgcggatacgccagtacaacaccgacggcgaccacgagatcgtcgtcatcctggtgatggcgctcctggaggcggtccttgaggacatcctcgaccggatcatggacgcgcacggcgccgacctcccgctccggcgcatggtgatggacacccaacgcgcgatcggtgtccggatcggcaaactcttcccggcgctcgcgggagaggagttcgaggaagccgccgccgagctgggctacggcgacttcccgtaccgctggcgccagcttcgcgaagtccgcaacgccttcatccacgactcgccgttcaacggagcccgggagacactccagcccagcatgggcgacgatgcgatggaccttctcgaccagtcgtacaagctgttcgtgctactgaacaaccggttcgtagctgacggattcagcgagggctgagaccgtgcgcgcggtgtcgttgcacgtcaccggtgtcgtacagggcgtggggttccggcccttcgtatacacgctcgcaacggacctcggcatccgcggctgggtcaagaacacctcggacggcgtgttcgcccatgccgagggcgaggatggggcggtggccgcgttcgtcagcggtatccgcgatcaggcgccgcccatggcggtggtgaacaccgtggaagccacggacgtgcctcccgggggacatgcggacttcgtgatcgtggggtccgaggccatcgccggcgccatgacgctcatctcgcccgatatcgccacctgtgatgcgtgcgcggcggagatgcgcgacgcggcggaccggcgctacggctatcccttcaccaactgcaccaactgcgggccgcgattcacaatcatcgaggacgtgccgtacgaccgcccgatgaccacgatgcgcgacttcccgctctgcgacgaatgcgcagccgagtacaccgaccccggtgaccggcgcttccacgcgcagcccaacgcatgcttccggtgcgggccgcggctgtacctcaacggcggcggctcggctgtccctgatgccgaatggagcccggcggcggatgtcgtgccgcgtccgcaccgcgatgtcagcgtggaacgcgagcgcgcagccgcgatcatcgccgacgccgtacggctgctccgcgagggcgcgatcgtggccatcaagggcctgggcggcttccagctggcgtgcgacgcatgcaacgaggatgcggtcctgcgcctgcgcgagcgcaagcaccgctggggcaaggcgctcgccgtgatggcgccatcgctggaggcggcgcgcgagtactgcgtggtctctgccgaggaggaggcgctgctcacggcgccctcggcgcccatcgtgctgctggcgctgcgagacacgagcgttatcggggggtgggtcagcggcgcagttccgcaggcggaggaggtgccgaggacgcctgaggcgtccgcaggcgccgagggcccccgccgaggactgtctgaacacgcgacccaccccccgatgacgctcgcccgctccctcgcccccggcttgcgcgagctcggcgtgatgctgccgtacaccccgctccaccacctgctcctcgacgcgttcggcggaccgctcgtgatgacctcgggcaacctgagcgacgaaccgatcgccacggggaacgccgaggcactggagcgactcggcgggatcgccgacgcgttcctgctgcatgatcgcgacatctactcgcggtacgacgactccgtggagcggcacaccctcgacgtgggcgtggagcacatcaggcgcgcccgtggccgcgcccccttcccgctcaggactccgttcacgagcgaggtggacatactcgccgccgggcctgagcagaagaacacgttctgtctgctcaccggagcgcacgcgttcgtgtcgcagcacatcggcgacatggagaacgccgagacgctcgcgagctacgagcgcacgatagcgctctacgagcggctgttccgggtgcgcccggaggtggtggcctacgacctgcaccccgagtacctctccaccaagcacgcgctctccctcggcctgcccgcgatcggcgtgcagcaccatcacgcgcacatcgccagcgtgacggccgagcacggcgttgcggagcgggtgctcggcgtagcgctcgacggtaccggctacggcacggacggcaccatctggggcggcgaatggctggccgccgactgggccgggttcgaccgcgtggcgcacctgcgcatgctgcctctgccgggcggcgccgccgcgatccggcgtcccgcgcgcatgccactcggcgcgcttgccgaatgcggactgctcgaccacccgggagccgcgccgctgcgcggacgtctggccgagggcgaggagcagaccatcctcgcgatgatctcgcacggtctcaacaccccgctcacgagctcgatggggcgcctgttcgacgctgtggctgcgcttgcgggcgttcgcgacgacgccctctacgaggggcaggcggccatcgagctggaggcgctcgccgaccctgccgcgcgcggcgcgtacgcgttcggtctactcgaggagccgggcggcgcgctcatggtggacagcgctccggtgcttgcggccgttctggacgacgttgccgcgggcgtgggagcgccggcgatctcgatgcggttccaccgggcggtggtgtcggcggtcgtggcagtgtgcgcccgccttgcgccggacctcggggtgagccacgtcgcgctagcgggcggggtcttcatgaaccgcctggtggtacgcggctgcgtgctcggcctccgcgaagcgggactcgagccgctcgtccaccgcgacctgcccgccaacgacggcggcgtctccttcggccaggccgtcgtggcatgggccaagatgatcggcttcggaaaggatcacggcgccggatactcctgattgactcgggcgagcatctcgctgaggcgcgacgtgtcttgccgcttcccctaagatcatcaactgatacaacactgcgtcgtggagaggcttgctctcgtccatcaagtcgccgtcgctgacacccaacgagaacgccatcacccgctcgcacgccagcaccatgtcttcaaggtggacgtcaggatcacgcatgccagacctcgaccctctcccgctctacatgcggatgcactcgcggccgtagggctttgaagcttcccgcgtcagcccttctgcccaagatcgcagagagccactcctccgagccgaacaccgtctcaagagtcggctcggccacctccacgatgaggtccacatcgctctccggcgtctgctcaccacccgcgaacgagccgaagacatcgattctcgtcacgccgaaacgttcgtggagctcgtgcgcatgcgcctggattcgcgcgattacctcaccgagatcgcgcaccggagtcgctcctgcgtgccgatggatcacggcggtaccgcaggccgcgggtgcctcggcagccagaagcggcgcctcccctacgccaagcgcgtcggcaacgagcgagagccgcttcagcgagacgcacccgtagcgctccttctcccagcgcgcgatctgctgctgatgcacacccaccagttcggccaactcacgctgtgagagcccctgggcgatgcgggcggtgatgagctgcgagccgatgtccgatagcgatgccatgcagacggattacatctatttcgatgttcttacaacgaaatcattgtctccacctggtcaacgacgccagcgagctgtgccgatggcagatgtcagcttggtggagtacaattcgccatacgctcgtttatcccaagtgcgtaccatttcggagtgtggcgggcttgctaggataagcgaaagcgtaaggctccgccccgtcggcttctgtcggcggggcgtcctttatccccaaacactctcaagatttgtttatgtcagccccttgatgcactctagccagggagacgtccgctgacttgggggtaatcatgggtcttcacgtgggtctggacatcggcatcgcgtccgttgggtgggcggtactcgaccctgatgagcaccgcatcgtggatctgggagttcgcacattccagaaagcggagaacccgaaggacggatcgtcgctcgcactacctcgccgtctcgcccgctcatcacgccgacgccttagcagaaggcgtgcacggatgagcgacttccgtgacttcctggcagagtccgggatcgttgcatctgatcaactggagattacgttcatccctgctcctgatgaaccgacgccctatcagctgcgatacgagggcctggatcgccagttgtcggcgcgcgaatgggctcgtgtcctcagccagctgtgcaagaggcgtggatacaagtcgatgaagctcgcggtggattcgtctgggaagaacgatgacgaaggccgagtgaagtcagcgattgccgagaacgccgcccgaatgaccgagcgaggataccgcacgttcggcgagatgctgtggctcgacgagcgattcaaggagtcgcgccgtaaccgaggcgactataagggagtcgcctcacgcaaccagatcatcgaagaaatccgcctgctgttcgaggcacagcgcagtcacggcaaccccttcgcggcagcttcgcttgaggaccgctatctcgagatcctgcagcaacagcaggtcatccttgagggcgacgcgattcgcgcgaaggttggcaagtgcagcatcgatcgcgtcaaccctcggatccctgcggcttgcccaaccttcgagcgatttcggctcgttgataagctccataacgtgcgctacacgcttcctggagcgggaacgcgagtgccgctcgacaaggaccagcgtgacctcgtcatcgagaaggctctcggcagaacagcgaagcttacctacgcagatgtacgcaagatttgcgcgcttccagaacaagcacggttcgtcggcgtgcgctacggctcagatgccacggacgtaagcgctgaggggaaggaaaggattcctctcccgagagcgtggcatgacatacggcgtgcgctatcagacctaccagctgacacctgggagaacctcagcggcgatattgatcgtctcgacgacatcgcggaggttctcacgtactacaagtacgaggagtcggtaatcagggagttgcgcagtctaggcctttctgatgaggttgcgtgcgccctatcgggactacggttctctggtcacggacatctctcacgacagacactgcgatcgatactgcctttcatggaggaaggtctcccctactctgaggcctgtgcagcagctggcttccaccactctcaacgcgtgcacggcgagaggcaggagaagctgccgcccatcccggtcgaggacgtccggaacccggtggtactacgagcactggcgcagacgcgcaaggttctgaacgcaatcatccgcgagttcgggtcgatcgaggagctccacatcgagttcggccgcgatgtcgcacgatcgcatgaagaccgcaggaagatcgagaaagcgcagaaagagaaccgtgcccggaatgaatcggtgcttgaggacatagagaaggaattcgggattacaagcccccggcctctcgacatcgtcaagtacaagttgtggaaggaacaactgcacagctgcgtctacagcggagactacattgacccggcacggatgctgtcaggggagccgggcatcgccgaggtcgaccatatcctgccgcactcacggtcctttgatgacggcttcatgaacaaggtactcgcgacgactaccgagaacagaaggaagagggagcgtactccctatgagtacctcggcggcgacccgcagcgctggcacgagtttgaggagcgcgtactctccatgcacctgcctcgcccaaaacgagaacggcttctgagggctgacttcgacgagagggcgtcagaggagttccgtgagcgcaacctgaacgacacgcgatacatcgcacgccaattcaagtcgttcgtcgaggagaacctcatcttcgtgggagacaggaaggcgcccgtggtcactgtcaacggccgagccacggcctatctccgcaccgcttggcggctgcagaaggttcgcgcagatggcgacctccatcacgcgctggatgcggcggtgatcgccgccacgaacaggagcatgatccagcaagtcagccggttcttctcagtgcgcccgctgagaaaccctcacggtgagtacattgatgccgccacgggagagatcgttccagcgaaacatgtcccggagccatgggagggattcgcaggcgaattgcgagaacgaatgggcgcgcgctggggcacagaccccttcggggagcttcagcacatcgatagggaggccccacgaccgattcttgtgagcaggatgccgagtcgggccgttcgaggcgagatccacaaagagaccgtgcgtcgtatcgagggactggatgagaaggggctgattcgcacaagcaagcgtgtccgcatcgaagacctcacgccgaggatgctcgacaacatggtcggtcgcacgcgggatagagaactgcatgaagcgcttgctgaacgacttgccgcgttcggcggtgatggcaagaaggccttcgctgaaccattctacaagcctagcaagccggggcgtaaggcgccgcgcgtcagagctgtgcgagtgtacgactcgccatcgagcggcggaaccgaggtacgcggaggactcgcggacaacagcactatggcgcgaaccgatgtgttcgagcgcgacgggaggttctacttggtgcccgtgtacctcaaggacacaatcaaggacgaactcccgatgcgtgcgattgtacagggcaaacctgagtctgaatggcgcgaaatcgacgattcgtacaggttcgtcttcagtcttcacctaaacgacccgataagactggtacggaagagcgggggctcatctgtcgctataggggggtattacaagggtgtcaatcgctcaaacgcctgcatcgacatagaggcacacgacgcttcgtggaagaagcaaggtcagggtgtagcgatgggcgtcgaatccttcgagaagtactccatcgacccacttggcagaacggcacacctggtgaggcaggagaagcgccgtggcttttcgaacggtagtggtaagcaatgaggccgaactgcacgtgcagcaaggccagcttgttgcagtccaagagcaaaccacctggattcccacagaagacatcgcggtactagttctcgagaacccccgtgttcatatctccacagcggcgctctcgcttctcgccgaacagggcgtcgctgtcgctgtctgtgaccgaaagcatatgcccacaggcatgcttcttccgcactgcgcacacagccgacagctgggagttacgcgcctgcagttcgcacaaacgttgcctcagaagaagcggctatggcagcgaatcgtacgcagcaagatccagaaccaggcggagtgcctgagcggactcggcctagggggagcccccaagctgcgtagctacgcagc

SEQ ID NO: 3641 - DNA, 7283 bp, synthetic construct
  source 1..7283: mol_type = other DNA
  misc_feature 1..7283: note = Synthetic
gatgaccagcacgccctggtcgacgtgcaggccgaggacgtggccgaggtcggcgcccagggtctgcccctcgacgcccagccaggcgtgcgccaccttccccgtggcgaggagctcgcgcagcacctcgcgggccgtgttgatgggcacggcgaagcccagcccctcgttgccgccgctctgcgaggcgatctgctcgttgatgccgattacctcgccgcggccgttgatgagcggcccgcccgagttgccctggttgatggcggcgtcggtctggatgccgccggggatgacggccccgtcgggcgcctgcaggttgcggtccaccgccgagacgacgccggtggtgagggagaggtcgtagcccagcgggttgccgatggccgccaccggctcgccgaccaccaccttgtccgagtcccccagcggcagcgggtggagggccggggcgcgcccggggtcgaccttcagcacggccacgtcggtggtctcgtccacgccgacgacggtggcgggcacggtcacggagcgcgtgccggcggcggcgtcgccggtggaggtcacggggacgctgaagacgacgctgacctcgctcgccctgaggccgtgcgagacgaccacgtgggcgttggtcaggatgtggccccggcggtcgacgacgaagccggagccgagcgcccggccgtcgagcggggcgccgaacggcccgcgggcgcggaaggtggccagcacctcgacgacgccgggggcggcgcgccggtagatctcggccggggtgagggtcgcggcgccgggcgccgggccggacggggcggccgccggccaggcggacgcggcgtgggcggcgccggcggtcgccgtggcgccgccgctgaaggaggcgccggtcgcggccacgcgctgcaccacgaccgtctcccgcaccttcacgggcagcacgccggcggccatgagggcgacgaggacgacgaccacggccagggcgccggcgagcgccgcgccgccgcggccgcggagcagttgcgcgagccttgtcatggctggacctcccggacgctgctgtcactccgccccgcagggggctgcggcacttctaccgcgccccgctggggcaccgctgggaggaggctgggaggaggctgagagggcggagcgggggcggccggcggggtggccggaagggcagcagggaagtcgcccggaaggcgggctcaggcgccgccctcatcccccttcgtgagccgcagcgagaggaggacggacaccccgatggcgaccacgaccacgcccagcgagaccacggtgggcacgtggaccacgtcgctcagcagcatcttggcgcccacgaaggcgaggaccgccgccagcccccaggtgaggtactcgaagcgctcgaggctgctcgcgagggcgaagtagagggcgcgcaggccgaggacggcggcgatgttgctggtgaaggcgacgaacgtgtgcgtggtgatggcgagcaccgcgggcaccgagtcgagggcgaagaccaggtcggccgagttcaccgccacgagggcgacggcgaccgtggtcaggtagcggcggccgtcacggtggattacgtagcggccgccgcggtagtcggcggcgaccgggaagaggcgccgggtaaggcggacgagcgggttgcgctcggggtcgacctccaccccctgtgtgcgcaccagccgccaggccgtgtagacgagcaaggcgccgaacaagtagacgacgaggtgcaggcgctcgatgagctggatgccggcgacgatgaaggcgccgcgcagcacgacggccgcgatgatgccccagaagagcacgctgcgctggtagcggagctccaccccgagggtggcgaaggcgacgaggaagacgaacaggttgtcgatgctcagcgagatctcgatgaggtagccggcgaggtactgctgtgcctgctcggcgccgtaccagccccagacggcgagcgagaagccgaggccgagcccgacccagacgaggctccagcggaaggcggtgcgcgggctgaggacgacctgcttgcggccgaccagggcgaggtcgacggtcatcgccgtgccgacgatggcggcgaagaccacccacggcgcgagctcgtgctgcaggaagctcagcaccgccgcctcgcggccgcgccctcggcgggcgtcacagttgtgtcacaggtcaccacgtcgcgccgggcgtccgggaaacctcccctgacatggcaagaccgccggcacgctgccgcgcaccgacggtctcgccatgctcctgccaccaaacgctggagggacccggcgcggccggggtgcgagcacccgtgctgacggccgcgccacccgccgctcgcgcggcgggctggctactccccatcgcgagacgcacactagaacgagaggggggcgggggtcaagcggcacgcgggctcttcttgacgcctgcgcaccgccgtcctacactgcacgcgcgtttccagcgtgcgcaagcgcttaccacttcggagtgtggcgggcttgctaagataagcggaaacgcgtgaggctccgccccggcgggttcgtcccgtcggggcgtcctctttccggagggttattggctcgctccttcccgcggtcggcgctgactccgttcttgccccttctcctcggctgcaggttccgtcctctcacgctactaaggtgtacgctctcgtctgcagcggaatgcgggggtcaacccagtttgcctgaggaggggcggagatgggagtccacgtcggtctcgacatcggcatcgcttcggtgggctgggcggtcgtcgacccggagcggcggcagatcctgggcatgggggtgcgcacgttcccgagggcggaggacgcgaagaccggggcgcccctcgccgagccccgtcggctcgcgcgctccgttcggcggcggctggcgcgcaggcagcagcgcatggaggctctacgggagttgctggtccggcacggtctcgcgacggcggaggaactggatggcgaccccgccagcgacgccagcttgtaccgcgtcctgcccggcgatcccacccccttcgaactgcgcgccgccggcctcgaccggcggctcgacaggcgggagtgggtgcgcgtgctcacccagctgtgcaagcgccggggcttcaagtccatgcgcctgtcgcggcgggccgaggaggagagggaggagggcgtgctcctccaggcgattgaggagaaccgtcggcgtctcgaggagaagggctaccgcacggcgggcgagatgctggcgcgcgacccggagttcgccgaagcgaagcgcaaccggcggggcgagtaccgcgcggtcttgtcgcgcgacatggtgctggatgaggtggcgaagctgttcgacgcccagcgcacccacggcaacccgttcgcttcgccggagctcgaggctgactacgtcgcaatcctcgagacccaggcccccatcctcgaagggccggacctgatgtgcaaagtggggcggtgcagcctggacggtgagcacccgcgcacaccgctcgccagcccgacgttcgagcgcttccggctgcttcagcacctgctcaccctccgaatcgtggagggcgccggggcgccggagcggcggctgacgcccgacgagttgcggcgcgtgctcgacaaggcccagtcgcgcaagacggcgctgacggtgaaagacgtgcgcaaggttctcggcctcttggaggatgcggcaatcctcggtctgcgctctcgggacgacggtgcggagagcgagcgcctgcccggcctccctgcgtggcatgccatgcgcgaggcggtgagcgcggccgcccccgagctctgggaagcactggcggcagacgaggagctgctccaccggacggcctgcgtgctcacctactacaagactgacgagagcgtccgacgggagcttgccggcctcgggcaccgcccacgcgtcgtcgacgcgttggcgggcttgcggttcagcggccacgcccacctgtcgcgggagacgattctccgcattctcccccacatggagcagggcctcccctacgacgaggcctgcgaggcggctggcatcaggcactacctgcgcgccgtgccggggacgcgcgccagacggctcccgccgctgccggccgacgacatccgcaaccccgtcgtgctgcgtgcgctcagccaggcgcgcaaggtgttgaacgccatcatcgaccggtgggggccgattgaggcgctgcacatcgagcttgcgcgcgacgtcgggcgctcggccaaggagcggcgccgcatcgagttcgagcagcggcggaaccgcgagcgcaacgagcaggtgagggcgcaactcaaggaggattacggcctcgccgaaccgcggccgcttgaggtgctgaaataccggctgtggagagagcagcacggtcgctgcgtgtacagcggagagtacatcgagcccgagaggatgctgcgggagccctactacacccaggtggaccacatcctcccgatgcgacgctcgttcgacgactcctacatgaacaaggtgctcgtcctgtccgaggccaaccaggagaagcgcgaccgcactccgtacgagtggctcggcggtgacgagcggcgctggcacgagttcagcgaacgcgttctcgctctccatctgccgctgcgcaagcggcagcgcctcctgcgcaaggacttcaagggcaaggaggaagaggagttccgcgagcggaacctcaacgacacgcgctgggcggcgcgggagttcaagaacttcgtcgaggcgaacttggagttcgcgtccgagagcgcgcgtccggtgatcgtgctgagcggacgcgtgacgaactacctccacaaggcttggcggctggagaaggtccgcagcgagggggacctccaccacgcgatggacgccgcggtggcggcggtgacgagtccgggcatggtccagaaggtgagccggttcttctccgctcgccggctcacgtccgtggacgatgtctacgtcgatgccgagaccggcgaggtcgtcgacctcaagcacatcccggagccgtgggaggggttcgtcgcagaagtgcgcgagtggctggcggcgcgcttctcggacgaccctgctggcgacctggctgcgccggacgggcagccgcgacccatcctcgtcagccgcatgccgcggcgcggcctgagcggggaagcccacaaggagacggtgcgcaggctcgagggcgcggccacggacggaaggctgcgcaccagcaaggtggttcccctgagcgagctcgactccaggagcctcgagcgcatggtgggccgcgagcgcggcgaccacgcgttgtacgaactgctgcgggcacgcctcgaggaggctggcgacgacccgaaaaaggccttctccgagccggtctacaagccctcgcgcaacggccgcggcccgcgcgtcaaggcggtacgtgtgtgggacgacgacgccagcggcggcgtgcctgtgcgcggcggccttgccgatcacggccgcatggtacggaccgacgtgttcgagaggggcggccgatacgtgctcgtgccggtctacgtggccgacgtcgcggcgaggcggctgccgacgaaggccatccgcgtcggcaagcctgagaccgagtggcacgacgtctccgacggcagttggcgattctgcttctcgctctacgagaacgatttcgtgcggattgtgcgacgccggcgggacggccggcaagaggtggtctggggttattacaagggctgcgatcgcaatactgcgcgaatcaccatcgagccacacgactcgtcgagggacggcgcggcgaagccaccccgtgtgagtgtgtacgaaggaattgccaagttcgagaagtaccacgtggacgtgctcggcaggcagctctcgcgcgtgcgcggggaggcgcggcttggcttttcgcgcggtggtggtcgagagtgagtgcttcctccacgtccgtcagggatggctggaggtggctcgcgacgacggccagatggtcgccgtgcctctcgaggacgtcgccgtgctcgtccttgagaacccgaggactgcggtctcgacggctgggctggcgctgctgtgcgagcagggggtggcggtcgcggcgtgcgaccgtcaccacctgccgagggccgtggcgctccccttctgcgcccacagtcgccagacgggaatcctgcgcctgcagctgagcgccagcctcccgctgaagaagcggctctggcagcggctcgtgaccgcgaagattacgaatcaggcggcgtgcctcgacgccttgggtcttgacggcggcgcgctcctgcgcggctacgcccggcaggtcctgtccggcgacacgtcgggcatggaagcggctgccgcccgtgtgtacttccagcgcatcctgcccggcgagtcgcggcacggcggcagcgctcgcgaccgtgctctcgactacggttacgccgtgctgcgcgcggcggtggcgcgggcgctggtagcccacggtctccacccgccgctcggcgtgcaccacgacagccagctgaacgcgttcaatctggccgatgacgttctcgaggtctttcggccgtgggtcgactatgctgtggcggcgtggaacctctcggcggcggtacgggagcaccgccagcgcctcgtgggccttctccacgcccgggccggcatcgggtccgatcgagtgaccgtgctgaccgccgcggacacctgcgccacgagtctcgtcaccgccctcgaggcgaaagacgccggatgtctgctgacgcccgtcttcgtgcccccggatcccggccacaaggggtcaacccgtgcggctcatgcgcctgttcgtgctgttcgacctgccggtgaagacgaagcgtgaccgtcgcctgtaccagaagttccacaacttcctggtcaaggacggttacgacatgctgcagctgtctgtctacatgcgtgtgacgaacgggtttgacggtgtcgagacgcacctcgcacgtttgcggcgcaacctgccgccgcgcgggaatgtgcgcgccatggtggtgacggagaagcagtacgcgaggatgctcgtcctcgtcggcgagccgacagtccaggaaaaaacggtcggcgaccagctgcagttgtggctctagggaccggttttgccccggccaagaccgagaaaagccccgcaaagcggggcttttctcggtcctttagcttaccacttcggagtgtggcggggagctaagacagggccgcggccgcata

SEQ ID NO: 3642 - DNA, 6087 bp, synthetic construct
  misc_feature 1..6087: note = Synthetic
  source 1..6087: mol_type = other DNA
cgcgggcgtaggagcgccgacgatatccacgcggttccaccgggcggtcgtggccgtgatggccgaggtgtgcgtgcggatcgcgcccgcgctcggcatcagccgcgtcgcactcggaggaggggtcttcatgaaccgcctggtggtacgcggctcggtactcggcctccgcaaggcgggactcgaaccgctcgtgcaccgcgagctgcccgccaacgacggcggcgtctccttcggccaggctgtcgtggcgcgggcgaggcggagggaggagtgaacgctactcacccacgcgctcctcgcggtccagggcggctagcatctcgcgcaactgcgggagcacgcggggaaccgccacgcgaagggcatgaagcacgagcgcatcgtcgatgccgtggtagtagtgcaccagcttgtcacgcattcccaccatgtcctgccaagggatgtcggtccactgctcccggcgttcggtagtgatgcagcgtgcggcctcaccgaggactatgagttgatgtaggagcgccccccggtaaggcaggccttcatccagcatgtcctccgtgcgcttccctgaggcgaagaccagcatccgctcgcaagcggccaccatgtcggcaacatacgctacctcgctacgcctgccacacacggactaggtcctccatcagattctcacgcacacgtggattgatagatgccagtgaaccgcactctgccgtgcgacccagcaggtcggtcaagaaccgctccgagccgaagaccgtctcgagggtcggctcggccacctctacgatgaggtccacatcgctctcgggcgtttgctcgccacgcgcgaacgaaccgaacacgtcgatcctcgtcacgccgaaacgctcgtgaagctcatctgcgtatgcgcgaatccgcgcgatgacctcgccgaggtcacgcaccggggtcgctcctgcgtgccgatcgagcacggcgccgtaggtcgcggaagcttcggcggccagaagcggcggaggctccacgccgagcgcgtcagcaacgagcgagagccgcttgagcgaaacgcagccgtagcgctccttctcccagcgcgcgatctgctgctggtgcacacccactagttcggccagctcacgctgtgaaagcccccgagtcatgcgagcggcaacgagctgcgggccaatgtctgatagtggtgccatgcgagcagattacatctatttctatgtgctcacaacgaaataattgtctcttccaggccatcgctaccaacaaccggagcgaatggcagatgtcagcacgatagagtagaatctgtgatgcgatcgtttgtcccaagtgcgtaccatttcggagtgtggcgggcttgctaggataagcgaaagcgtaaggctccgccccgtcggcttctgtcggcggggcgtcctttttcctctctactgcgccggatccatttgtctatgtcagaaccttgttgcactctaagcaggaagatatccgttgacttgggggcgcttcatgggtcttcacgtaggcttggacatcggcatcgcgtccgttgggtgggcagtgctcgatcctgatgagcatcgcatcgtggacctgggagtccgaacgtttcagaaggctgagaatcccaaggacggttcgccgctcgcgctacctcgccgtctcgcgcgctcatcgcgccgccgtttgaagaggagacgtgcgcgcatgagggacttccgtgacttcctgacggagtccgggattgtgtcgcctgaccagctggagaccgcattcacccctgcctccggtgagccgacgccctaccaactgcgatacgagggcctggatcgccagctgtcggcgcgcgaatgggctcgcgtcctcagccagctgtgcaagcggcgcgggtataagtccatgaagctcgcccaggattcacctgacaaggacaaggatgagggccgtgtgaaggccgcgatcgcggagaacgcagcccgtatggccgagcgaggataccgcacgttcggagagatgttgtggcttgatgagcggttcgcggagtcgcgccgtaaccgaggagactacaagggcgtggcttcacgcgaacaagttctcgatgaggtccgcttgctgttcgaggcccagcgtgcgtacggcaaccctttcgcatcgactgcactcgaggatcgctacatcgagatacttcagcaacagcaaccgattcttgagggtgatgcgattcgcgcgaaggttggcaggtgcagcatcgaccgcaccaatccccggatttccgctgcctgcccgacctttgagcgatttcggcttgtcgataagctcctcaacgtgcgatacacgcttcctggatcgggcagacggataccactcgacaagggacagcgcgatctcatcatcgagaaagctctcggtagaacagcaaagcttacctacgcagatatccgcaagatctgcgggcttccagaagcagcaaggtttgtcggcgtgcgttatggctccaatcccacagacgtgagcgctgaggccaaggaaaagatccccctccccagagcgtggcatgagatgcggcgtgcactgtcaggcctgcccgctgaagcctgggagaacctcagcaacgatatcgatcgcctcgacgacatagcagagatcctcacgtactacaaatacgatgagtcggtcctccgtgagctgcgtggtctaggtcttcccgaagatgtcgtgttcgcgctatcagggctgcgcttctctggtcacgggcatctttcgcggcaaacactgcgagcgatactccccttcatggaggatggcttgccctattctgacgcctgcgcggccgccggcctccatcactcccagcacgtacgcggcgagaagagaacgaagctgccgccgattccagtcgacgatgtccgaaacccggtagtgctgagagcgctggcgcagacgcgcaaagtgctgaacgcgatcatccgcgaattcgggcacatcgaagagctccacatagagttcgcccgcgatgtcgcgcaatcgtacgaagaccgtaggagaatcgagaaaactcagaaggagaaccgtgcccggaatgaatcggtgcttgaggacatagagaaggaattcggcatcacgaacccccgcccgctcgacatcgtgaaatacaagctgtggaaggagcaaggcggccgctgcgtgtacagcggcacctacattgaccccgcacggatgctgtcaggcgagccaggcgtagccgaagtagaccacatcctcccacactcgcgatccttcgacgacagcttcatgaacaaggtgcttgtcacgaccaccgagaacagaaataagcgagagcgtaccccgtacgagtacctgggtggtgatccgcagcgctggcacgagtttgaggagcgcgtgctgtccatgcacctcccacgaccgaagcgagagcggctgctgagaatcgatttcgacgagagggcatcagaggagttccgcgagcggaacctgaacgacactcgatacatcgcacgctacttcaagtcgttcgtcgcggagaacctcagcttcgctggagacagcaaggcacccgtggtcactgtcaacggtcgagccacagcctatctccgcactgcctggcaactccagaaggttcgggcggaaggagatctgcaccacgccttggacgccgccgtgatcgcagccacaaccaggagcatgatccagcaggtgagccggtttttctcagtgaagccgctgaggaaccatcatggtgagtacatcgatgccactacgggagaaatcgtgcccgcgaagcacgtcccggagccatgggacgggtttggagatcaactccgccagcgcatgagcgcgcgttggggccaggaccccttcggggaactgcagaccatcgatgagggagccccacgcccgattctcgtaagcaggatgccaagtcgggccgttcgaggcgagatccacaaggagaccgtacgccggatcgagggagtggatgacaaaggcctgattcgcacaagcaagcgtgtacgtctcgaagacctcacgatgaacacgctcgacaacatggtcggtcgctcacgggacagagaactgtacgaagcgcttgctgagcggctagccgcgttcggtggcgatggcaaaaaggccttcgcggaacccttctacaagcccagcaagccgggacgcgaggcgccgcgcgtcaaagccatcagggtgtacgatccgccatcgagtggcggaatcgagatccgtggagggttcgcagacaacagcacgatggtgcgcaccgatgtgtttgaacgtgatgggaggttctacttggtgcctgtgtatctgaaggatacggtcgaggacgaactcccgatgcgcgcgatcgtgcaggggaaaccggagtccgaatggcgcgagattgatgattcatacaggtttgtcttcagtcttcacctgaatgacccgataagactggtacggaagagcgggggttcatctatcgcaatggggggctacttcaaaggcgtggatcgctcatccgcctgcatcaaccttgaggcacatgactcctcatggaagaagcacggccaaggtgtagcgatgggcatcgaatccttcgagaaatactccatcgacccgcttggcagaacagcacacttggtgaagcaggagaaacgccgtggcttttcggacggtagtggtaagcaatgaggccgagctgcacgtgcagcgagggcaactcgttgcagtccaagagcagaccgtctggattcccacagaagatatcgcggtattggttctcgagaacccacgcgtacacatctccgcagcggcactctcgctcctcgcagagcagggcgtcgccgtcgctgtctgcgaccgaaagcacatgcccacagggattctccttccacactgcactcatagccgccagctaggggttacgcggctgcagtttgcacaatcgctgccacagaaaaagcggctatggcagcgcatcgtacgcagtaagatcgagaaccaagcggagtgtctggaggcactcgaccgaggaggggcccctcaactccgtagctacgcgggagctgtcctgtcaggggattccagcggcatggaatcggcagctgcacgcatgtacttcaagcacctcatccccgatgccacgcgtcggtccccggacgggcccggtcgttcgctcgactacgggtatgcgattgtgcgagcggcgatcgcccgcgccctcgtgggacatgggctattcccggctgtgggactacatcacgacagccaactgaatgcgttcaatctcgctgacgacatcctcgaaccattccgcccgttcgtcgacttcatcgcgatgagacggtccgctgacgccgccactgcagagggaaggcgggccctgatctcagtcctgcaagcaccctgcgccctcctggaccggtcacacacactgcttaccgccattgatgccacagctacaggtcttgttcgcgcaatggccgagaaggatccaaccctcatgcccgttcccgtgtttgacccatcgggcgacatggcagaagcgctcatggagtaatggtgaagcctatgagactcatcgtgctgttcgatctgcccgttcgcgccaagccggacagacgtgcctaccagcagttccacaagttcctgatcaacgacggctacgtgatgatgcaattctcggtctatagtcgagtcaccaatggactcgatggcgttcagaagcaccttgcccgtctgaaagccaatctaccttccaggggcagcgttcgggcgatgacagtgacagagaaacagtacgagtcgatgctgttcctcgtgggcaaaccaactacacaggagaaaaccgtggcggcacaactacagatatggctatgaatatcggtttctcaaggcagaacgacaagaagagcgctgctcagcagcgctcttcttgtcgccgtagcgtaccacttcggagtgtggcggggagctaagacgtgcggagcttgccacctggaagcacttgcgagcgtaccacttcggagtgtggcggggagctaagactcccacgtcgtgaccgtcgct

SEQ ID NO: 3643 - DNA, 9180 bp, synthetic construct
  source 1..9180: mol_type = other DNA
  misc_feature 1..9180: note = Synthetic
aactccgcatgatctgccgcgacgacaatgtcgcaagccaacgccaattcgagtcccccacctagtgcaaaaccgttgactctagcgatgactggttttggaaagtaccaacgtctagccaagctaactgaattttctcgtttaactcgaagatcttctaggtctgcttgagaaagttgggcctccacttgatgaaatttcaaatcagctccagcacaaaaagctttatcgcccgctccagtaaccacggcggcccaaatgtcatcgttcctttcgatttcgtcaaagtgctggctcaactcccaaagtacgtaaggtccaaggcaatttcgtacttctgggcgatttagtgtgatgtaagcgactttatccttcacttcaaacagcgtgaaatggctttgttcattcacttggtgtactcccggtatcaagtaagtagccaagaatattagaggttttaggtagcttaagtcaattactcagggcacgaaaggtcaaattcgtaaaggctgatgaggggtcgcaagagaatttcgaggagttttggacctgtagtgaagtaacatcagtgactcaagcatgggaagggcattagtagtgtgctctgcagtgttttatccccaattgagaagctttctaaataatcagtcgaatcagggagatacttcaagcttcgctatatggactgatgatctcacacggaccgttgttcatcgttgcgttcttaaataagaagaagcccgtcaaagacgggcttctagtatccggcagctgaccttgggttgccgagcccacacaaagggtcgctttacttgtgaaaagcggtcacttctcgcttagttactctgtaagtatactttagaaataaggtaatgaaaagagaaatatagaagtaaatgcaaactgctaacaagcaacgggtattgggattggatttggggaccacttcggtaggtttcgccttgattgactacgatcaaagtctccattctggaagcatcgtacatatgggtgtgcgcatatttccagatactcgagataacaagacagaagtcccgctaaatcaacaacggcgggcaaaacgattggtaaggcgccaagttcgacgacgcagaaagcgacgtcgcgagttgaatgagtttttgaaccttcacggattgctgcctaagtacggaacggaggagtggcattcgttgatgcggttagacccatacgaactgcgtcggcgtgggttgcacgaggagctgtcaccatttgagtttggcagagcactttaccatctgtcaaaacgtcgtcacttcctaggcagggcgattgaaactcaggattttgacgaaccagatggcgaggataataagacaagagaagatcgagaaaacgttttacgtgaactgaaagaacacgaaatgacccttggcgaatggcttgctactcgcaccgcgccagataaaaagcgcaatgtcaaggcctcaagagacgtggtaagacaagagttccagcggttaatcgatcatcaagagcaattccacaaagaaacaatccaagattactcttcgttgaaatctcacctagagcagattattttcgaacagaaaccagtgttctggcggttgaataccctcggtcaatgtcgctttttcccagagagtgaattgtgtcatagtggcagttggttagctcatcaacggcgcatgttagaaatgtttaataacctgttagtagttgggaatctacagcccttggatgatgagcaacgcgaagcgatcctcgaacacttaggttctcgtagccatatgacatggactcaggtgcgtaaagcgcttgctccaatctacgagactagatctgatgagggttacgaaaaaacaattaagttcaatttggaggaaggtggtgcccggcatctactgggtaatccggtggaaaaagatcttaaagagatcttcggcgatgactgggactcctttccgttaaagcaggaggtccgggaccagattcacacagacttgtggaactgtgattacaagaagataaagaatcaacgagttgtcataaattcacaggagatacgccaatcgaagagacaagccctggcaattgagctacaagaacgctacggaatcactactgcaaaagcagaagcgttgacgaagttaagcctcaagactggttgggagccgtattcagtagaagcgacaaaaatcttcgttgaaatgcttgagaaaggctatggaatggggtcgcttctcaattcaccagattgggctgagtggcgaaactccaacttcccacatgaaaacgaaggtagcactgaacaatttgatcgtctaccctcgccgaagcatccctctgaacaagctcggcttcgtgcaatcaggaatcctacggttgtccgcgcacaaaatgaattacgtaaggtggtcaacaacctgatagatacctatggaaaaccagatcgtattcgaattgaactagcgcgaggattgaagctaccaaaagctgttcgatcgaaaatacaaaagaggaacaaagaaaatgaaagtctgcgagaggcagcccggaaaaaccttgaggaaaaccacatagtaaacccatcgaggagggatgtcgataaatgggttctatggaaagaatgtcacgaagaatgtccgtatacaggaagccacatcgggtttgaatcgttatttggagctaacccaagttttgatattgagcacatatggcctcggtctagatcgtttgacgatagcttggcaaacaaaactttgtgcttgagttctgagaatcaaataaaagggaataaaactccatacgaatatttaggaagtaaccgtgaccgctggttccatgtagaaaaacgtttggaaaagatgcgggccaaaggtaacaatataggcatgagtgtgcagaagattcgcaggtttcgtagtccagaaattccagatgacttcgccaatcgtcaattaacggatacgagctacgtatctacagaagccgtagcatcgttgaaacgactttggacgaatgaggaaaatgctcgaaatgtattagtgcaagcagtaagtggtaggggtacgtcaatccttcgtaagctctgggggatgaacaacatactttcaggtactgacgcgaaaacccgcgatgaccatcgtcaccatgctgttgacgcgctagtggtcgcttgtatgcacccatccatccacaaacaattatccgaatactggagccgtaaagagtcacactattcaagaccattggctttagatcctccttggcctactttgagacaagatgcggcaattcatttggaatccattgtagtttcgcaccgcgtacgtcgtcgagtaagtggagcactccacgaggaaacggtttatcgaaggaccggtaatgtgagtgggaagggaaacgtggaggagttcgatataagaaagccgatagtgaatctcacctcgacggagaagaagaacgtaagagatgcaaaactccgagaagtggttctcaagagtgataaaacatcagaaattaggctgggtcacggaccggaggtgaagagggctcgagtcataaaaaacaaggacccgaaactacttcgaaatgtatccaacggctacgtagaatctggtgaaaatcatcacatggctgtgtatagggatgaacatggtcggactaagtatgaagtcgtaacaagatttgatgccgctaaacgtctgagtcaaagagaacctgtggttcaacgaactagaccaaattcagagtttattaattctttttcaattggagaggcgattcaaattgatgcaggagagtacataggtgtgtggatcgtcaaaatgcttcgagctgatggtagagtgtatttgatcaagcacgatgatgcaagaccgaagccatcagccatagggttagcgataaatcagctgattacaaaacacaaaatacgaaagatatctgttgatccaatcggtcgagttcgtccatcgaatgactgagattcatgcccttagcacatttaaaacgtacagttgaagttgctactccaggaacaaagctctctgtatcccttggtcagcttgtggttaatcgacctgggacacgtcaagtacaagtaccaattgaagagatcgggatgctaattattgatgatgttcgtgcatacgctacccagagtgtttacattgagttgttgaactcaggtggttgcgtcctgattagcaatgcaagccatcttcctgtaggaatgatgatgcctattgatgggcattcaacacaggttcaaattcaaagaagtcagatatcaatgactaagcctcagcaaaagaggttatggcagcgcattgtgcgagaaaaggtacgacaacagagtcgggtgttaaccaatttcaacaactcagactacggactctctaagttagccaaacgagtactgtctggtgatgcttcaaatattgaagcacaagcagctcgaaaatattgggcgagactatttggtaaacgctttagaagagaccgaacgtgggaaggtctaaacgcactgttaaattacggttatgccgtagtcagagctactgtcgccagggcaattgttgcatctggattgttacccacgattggaattcatcatcacaatcgatcgaatccattttgtctcgcggatgatctcctcgaaccatttcggccgtttgttgactggcgcgttaaatccattgcactatctaatcagcatgattcagagctgtgtctccagaatcgaacagtaagagctgaactcttgtccttactgaatgtaggaattcggataaatgatcgtacgacaccgttgagtctcgctattagcatctctgccacatctcttcgagattcaataattgagcaggaagacaagcttgtttttccaaaaggattgccggacacccaaatttgatagattttcacgaaggcaatctatgaatattcagtgctaatggaaatctaattatgaaaaatcaaaagcgtcgacgcgattggccatggggatggaaaaccatgtgggtatttacactttttgatttgcctacatacagtaaagcaactcgaaagaagtatgccgagtttcgaaaatgtctgttaaaagatggattcacaatgatgcaatattccgtctacgttagacattgcaattcattggaaaatgcaaatcttcacattaagcgaatgtcttcattggtaccagcggaaggcgaggttcgttttttcgtcatcactgaccgacagtacgagaaaatactgacgtttgaaggtagaaaaatcgttagagatgatactcctcgaccgtctcagcttcaacttttttgaggcgatcgaggaaattagctttgcttttcaactagataaacaaaagctattgtaactaagtgagaaatggccgcaggtcacagcctgttggagctgtggataagcaggatatttattgtaactaagtgagaaatggccgcaggtcacagcttggcgtaaaggtcattttggagtttatttattgtaactaagtgagaaatggccgcaggtcacagcacgtgggttgtcaggcatagacatcctaaaattgtaactaagtgagaaatggccgcaggtcacagcacgtgggttgtcaggcatagacatcctaaaattgtaactaagtgagaaatggccgcaggtcacagctatcagtacgtgagcgacactgtgatgcaattgtaactaagtgagaaatggccgcaggtcacagcctgaatcagatgctaaacaatctcagtgtaattgtaactaagtgagaaatggccgcaggtcacagctaaggtgtgaagaattttcgtttcttttcaattgtaactaagtgagaaatggccgcaggtcacagcgactgtgcgtccgataaaagtttctttacgattgtaactaagtgagaaatggccgcaggtcacagcggcggtcgaggtggtggcgaacggcgatggattgtaactaagtgagaaatggccgcaggtcacagctatacgcatcaacttccttcctagaaacaattgtaactaagtgagaaatggccgcaggtcacagcctagattcaatcgcttcgttgtttgcgtcaattgtaactaagtgagaaatggccgcaggtcacagctatgaccgcctgttgatcttgaattgccagattgtaactaagtgagaaatggccgcaggtcacagctgccttccgcacagtccaacaaggtcatctattgtaactaagtgagaaatggccgcaggtcacagctcattcgagcacatagccagagggttcgtaattgtaactaagtgagaaatggccgcaggtcacagcctcaaagctaaatcctcaaaaaaagggttaattgtaactaagtgagaaatggccgcaggtcacagctcgaataaggatagccagattcgtagcgtcattgtaactaagtgagaaatggccgcaggtcacagctcattcgagcacatagccagagggttcgtaattgtaactaagtgagaaatggccgcaggtcacagcgtaaataacctcattcccgttgaggtttttattgtaactaagtgagaaatggccgcaggtcacagctagagatctgcaatatctaaatcgaatgcaattgtaactaagtgagaaatggccgcaggtcacacccacgtacgcggggatgaaccggatgatcaattttaactagacgagaattgaaagtcctactacaggtgtacgtgacaggttccacgggcattgaactacgtcagctaacccagatccagtccaatttgtcgccgcttcaatcgctttcgttccacctccagaaccttttccatatgctgtcaacggagcataaaatcaacgtcttgcgaagaggagatagatgttcgtgtgtcagacctaaaggctcacgggttcgcaaggtttgattgatcagatcaagatcgaactcagtcactttgattgtcatttataggggccacagtacacagtttgggacgttggtaagatcaaggatgccatgtggatggtccaacccaatggtacattctcatgtggcttacttctgttggtacacccaaaactcttgctctttgatgaagtacgttacctaccactagcggaagatgctggacatttaccgttcaagctcattaatgcgagatacgaaaaggaatcgaacattttcaccaccaatcaaggatttgaaaagtggggttctgtacttggcgatgaagtgatggtgaccgccatgcttgatagaattctgattcgtgatcacgtcgtcaacatccgcggaggtagttaccgaatgagtcaatatcaagcgatgtacggtttccagcagtagatcacggaagcacccattgagcgattctgcggcaccgaagctaaatcaaggcgcaagctaaatcgactaaattgaacaaagagagagttttatgagtctgttgtaaaacggggagtctcaggataattccaatatgggaatcgaattaagcatttgatttaatatgacgtttgttagataatccaggctcgaatttctccaaaagcggggttttcgacagactcttaaacttggaaaagcaggaaacttaagactcttcaaaatgagatgtttgtagtgggagatactttgtcaagtcaggaacacaatagtccttcccgcctccaccaaaacagatcatacagctccatctgtgcatatatccgattgattggtgtattctgtgcagggttatccgttctgtggccgacgttagcagaggaaactcacgaccacgatcacacagggcacgggattgaagaagtcgtggtggtaggctctctcattcggcgagaagaggtttacgaaggccgagctccagtacagacgctgaatgcaggtgcgtttgaagcagtaggagcatctcagcctgtagatatattggcgagtctcacgtcgaattcgggttcgatcgtcgctacgcagcaaaattatctgcaaggtgtctctcagtttagtctgcgtggagttggactttcgtctactctaactttgctcaatgggcgtcgagcgggttttgcaccagtatctaacgatgtcgggcagagttttttcgacatcaatactctaccagtgctcatgatcgatcgcgttgagatactccgggatggagcatcggcgacgtacggctcccaagctgtagctggagttgcaaacatcgtcacccgcaagggattcaccggatttgagctttcaggtggctatcgtgaggccagcaaccgagcctatgacgtgggattcgccgcaggtctcgaatcacaactaggtcatttaaacctttacggttcgtggtatgagcaggatgagaacttccgcacggaattcgactggatgatccgtcgagctatcgaccccgatggtgatgggaatatcgtcgaaggttcatttgactctccacgcggctcgccaggcagtttccgccgcgcagtcgccaatccagatggcacctactctccgtatcaggtcgatggcatcgacgcaccgcgtttccctgatgccgattgtagggccggcggtggtttcccaagtgggtcgttctgtcgaatggacttttcggatcaacgcaccatgatcgcggccgagcaacggacgcaattgtttgctgatggagatctccaccttggttcggtgctactactcgcagagataggttactcacgcaataaggtaattgatcgggtcggcaacatgtggctgttaagaggcaacgttgaagggaccaacgagatcttcgtaccggctaaccacccattcaacttctggactgatcacgatggcgacggtctgcttacctacgtctcaccttccgaatggatccctggcgtgcaccaagccgtttcactagggtatctaggtcgtcctcttggcgctgaggctacaggtgaaaactcggggtacgagaatagagagttcgacgtacttcgagcaatggtgggtttcgagaccactttgccaaatggttggatgggtgaggggcatatcgcgcacgcgcgttccgacctgtcggtcacctcggagcgttattggatatcgagcgaattcaatcgggtggtatctgagggtcgatggaatccgtttggaagccgaattgtggcaccggaactcgtgactccaaaaactgtgg

SEQ ID NO: 3644 - DNA, 24341 bp, synthetic construct
  source 1..24341: mol_type = other DNA
  misc_feature 1..24341: note = Synthetic
aaaaatcggagatgataatggactacggtatccatggattcatacagattattctatatggattcctatagatggtggttggatccaattgcctttatcgtttatgtagtgtatcttgtgacatgcttcatcgacaaacgttacgtatcctctggatgagtgggctattgagtatactggtattcactgtatatggccaatcccacacctggtatttcacagatcagaccagtatgactattgaggaggatggtgaggtctcatttgatacttttgagaatcctaatttatcggaaccgttaactactgtattttccagaattgctatgatacatgatgaggatggaggagtcctgttttattcagatggtaagcatgtatatgataagcatcatcatatcatgaccaatggagactctataggaggagacggacttcttgagcagtcagtcataatatgcccattcccaaagagtgattctctatattatgtatttacagttgggaaaacattagatcgatatatcgatctccaagatgatacgacctatcagaataagttgagatattctgtggtagacttgagtctgaataataatctgggtgcagtagtagaagggcaaaagaatattttcttaaaaactggagcagatttgggcatggtatctataccaggaccttgtgaagatatatggttagtcaccgtggataatgatgggatcagtacatatcatattactgaccaaggacttagtccacagtatctggatcagtataaaatggaactatctggtcggagtgatactcatcgccgagcgttgatatctccgaatggtagatacataattcttcaagatagaataggcgaagcatttatagaaatatatgaatttgacagttatacaggacttgtcgtcttaatcggtgagttgttttcagatcctccaaaacctgagcctgtgattaagtatatagcaccaattattatggattatcatggaaagtatctatatgccgatgaggggtttaaagaaggcctcacccaatacgatctgagttcgaatgatattgaaacaattaagtcatctcgcagaattgtgtctcattatgatgatgatcaaggaatacttgatatgcaaatctcaccacatgattcatcggtaatacaagttatgaacccttatgatagtttagcagtaattttgaatagcactacagaaaatgcgatatatactaaaaagcatagaaataagcatgaaaacggttatagagaatttccgatgctaacctcgtatcctgttgctccttatccgataaaagaatccattagcttatccagtgagccagattgtgatcatcggtttacgacatatgaggtatcagatgaatatagtggtgagctatatatagatggacgattagttgactccttagtcttttatgagtcaggcacatatgaattagagttggtcacagagtgtgaagtactggatacattattacatgtagaggagtacagtgcgtcgtgtgattgtcatgtctacctacccaatgccatccatccaagcagcacaaaaggtaatgctacctttcagcccatttctaattgtgcctggtcactgtatgatcttcaggtgtatgatcgctggggctctgtggtatacagcagtagtaacccccatgaatcatggaatggagaaaggaataaccagttcctatcaggagtgtatacctatcaattcagctatcgatttgacggattggctccagagatgcgtacgggtactgtttctatactgagataaaaaacattctcacatctatcctatgcatctgatttgggtcgattgcctttatcgtttatgtagcgtatcttgtgacatgcttcatcgacaaacgttacgtatcctctggatgagtgggctattgagtatactggtattcactgtatatggccagtcccacacctggtatttcacagatcagaccagtatgactattgatggaagtggagaagcctcatttgacaccattgacaatcctaatttatatgaaccatatcgttcaattttctccagaatcgctatgatacatgatgaggatggcggtgtgttgttttattcagatggtaaacatgtatatgataagtatcatcatatcatgaccaatggagactctataggaggagatgggcaattagagcagtcagtcataatatgtccttttcctaatagtgattcactctattatgtatttacagttgggaaaacattagatcgatatatcgatctccaagatgatacgacctatcagaataagttgagatattctgtggtagacataagtctgaataataatctgggtgcagtagtagaagggcaaaagaatattttcttaaaaaccggagcagatttgggtatggtatctataccaggatcttgtgaagatatatggttagtcaccgtggataatgatgggatcagtacataccatattacagaccatggaattagtccgcaatatcttgatcagtataaaatggaactatctggccgggatgctacttttcgtctaatgttgacatctcccaaaggtagatacataattcttcatgatcgactaatcgaagcatttatagaagtatatgagtttgaccgccatacaggacttgtcgtcttaatcggtgagttgttttcggatcctccaaaaccggaacctttgactaagcatatgccaataattattatggattattatggaaagtatttatatgccgatgaggggtttaaagaaggcctcacccaatacgatctgagttcgaatgatattgaaacaattaagtcatctcgcaaaattgtgtctcattatgatgatgatcaaggaatagttgatatgcaaatatcatcacatgattcatcggtgatacaagttatgagcccttacgatagcttatcagtaattttgaatagcgatacagacaatccgacatatatcaaaaaacataaaagcaagcatataaacggctatagtaaatttccgatgctaacctcctatcctattgctacctatccgttaaaagaatccattagcttatccagtgagccagattgtgatcatcggtttacgacatatgaagtatcagatcaatatagtggtgagctatatatagatggactattagttgactccttagtcttttatgagtcaggcacatatgaagtagagttagtcacagagtgtgaagtactggatacattattacatgtagcggagtacagtgcgtcgtgtgattgtcatgtctacctacccaatgccatccatccaggtagcacaagaggtaatgctgcttttcagcccatttctaattgtgcctggtcactgtatgatcttcaggtgtatgatcgctggggctctgtggtatacagcagtagtaaccccaatgaatcatggaatggagaaaggaataaccagctcctatcaggagtgtatacctatcaattcagctatcaatttgacggattggatccagagatgtgtacgggtactgtttctatactgagataaaaacattctcacatctatcctatgcatctgatacatagagatattaccttgcgaggctatgtcttttcagctcacatccaactatcaacctacgggagatcaacccgaagcaatcaaacagctcactgatggaattttatcgggtgagccagcacaggtactgctcggagtcactggatcaggtaagaccttcaccatggcgaatgtcatcgctaagctcaatcgcccgaccttagtactgacgcataataagaccctgactgctcagctgtatagtgagctatgtgagttcttcccagacaatgccgtagaatacttcgtgtcctactatgactactatcagccagaggcctatatctcctcctcggatacctatatcgagaaggacctgagcatcaacgaggaagtggataaacttcgcctccgagcgacctccagtctgatgtctggtcgtcgtgatgtcatcatcgtagcctctgtatcctgtatctatggtatgggaaatcccgaagatctcgctggcggtatcatccgcctacagaagggtcagaccatggctcgcaatcggttactctatcagctcgtagagagtctctatagtagatcagcagcagagttcaaacgagggacattcagagtacgaggagatacagtggatattaatctgccctatgcagatacgggctatcggatagtattctttggagatgagatcgaggagatagagcggatagagctcgagacgggtaagcgaatagagtcactcaaggatgccgctatcttccctgctaatctctacattgctcctaaggacaagctcaatatgatcctacgtcagatcgagcaggagctggatgagcatcagaaattctttgaacaagaaggccgctacatcgaggctaaacggatcaaagaacgtgtcacatttgatgtggagatgatgcgagagctcggctattgtaatggtgtagaaaactattctcgattttttgatggacgtcgaccaggtacgagacccttttgcctattggattatttccccgatgactatctgatggtgatcgatgagagtcatgtgaccgtacctcaggtgcgtggtatgtggggtggcgatagagcccgaaagctcaatttggtcaactttggatttagactgccctcagcgatagataatagacctttgaattttgaagaattcgaagggctgactaatcaggtcatttatgtgagtgcgactcctggagagtacgaactcgagaagaccgaaggactggtagtggagcagatcgtaagacctacgggactactcgatccgccgatagaggtacgcccgagtatcaatcagatagacgaccttctggaagagatccagcagcgtatcgaggctgatgagcgagtactcgtcacgacactcactaagcgtatgtctgaggagctcactaagtatctccagcgactcaatatcaaggtgcgctatatccatagtgaagtggatacgctcgatcgagtagagatcatccgagatctgagattaggaggctttgatgtgttagtcggggtcaatctcctcagagaaggactcgatatgccagaggtgtcactcgtcgccatactcgatgctgataaagagggatttctccgaaatgctcgctcgctcactcagacggcaggtcgtgctgcgagaaatgccaatggattggtgattttttatgcagataaggtcactgacagtatgcagatgaccatcgatgagactaatcgtcgacgatcgatccaaatcgcctacaacgaaaaacatggcatcactccgactaccatcactaaaaccaaagaggaaatcctcaatcaaaagtcaatcctcgatatacgtggtaaaaaaccaaaggcatacatcgagcccgaagagaccagcatggcggccgatccgatcgtagactatatgtcaaaagatcagctcactcgtctcatcgaggagactgagcgcaaaatgaaaaaagcggccaaggaactggacttcatctcagcagctcagtatagagatgagctttttgcgctgaagaagaaagttaaggcagcggtgtagattagagtttgaaagttgaaggtttaaaagtataaagtgtaggatgattttttatcaccaaattggtttctacttattatgcaagaaaggtctataaactctgtgatcaagacaaatcaagaataccaagaggctcttaaagaaatagagggattaatcaataacgtaaaacctaataccaaagaaggagatcgatatgaattgctttgtctcctcgttgaagattatgaggatcgtcatttcccgattgatgaccctgatccaattgatatgattaagtttaaaatggatcaattgaatctgaagtcaaaagatctgggcgaaataattggctataaacagcgggcctcagaaatactcagtcgcaagagacgactcactttatctatgatcagaaaaatcaacgatgccttaggaataccggtcgaagtattgatcaaagattatgaactcacaaagtagtagaactcctttattcaaaaatctacatattcaccacaccatcaatgcccatagctcatccgatcccggatggtaccgtctgatcggtgtatgatcacatccgagccataattaatcgctatctcacgggctcgctctatggcttctcgctgcgtagggtagatggcggtgtatcgttcgtttccagcccctttgatagcccagccctcatcatgaggcactacatgctgatgatgcgtaggaggcgaggtcctgatacctgcattcttcagtatgatcttgacgatcttcttcagtagattgatccaaaagtctctgtccatcgctgccataccttaaaagtaaaattatccccaatgatatatatatatacggacctaaactaaacaatgtttaaactttgttgtttaaacaataattatcaatcttaaatcataatacaatggacacacttacagcaactacaacaaaatgggcgatcgatccatcacactcagagatagcattcaaggtaaaacacatgatgatctctaccgtaacaggacacttcgaagattatacggctacggtcgaaaccgaaggggatagctggaccaatgctaaaataaacgtgagcatcaagactgattctatcaataccaaaaacaaagacagagatgcgcatctaaagtctgatgactttttcgcagctgagcagtatcctgagatcactttcgtatcaaagtcatatgccaatggaaagctcatcggcgatctaacgatcagagatactactaaagaagtgtcgctcgatgtagaatacaacggcaccgcagtagatccatacggtcagactaagagtggatttgagatcagtggacagatcaatcgtaaggagtttggtctcagctggagtgctgtgacagaggcgggtaatattgtcgtatctgacaaagtaaaactggctatcgaagcacagttcatcaaacaatcataattgatatactatgaagaaaggccttgaccatcgtcaaagcctttcttgtaatagtaattgctcgaagtttacttcttggtagagctctctatctgaagtgatcgggacgagtccccagctccaattttacttctttctcttttccatcacggacgatctgcactttcacttcatctcctggttcgaagaaatttagaagatcaaggagatcttccatcgtacgtgtgcgagcaccattgactcttttgatgatatcgcctttcttgagtttagccttgtcagcaggtccatctttcattagatcgagtactgctactccagcatcgtcatcactctcgatgtgagcacccatataggcttttgatagtcgtttgctctctcgagcaccatctccaaagaatgtaaaatcattaccatcctctgacttccacttcatgacacggtgagcccggcgtttaccttctttttgcattgccccatgaggcatatcatcaccctcccactcgatgacttcttcatttccatcttcatcgatagtgatcgtcttgtactttgatttttcttttttgcgcactctgacctctggcccacgctcgatatccgtcacatgttttttgaccatgactatctttttctcaccttcttctccatcgagatactcttcgatatcgacaccgtactcttcattcatctctcggagagctgccggcatctcgccctcaccatcccattctatctctattacttcgtcagagcgatcatctactacgatctctatctcacgatcatcaccaccctcgccagatagcacatgtacatctataccctgctcatccagctgtcgctgaatgtctgctggtatctctccattgtcattccattccatgaccgttttttcaccattttcttcagtgacgatcttgaccgtgcgctcactgtcaccatttttcatgacatcgacacttacgatcttttcttgcttgatcattttaccatctccatcagaggtgacgatcactttctctacatcctgtgcccagatgaatgaatagatgcacatgatgaaagctacatacattaatctcatagtttttcagtttatcttgttattcaaataaaagaagtacgaaacgcttcgtcaaagatatagcactccacttaatgatttcttaaggaatatttaaaattttgactccacatcgactaaaacgtcgtagtataggcattgtgtatgtctatcgactcactatgaaaaaggaaagaaagccacatcaatttatcatcaagccttactatccaggagggtcaaaggccatgtccgacttcgtcgcagcgcagatcaagtatccagaggaggcgctcagagatcagatagaaggggtagtagtcctcgtcatcgatatcaaccatcagggcaaagtagtcaaaacacggatcaaacaaagcgtaggtcatggctgtgatgaggaggctcagcgggtagcaatgctgctaaaatttagactggacaaagttgtccggagagggcgtaccatatttcataagaccatcaatatacgcttcaagctacctcccgagaaacccaaaaccatcatccaatacgagataaaaaagaaagagacctcaagctcatctgagcctaagacctcctccggatatcattacaccatcgagtggtgatctatagcatactatttgatcgctaatagctctacatcaaagatcaatgtcgagtatggcgggatcgctgcaccagcccctctcgctccatatccgagctcgtatgggatgaatagacgatacttagatccgactgtcatcagctgtagaccctcagtccatcctgggatcactcgattgagcgggaagctgatcggctctcctctatctactgagctgtcaaacatctctcctgtgatcaactgacctacatagtgtactgtcactgtgctgctggcagtaggcttagcacctccatcgccctctgcgatcacttgatactggagtccgctctccgtagtgcttacttctgggcgcttagcattctcctcgaggtactttaggccgtcttcttttactttgtcaaacattttgtcctgttgtgattgaaaatatacatagttgatgctgtcactttggtttttagtgatcagcgtttcttgtttttcgagtgtagcctggagtcctttgatgaagctatcatagtcgatatccgatgctccctgattggccatgcgagctcctacgctcatgccgagactatagctcgtcgtatctacgctatcctgtgcgatcaggctgatctgtagtagagcgatggctatagccaaaattgattttttcattgtgtttattctattgagctgcgaaaatatgggatagcaagaagggctgcataaattttttcttaattatggtttccataagtattaaaatgtattaaatttgcgcctccaaactgacccatggtgtaatggtaacactacggtttttggtaccgtcattctaggttcgagtcctagtgggtcaacaagaagctcagcaatacgctgggcttttttggtttttaaggtatagagatacgtacatctctgatgagtcaattctcacttcattctatactctgaatacaaacacaatacttatttgaattttcttaaattgtgaatgcatcaacttcgcattctaatgagggacttatttcattctaagctcagcttactctttgtcaacagccattactattgtcaccatatttctacgtggtcggtatctatttatttatcgcaggagacaagcagcttagaaaagaaaaagggcgagatttaaccccacccgttaagttttcacaacggaataatccttattgtgattgacttcaaattgtaattacaaggtacactaaaaaacgttatatgaaaaatattcttggtttagacattgggactaattctattggatgggcattaatagcccatgactttgctaacaaagagggtaaaatattaggaatgggtagtcgaatactgcccatggatcaaaaagagatcggagacttcaatagtggaaaactaaaatctgctgtatcagaaagaacaaggtatcgtggggtcagaagattgatagaaagaagaagactaagacggaatcgtctaattaaagtccttaaatcggccggattcatcaatcaagattactcaattaacaataaacgctctttcgcatatacatttgacaaaaaccgaagggaattcaagtttcaaagttcttataaagaaatgctttttgaattcagaaaatatcacggttctgaattcaaagtaccccatgattggactatatattatctccgtaaaaaagccctaacagaaaaaataactaaagaagaattagcatgggtaataatgcagtttaatgcgaagagaggctactatcaactgcggggagataatactacagcaacagcttctggaaagtattttgtatctgataaagtggtacgtgtagaactgataagcaaaggccaatttgaaatagaactggactctggaataatcggggaatataaggcgaaagaaaaaccaatgtggggaaatgatcgagtagagttcatagtgactgaacgtcaaactaaaagcggatttaaagtaaccctatcaactccaggtgaagatgactggacactaagaaaaaagaagtcagagcaatccattaaagaacaaaataaaacagttggtgcatacatttacgactccttgcttcacgatcctaaaatcaagataaggggcaaagaagtccacactatagatcgagatttttacaagactgaacttgatcaaatcttatctactcaagaaaaatatcacgacgaactaagtagtcgagagatattacgaactgcgtccaccgtactatataaaaacaatgaatcaagacagaaagacttatctgctcgatccatgaagtacttgatcatagaagatataattttctatcaacggccactgaagtccaaaaagcacttaatagctgactgtaaatatgaaaaatacacctatcggaaaggtggacaggtctttgaaaaaccaataaaagcgattgcaaaatcgcatcccctatttcaagagtttaggatctggagcctcatacacaatcttaaggtgtataaacgaaaccatagagatgaccaaaatatactgaggatagatgtcgattttactgagtcaattcttacaaatgatatgaaatatcgcttgtactcattatttgataacctcagtgaagtaagcgaaaaacagattttgaaattgctatcacttgatatcaaagagtatagaataaactatgaagaaggtgtaaaaatcaaaggaaatgacacaaaaagtacactactcaaggctctcgtaaagaaacaaaaagaggaatcaaagaaagagtcaaaaaatgtagctcttatcaaagatattgaggacactatatctaagctcaactctcttgatatactaatacctatatggcacgctctatactccatcgatagtgacaatgaagtcatcaatgcactaaaacatccccaaataggcctatctcaacaggtagcagaaataatagcaaacaacgtagacccatttcaaaaagaatacggagcactttcaaaaaaagcaattgaaaccttacttagcctgatgcgatgtggagatgcttggtcatcagatgcgatagctcctaaagtgaaaaaacggataaataagataatagatggagaatgggacgaagaaatagctgacatagtaagagataagctcaacaataactctctcaaagaataccaaaagattgaagatttcagcggtgtccctgaatggctggcatcatatatcatatacgaccggcacagtgagtatgctgatgtcgctatctataatactcctgatgaaatcgatgtgcagaaactaatacctcagcatagtctacgaaatccaacagtagaaaaaatactacgagaatcaatgctcgtcgtgagagatatatggaaaacatatggcaagccagatgaaatccatgtagaaatggctcgatcgctaaaactaccaaatgacaaaaggaatcagctaactaatcgacgaaatgaaaacagacgaaccaatgagagagtaaaagctctgctacgtgaactaaaaaatgaaagcgaatatatcaacccctatagtgtagggcaacaagaaatgctcaaactctatgaagaaggagctatatctatacaaagcgaaatagatgacgatataaaagcaataagacgaaaagatgatcctaccacaagcgaactccaacgctacaaactttggctcgatcaaaaatatatatcaccttatacaggccaacctatacccttatccagactattctcgcctgagtatgaaatagagcacgtaatacccagaagcctatactatgataactctctaaacaacaaaataatctgtgaaagagacgctaatcaactaaaagacaatagaacggcctacaagtttgtcatcgaagaagggggcgctatcctaaaaagcggacatactatactactcaaggacgaatacgaagcacttgtgaatagaatgttttggaagaacaaacgaaagttacaaacattgatgtcttatgatgtgccacaatccttcataagtagtcagctcaacaatacaaggtatatatccaaaaaactaatccaactactggatccgatagtccgtgatgagaaggacacaaataaccaatctcgccatatcctccctctcgcaggggccatcactcatcagctcaaaagagactggggcctacacgatatctggaaacaaatcttagcaccaagattcgaacgaatgaatgaaaaaactcaaactgaagattattatgaaaagcgtaatgggaaaatacatctctcaggcaatgaaaccgaaatcaaaagactggaccatcgtcatcatgcgctggatgcactgatcatagcctgcacgaccagacatcatatacagtatatcagtagtctcaataatcaaacaatcaaatacgagctggaaccaaaaataatccgcaagcgccaacaaggagctcaaaacaaaaccttcataaaaccatgggcgtcaatcactacagatgctaagtctgctctggaagatatcgtagtatcattcaaacaaaacatgcgaataatcaataaaaccacaaactactatcagaaatatgtcaaacaagctgatgactctctaaagaaacagtatgtgagacaggcgaaatctcaaagcaactggtcaatccgaaagccactacataaggacactgtctatggaagatcgagcatcaaagaatacaaaaaagctgtgcctttgtctcgagcactcaatgatatagacaatatcgcaaaagggataataaaaaaggtagtgaacaaaagactcaagcaatgtaataacgatatcaaagcgctgaaaaaagatatcaaaaagaacccgctcatggtccaaggtcaggccatagagaaagtagatatgataaaagtgagcgacggatatgcctctgttagaaaatcaattgatagctcatttagtcaaaaggtcatacaaaaggtaatagatcaagataccagaaatagacttagccagcacctcaaagaatatggaaatgacccagcagttgctttttcgccaaatggattagttgagtttaataaaaaacttaaaacgcctatgtacaaagtaaaactatatgaagacatgggtaaaaagtttgccatccatgacgaagtagacctaaaccccaaatatgttgaggcccaaaagggaacaaacctattcttcgtaatatatgtcaataacgaaacacaagaatatctgatcacgaaagactcatccatccctttatatcaggtgatatacgctatgaaaaatggccaagatatagctccaccagtcgaaaatcattcttggtttacgctatctccattagacttagtatatgtgccagacgaaggtgaagatatcaatctccctaattcaatagatacagagcgaatctataagtgcgtatcttttactaaacaacaagctttttttattcagcaaaccgtggcgtctccaatagtagataaaaaagagttttctgcgctgaataaagaagaaaagtcatgggacaatataatgatcaaacgccactgcgtgaaactgaaagtagaccgcctcggcagaatatctcagggggcatgatcaaacaaactctatacttcagcaacccggcgtacctgagcctcaagaatgatcagctatgcataaaagtgaatccctcaaataaagactctcaagaggtaacacgacctatagaagatataggtgtcatcataatggaccatggccagataacgatcacccatcaagctatccgagctctacaaagaaacaagtctgctatcatcagctgtgatgatagccacatgccagctggcctcatgctaccattcaacgctaacagcctacaaagcaaagtgatgaagactcagctatcagcaagtctgcctctgaataaaaatctatggcagcaaactataaaagccaaaatacataaccaaatagctgtactccggtactatggtaaaaatacaaagcgactaaaggtactcgtagagcgtgtccagagcggtgatcccaataatatagaaggacaggcatccgcatactactggaagactcttatcgatggatttgtacgtgaccagtatggagaccctcctaacggtatgctcaactatggctatgccatcatccgatccatggtagctcgggctattgtcgcatcgggacttcatcccaccttgggtatttttcacaaaaatcagtacaacgcctactgcctggctgatgatatcatggagccctataggccatttgtagatgccaaggtattatccatatgccatcaaaaggagagtttggaagggtttttgaataaaaatgaccgagcatctatattaagtgtgatgactgctgatgccaaatatggcaataagaaaagaccactatatatcgggctctcgatgactacagcatcattagtacaatgctatgaaggaaagaaaagaaagatactatatccagaaataatcaactaaaatctaaagatgctaagtcacaccagaatcaaccaatatcgaaccatgtggctatatgtattttttgatctaccgactgagagcaagcaagaagttaaggtagcaaatcatttcagaaaatttttattgaaggatggctttaccatgtttcaatattctatctatctgcgcagctgtgcgagtcgagagaatgcactcgtgcatgaacaacgaatcaaacggatacttcctaaaaaaggtaaagtggcaatactcacggtgactgatcgtcaatttggcaaaatgaaaatctttcatggcaaaaagaaagaaccattaccgataatgaaaaaccaactggagctattctaaaaattcaatttctaagtgctttcttaagcggctgaattacagcgcattatgagggatacgctgtaatcaactacacttaagatacaatttgaaagccaatcacaacctatgagaatcttaataacgatagggtggtgctgtaatcaactacacttaagatacaatttgaaagccaatcacaacagacgtggcttaagttcctacttgagtcacgctgtaatcaactacacttaagatacaatttgaaagccaatcacaacgtataggaataggatcacgatatggaaagagctgtaatcaactacacttaagatacaatttgaaagccaatcacaactatatgtcgttgtaagccatccgagtttggctgtaatcaactacacttaagatacaatttgaaagccaatcacaactgattgtacgggtgcttctggttgacttaagctgtaatcaactacacttaagatacaatttgaaagccaatcacaacgtattagtgtaggcatacttgagcaataaagctgtaatcaactacacttaagatacaatttgaaagccaatcacaaccaatattcatgtatgatctaagagttttttgctgtaatcaactacacttaagatacaatttgaaagccaatcacaactgtagggaatggaggaagtgtaaatgtcacgctgtaatcaactacacttaagatacaatttgaaagccaatcacaacatgctggcaattttgggataggaactacagctgtaatcaactacacttaagatacaatttgaaagccaatcaaaaccaccttcaaaaatagatagctacattgcgtgctgtaatcaactacacttaagatacaatttgaaagccaatcacaacgccctttcttgatgatcgttttccagactagctgtaatcaactacacttaagatacaatttgaaagccaatcaaaacagtattcaaaactaagtaccaggagaaaaagctgtaatcaactacacttaagatacaatttgaaagccaatcacaacagtattcaaaactaagtaccaggagaaaaagctgtaatcaactacacttaagatacaatttgaaagccaatcacaaccgatctcagtagatagatactcgatcatcgctgtaatcaactacacttaagatacaatttgaaagccaatcacaacagtttaatatcacttcctatgaagtacacagctgtaatcaactacacttaagatacaatttgaaagccaatcaaaaccaccttcaaaaatagatagctacattgcgtgctgtaatcaactacacttaagatacaatttgaaagccaatcacaacggcgagccgccccggcatctaccagattttgctgtaatcaactacacttaagatacaatttgaaagccaatcacaacagcggataacaaggtggctgatccgtggcggctgtaatcaactacacttaagatacaatttgaaagccaatcacaacttgtgcgtgcggagcattatccgaaattatgctgtaatcaactacacttaagatacaatttgaaagccaatcacaactagctcattgggatatagtcaggattttgtgctgtaatcaactacacttaagatacaatttgaaagccaatcacaacgggattattatggaataccacaaacaccaagctgtaatcaactacacttaagatacaatttgaaagccaatcacaacatagtagagaagaggccagaaatagaagaggctgtaatcaactacacttaagatacaatttgaaagccaatcacaaccagcctatcatttacgttaatccaattatgctgtaatcaactacacttaagatacaatttgaaagccaatcacaacagtcgaagtgattaatgtatcaacacctgcgctgtaatcaactacacttaagatacaatttgaaagccaatcacaactcagagcttcatggtcatccactacatcgagctgtaatcaactacacttaagatacaatttgaaagccaatcacaacctgcatatgtgtaagtgtttatgatgtaatccctctcgcctccccatttatagctattctttatcacaaatgttaaaatttcaatttcatttggtattctgataagtggctaaatgttaaattgtggcattatcaaccattagcacaatgaaaacgtacatttttgggctcattctcatgggcttttctttatctggctccgcatcagccactatgtcggatatacccgactacatacagagcttagtagacctatccatgctggtcgaagaagattttcaagtcttagagcgagagttatttgctcaggcacctccggatgaatgcttctatggagtcggagatgcacggaatgaatatcatcctgcaggtatatcatgcgatgactgtccatcagggtcccaacccaaagtcaatcaggcatatgtctggggattagctaagacaggggatgatatctggtttggcactggacctaatgtacactgcttagtgatcggaggatatctgatggcagatattccgacgtcgaatgagtcttacgcttgtgagtttggtgatagcccttatgctgacctactcggagatgcactgggagacttcagaccagctcgtatctacaagtataatatcaccaataaagaattagaagatatcactccatctgctatgacagctccattgttagcccagtccttgggcatacgttctgctggagcacacgatggcgtcgtcttttttgcaggcccaggtttatctgcggtcaatatgtttgcctttgatagtgagacgggcgccttcttagggcagcagtcatttcctgaatatgctaatatcagaaaatggctcgtacatgaagatgtcctgtatactgctgtgggcaacgctggggcaggaggcagcgtcctcaaatggactggatcaaaatcagatcctttccagtttgaagtagtcggagagctcgatggacagggcgccgaacttgagtctcatgatggacgcatatttgtcacgacgtggccaggcagtattggaaatatcggaggtgtaggggctacttttgcttctttattcatgagcccagccattggtgccggtggtctcagtagcgccgataaggcagactggcagaaagtatggaccaccacggactatgagcctgatccggtagtagccttgacctatggaggaggagcattagcttcatttgatggacagctatattggggtactatgcacgtaccattcttatccacagtagctcacttcacggcatatggcgtgcccagcacacccgactctctggtcagagcaatacttggcacattcagatcgatcagcatattccgaggggacaattttgatactacaccagagatagagctcttgtacggttctccactttatcccgcctatgatccgatgtcggccgagtggtcgatcgtacctaataatagtaatctaaatccgacctatggccctccgggttttggaaatccattcaataattatacctggaccatggatacttatgaggataaactctacgtcggaaccatggacttcagctacttgctgtttggcaatctggatatagaggtcccaatgaccttcccttttgactgttctatgctcggcatggatactgatcagtgtgagatgtttgaaaaagcgtataacagtattagctcattatttgatccagctaattatctgggagcagatcttatgagatttgacaatgggtcatctccagctataccagaaagtatccgtggtgtgggcaataacgcatcctatgggatccgcactatgataggagatgaggacgggctcttccttggcatggctaatcctatgaatctgttggcctgtgaagactcagagctaaaagcgctgaacaatggacctggaggctggtcgctgatgggtctcggtgtcgcaaatcaaaataatgaacccatacctacgctatcagagtggggactgatgatcttgctattgtctctgatgatcacgagtatagtgttgatcaggagcaggagtcgcagatttgtatagagtcttttatgcagctatctgatctatgatacccgtggctgattctattgagagattatccaatacacacatggccctgatagcctgctctctatcgatctcaccctgtatatatctgaagatcacttcctcacccatcgttgatgtatagctcatatatccttactgtcaatagtccaaactattagactactatggatagtataggtcacttatactaatgagatagggtcatcactccgtccaaaaaggtgtccactgtataccaaaagtatctatagactcatcgtcataatgctgataatagatcatatagagatggtgtgctccagcgtccaatgtgtcgacatctacccgagtcatgaatcccaactgatcagtcttggggtgatgtcgctgccaccaccggagggagtctcgatctacaccatcgatgcgtacgccaaaagtatgatcaagtgcatccaaaaccccatttaggttttctaccatatcataatcctctttatcagaggggcttttgacgactccatttttttcatagagatagcggagagagttgtcataccactcatcataagggacgaatacatcgagatatctatccttgatcacttcggattggatagtcacatgtctgcgatattcatttgcctcatagtgttcctcatattcttctttgtctattgacagatagccttggcgcatatctgcatagtctctatgatcgagaggtgtccactccagctgtagcgtataccaagagatatctgtgagcgataggagtatggctatagccaaataaagtaaagacactccagcgaccttgagtggatggatatgactattgagcactcgccactcatatctgaagaagtaactgagattaatatatgagagcagctgcgaaaatcgatcataagccgccagccatcgagaaccaccacgtgctcgagaccagacaaaatgatccatcaatcccaaagctatgatcacattgatcaataagacaccatatccgaataaatggctctcatagatatcactggataaaaatggctcaaacaagagaaaatacatcaatacgactatgagcatcgtacccaaaaaaaaccaggtcaagaatatcgacatcgaataggacagactactcagcgtctccagcatgagcacctttcgagtaggattgtcccgagctcggaggcgctccttgatctcctcgtcatagggcagaccctcataatccacacccgacggatacgcatagtgcacacccaatgatgccagccatagcgctctcagcaaaagattcgctgcaaagccaactaatagcgccttgctcaaaaccagcagtaataaaaacatcaagacgataccggtggtcagctctgtctcaatgacagcctgctgtagccagttattgatcttatcagggagatagtagagggtgatgagtagaccaccactgatgaggagctctatctgccagctattttgctcgacgctcctcagccactgatcatctgtcgggtgctctctcatagtcctgcccaaaatagtgaagactcggcaatgtcactaatgctatcaaaacaaaaaatgtcgcagacccactggaggtccacgacattgcaattaaatgattatgcaggtagaaaagattgttttgatctgggtaggtctgggttgattggaattggggtgttgttggtctaattgaatatgccgatgtagccttctgcagtcagctgcagctcggtatcaccatctacagtgatctctatgcctccgagtatcgatccgaggacaccatcgagcccgagagtgatcataccatcgagctgcgcctctccctccatatcatactgataggcggcgagctgtagctcatagtctccctctgggataaagtgcatctcaaatctcccgtctgcatccaccgtggtagaggtgatagcattaggaaaagcgatctgactctctgtctctgccactacctctgtatcagaagagaaggtccccttctcatacagataagcgactactacatctgactctccatccaggccagtcacttggccagatactacctgctgatcatcaccatggatgacacggatggagttttcgagtgctgcctgggcgacgaaatcatagtcgtccatattatcttgtccttctcggatagccttgcgaaggtcaaagtcaaagatcaactcagtctgttgatcggccatgacctcatagtcagcctgcagctgtagcataccattagacgtgatgagactatgtttctgtccatcagcattgagtacatagcagccaggagactcaccatcagctgtagtgctcatatcgagctcgagtgtcactgtgctatagctatccgcatctatatcgtaggtgccgagatcataggtgctaccattttgataggcgagtagatctacagttgttttgttgtatccttctatctgttctccgtctacatagaccttagagatagtcactacggcagactgtactcctgcatcatctatcggggcatctgtagctctcagtgatatcctgcccgtctcatcatcgacagtaggtgttgagctatcgtcctcatcactacaggcgaatatcatcatgaataacatcgctattactgtccacattactaatttgctgttcatagtgttgtactttttttttggtttaggaattttttcggtatttgattatgatgagacaaagctatcctgagctcatctctgagatatgcgtacatacaccgaaaaagaaagattggggaaaaccctttaccgtttaagggtatttcgattagctgatgactcttctgaattctgctcgatattctgatggattcttacccgtcacatttttaaactgtttgttgaaatgcgaaaaattattgaatccacactcgaagcaaatgtcagatatcgagcgacccgtctctgatagcagcttgcaggcatgtatcactttgaactcattaacaaactgagtgaaggtcttcccactctgttttttgaagtagcgacagaaagagggaactgtcatattagtcagttcagacatctcctccagactgatattttgctggaagttttctcggacaaaatcatagatcaccttgatgcgatccttgtcctgctgattagtctctatcgtgaccttagaggcattgaggatctcgtattcatcagattttgccatgatattgagcaccttgatagtatgcagtaagcgctgaaaatgtgacataatcaccatatcgtccagtagatttccaattttttctttggttttgccatgatacgccaaaccatgtaaggactgcttcaggagctcattgatcctcccaaactccgtcacttcgtcgatagcactaccgaggaagtctggtctaaactgtagaaccacctccgtattcatactcgtcatccgatcggtaaatccatagtgcggcacattcgatccgatgaggagtagggtaccttcattatagtaggacacatgattgccaatatgttttttaccacttccactctggatatagacgagctctatctcaggatgatagtgccaagctgcgataccattaggttgctcatcagtgaatctcttaaaactaatactactgccaaaggaaggttggattttctccaatgcaggcttctggatactgggtatgaatagtttgttggacatcacatttttgactaaaaccaaaagacatcaaaaggaaatttggctgaagtttgtaatatatatttagaattaaccaagttaacaataaattaaactaacaaggttaatatagttgtaatgaatgaaaaattgaagtgtgaatcacctcacaaaactatcgagctttgtaatcagtaattcataatcaaattatcattatcatgaaaaagtattttttaacagcaagcattttaatgttggccctcatcatgccgacattgggttctgcctcgagctatttttcagtacatgtactgaatacgccagaggacaagaaattggtagtcaatctatcaaaaatgtatggaaaacaagtcacctgtagcattcttgacgaagggaagaatgtcgtataccgagagaaagtagctacaggcagtcaaatcgctaagcggtacgatcttaacgccttacctcttggctcgtatacactggtcatagacgatgccctcagtgtggagaaattgggattcaccctcacggatgagaccatcatctaccactctgctaagtcgcaggtcgtctataagcctatcatcaaggtcggagacaacaagaaagtgagcttcaatctattagctctcggaaaagatgtcgagatcgccgtgatggatgacaacaagacactctaccaaaagacttactcagacatgccatctatcaataagcagatcagctttgaggatgtcttgactggcgagtacacggtagtagtcaaagtagccggtgaaaccttctataagactgtgaatatctaaaacctgagaatactctcaaaaaccattttttagaatagtttatcaaaatgtgaggcctctgagtgatcggaggccttttttcatacctacagtcgagatcctgtcgattatttctgatcatcgccctgtctaaaaaccatac

SEQ ID NO: 3645 - DNA, 17049 bp, synthetic construct
  source 1..17049: mol_type = other DNA
  misc_feature 1..17049: note = Synthetic
caatgctgctgcctttattaataagaataaagacaagccgtttttcatcaatgtctggatccatgaaagtcacacacctcatgtgcccacgaaggcttcaatggaaaaatggaagcacctcgatgagcagaagcaggtttatgcggctgtcatcaccgatggcgataatgacgttggtacgattcttgatgcattgaaaggagcgggagttgaggacaacaccatcgtgatgttctcgagcgacaatggtccagaatggacagcaatgaaacaagggccgaagaaatctgatccagatgcaaaggtaacgggctttgatacctattacagcgtgggagaaacaggaggattgcggggcagaaagcgcagcgtattcgagggtggtgtacgggttccattcattgtgcgctggcccggaaccacccccgctggagtgaagaacaatagcaccaatttcactgcggttgatttgctaccaacactttgcgccgctgcagaggtgaagttgcctgaaaactacaagggtgatggcgagaatttgcttcccgcattgaagggcaaggaacttatgcgcacccgccccgtcttctgggaatggcagggaaccaaaaccgagcccgactattggcctcgacttgtcgtgcgcgagggtgattggaaactttttctaacggaagatggcaaacgatccgagttgtatcgaatccccaatgaccgggccgaaactttgaaagtcaccaaggatcatcccgagattgtgtctcgtttgaccaagctcgcgctcgattggaaaactacccttcccaaaaagcccaaccctgattgccttactactgtgctcgatcctgtgaagcccagccagccgaagaagggtgccaataacccgcctgtttctcctgaagaaagagctaaaacctttgatcgttgggatacaaaccgagatggcattttaatgcttgcagagtatctcgcaggacagaagccaaacgatttgttgcaggctcgtttcaagaacttggataaaaacgcagacggaaaactgacaaaagaagagtttgtcggcaagatttcaaagtaattaacatcatcgacaaaattatgatggacaacaattccaacttgaatgatatttaatgttaaggtcaaagatcctaccaacgactttggtgcagtaccgcaaatgcagtggtaacttgccaaagctcgagtttacaaagaggttatcatgaatcattcatctaaacttttcacatccatgctcctgatgccattggcagctttctctgcgatggcagccgagctaggcgattggccacagttccgaggtccgaactctgatgggcatgtaaaaaatgtcgcttcgcctttggaatggtctgattcaaaaggtgtagcatggaagattgctatcccaggtctgggttggtcttcgcctgcacttgcgcaagggaaggtattcctgaccacagccgtgccgaatgatggaggattatctcttcgagccttggcactagatgccaagactgggaaaattgtttgggaacgcgaggtaagggcgatcgccaaggcgccaaagattcattcgaagaatagtcatgccagcccgacacccgtggttcgtgatggttccgtgttcgtgcattttggtgcacaaggcatggcgagcttggctgctgcagatggcgccattcagtggacaaattttgaattggattatccaccagtgcatggcagcggtggttcgccagtgtttcatgatggtaagcttgtcattgtttgtgatggaagcaccaagccctttgttgctgccatcgatgccaagactggtaaagttgcatggaaacaacttcgctccgttgttggaaaaatcaaccactcgtttgttacaccaacggttgcggtgatcgatggcaaagcccaagtgatggcgcccggcccggatcacttcgctgcttatgatctggaaactggtaccgagctttggcgcgttaaggccccgggttggtcagttgttcctcagcctgcgataggccatggccttgttatctacaatcacgattatgacaaccccgaactgttggcggtcaagcttggtggtaagggggatgttactgaatccaacatcgtgtggcggcttaagcaaggagcgcctagttcgccctcaccgcttttgattggcgatgaactctacttcgtttcggacaaaggtattgcatcttgtgtgaatgctaagacgggtgaacgctattggatggaaagattaagtagcgacagcaattactctgcatcgccgatttttgtgaatggccgagttttgtttttagcagagaacggtttggcgacatgggtgcaggttgggcaaaaatttgcggttttaggtaagaacagcgtaccgggccgaaccttagcgacccctgcgttttcagaaggcgccatgtttttgcgcaccgatgaatacctctacaagtttgccaaatagaaagagtgtttggtctctttttcgaaagtgtggctcttaggtttttgcgattgaagcaataattctatccgtttgcttcatcagcgaatggcagcaagccatgtaaaaagaggcttgagttctgggggttaactactaccagattcgggtcaccccatattgatcaaagattgaatcaatactaataagcgaaattccttccaccaatgcctgggcgattaaaatccggtcaaacggatctttgtggtgaaagggcatatctgtcaacaacgaggtatgtttcgcttcaatcggcagaactatgaagtcgttgccaactattccgtttcgaatgaaatcgtcgtagggtgacaataagtcgagtttctttgttcgaactttaattgccaactcccaaaaagttgcagggctgacgaaaacttcattggtcgggtcagaaataattgcgtctactgctcggctcaatttgccatcgttcaaaacgaaccacagcaaagcatgggtgtccagtaacaaacgcattacatgtactccgcaaagtcttccaaatgttcatcgtcatcggcgacaatccggatcatgccaatgcagtttcccgcttttcgcggcttgcgggatgggggattttcacgcaccaatttggcgatgggtttatggtcttgagtgatgattagttcctcgccgcttccaagatgagcgaccagttcaggcagattagcctgcgcttcttccatcgttacaattgtcatgatcccattctcctttgaacggtattctaacacgtctcgtaccattttgtgcaatctttaaccagaatcaaaggggtcaggtctctttttcggcagtgtgcctaagaaaaggaaagatattaactctttggtttatgggtaaaatgagacctgacccctttgttatcaagcctaatgatgttgattattggcgtgcttttcggtaaaataggtaaataacagataagattacctatagtcatggcttccctccgcattctgagaatcaacctgtgaaacgcgatatcaccttcatcataaagttattgttagtaccactgcttcttatcgttagctttgccaacgctgttcatggggcagagccgtttgaagacttccttaataagcactgcatcgcctgccatggaccagagaaaaataaaggcgatgtgcgtatcgataaattctcacgcgatttcaaactgggtgcagatacccatcactgggcagaggtgattgagcaggtgaattccggcttgatgccaccgaagaaacaacctcggcccactcaggcagagatctctgcgtttgttacgaatctcgatgcacggatcaaggagggcaaggcggtacgaatggcggctcggccttctgtgtcgcattatcggttaagtcgcaaagagtatcagaataccgtctacgatttgctgggtgtgcgctatgatcccgccaagccgggcgaattaaacgaagatacattatggcacggctttgagcgcatcggttcgcagctatcgctttccccttcgcatgtcgatcgctattaccgcgcagcagggcttgtgttagatcgagcatttcctctcacatctaaagacgcaaccaaggttcggaaaactgcagcagatttgcgttacggtggcgggaagacccagcaagaagcgttggatcgtttcggcattaagaaaccattgcgttacctcctctatcctgggaatgttcagaatgcgctctcacccaactggttcggaaagagtggcccagaacaaagtggactctacaaagtgcgcattcaagccagcggaattcgcccccccggtggtcagccagcacacctcagcattggcaagcgaactggtgaagagactgtcgatggcatgatcgagtttgatttgactgctccggaagacaagccgcaagtgtatgagttcgaggtgtttctcgagatgcccatgactctagatttttgcgtggtggctacggatgtagtggaccgaagaaaaggggcggccttccgcggtgcgcttaccagtagggacagttatatttttacgcacagcagcgagactatgcttctgaaccctaatgccccgcagatgtttgatgacaaggggaacggcctcttctctaccgtgctacttgattggattgaatgggagggcccgctgctaacgccggcggagaagtctcggcgtgatggtttggtcccccccgataatgcgaccatcgaagtggttgcagatcatctgcaacgcttcgcagaaagagcctggcggcgaccggtcaagaaggaagagttggcagattatctgaaagcttacagctcggagcgcgatgcgggtgaaaagattatcgatgcgtatcgcattgcgacccaaggcgtgctgacctctaggcacttcatctatcttgtcgagggagacccggtggtccgtgatcgtctcaacgattcggaactcgcctcacggctttcgtatttcttgtggagttcgatgcccgatgatggcctgttaactgcagccaaagccaacacattaaaaggcgatggcctgaagaaagaagtggaccggcttctaacagataacaaagccaaccgcttcgttaacgacttctctaggcaatggcttcaactacatcgccttggtatgtttacgcctgacaagaaactgtacccgaattacgatgcttggcttgagacgagcctacgatctgaaccggtcgagtatttccgcgagatgttctcgaagaacctgcccatcgatggcttgatcgattccgactggaccatggcgaacgctcgactttgcgatttttacggattgcccgagcctaagagcgatggctttcagcgtgttgccctcaagcccgaggatcatcgtggcggtttgcttacgatgggcgcagtgctcgggttgacctcggacggaacccgccatcgcccagtacatcgaggcgtgtgggttagtgaaacgatcttcggaaaaactccaccaccaccacctgcgaatgtgagtgcgatcgaacccagcccgccagaaagccccaaggctactcttcgccagaagatcgaagcgcaccgcaataatgtgaactgcgcagcctgccatgcaaagatcgatccattgggcttggcttgggataattacgatgccatcggacaatggcgcacacttgaaaaggtggcgcagggccgtggctcagatcctatgattgatccttcgggcgagatgcctgatggccgtcagttcaaggattctgttcagttcaaaactctgctgttagaggaccgcgacaaagttgcacgggccttcatcgagcatctttgcacctacgctcttcgcagggtgctaaccgtagacgatcaagacgacctcaaggcaattgaggctgaagcgaagaaaaaccaataccgcatcaaggataccatccgtgcggtcgccctttcaggtctgattcgtaaacgctaacaaggagaatcgtaatgagcaatattcttaaacaatcctggttgatcaatcgccgtcacgcattgcgtgcgttaggtagttgcatctcgcttccgtttttggaatgcatggtgccgcttcgagcgatcgaccaacagggtgcatcgcctaagcgcagcgctttcatctacctcgccaatggtgttcattcactcaactatcagatcaccaaaccaggtaaggactacgaattctcgcgttcattgaagcctctggaaaaacatcgccaagtgatcacgcccatcagcggcctgcatcacccaggagctcttagccatcatcacaactgtatctcggtctggctgactggtggcaagctcgggccttcggatcgcaacacaatttctgtagatcaaaagatggcagaaatcactgcgaaacacacacgatatccttcgatggaaatagccctcacgggtgattcgctcggctggactgcagacggagtgcggttaccttcgatgcgtcgttgcagtgaaatctttgcatcgttgtttgaagagccaaagggtggcaagacggttcaaagaaggaacttgcgtcgcaaaggtagtgtgttggatgccaatcttgcggaagttcgccggctcgaacaggcgatggggtctgcagataaagggcgcatggatcaatacctcacctcggttcgagaaacggaagttcgtacaaggcgtgctgatgcatggctcgataccccgcttcctaccgtcgctgctgcagatcgccagcggactaatcgcgatatccccgcaaccatggcgggcgactatttccgcaccgtctatgatcttatcgtgcttgccttccagaccgatgtaactcgtgtcgctaccttcagcttgggtggtgaaggggatgcgtttgctattcctgaaatcggcatcaccgaatcacgccatcaactcagccatcacggcggcgataagggctacatggaaaaactcaccaattatgataccttcgctatcgagcaatacggctacttcctcacccgactcgcagagaccaaagatctcaacggtaagcctttacttggctcaacgatggcgctgttcggtagcggtatgtcttatggccatagccatggaaatgcaaatctcccgctggtgcttgccggtggatcagatcttggtttgaagcatggcagtcatctcgactttaatcagggccacttcaagggctaccaacttgacaagccaggcgaacattattcactttgcagtcgccctgcgaacccaaatgcttacatgagcaacctgttgcttatgatggcgcaacgcatgggtgtagaaaccgacaaattcggcgagagcaacaaggtggttgaactatgatgcgcatccagtatccggtaaggttcatggccctgtgtctgggattgttcctgttcactatcgtagcgatcgctcaggagaagccattccggcccgaagttgggaagttccctcctttggaaaaagccctctcttatcggggcgaacttgtattcgtagatcatgcgaaccgtcgtggcagcatccgtgtgcaagcgtcgggcatgtttttccgtaacgacccgcaccccttcgccatgctcccctacggcatcgttcgctatcatggcgcacctgctgatcttcgagatataccgctgggtaccgtgatgcatgttgaggcctttcttccacccgacccgaagatatctgctgtgccggtgttgccgatcaataataggaaggtggatgggaaccacaatcgaggggctggcactgcacccgcagagaaccatgttttgcttctcgaagacgaacccagctattgccagcgcgtgggcaaggtctggaagcttaaggaattggatatcaataaccgcagggggatgatcattgccacctgcgaaccgaagcaaggtggagacggtaaggctgccgaggagaagatgaccttcgatgcagcgacccgcatttggcgtggccgcgaacgccttaccatcgatgaattgatcgcagataaaatctggcccgcagaaggcaagaaatccctaggcgggcaacccgtcttgctaggggtaacctggaagcccacgccgggtggaatattcacccagtttcatatctcagatatctggcttgacgatgttgcgatgcaacgatccgccagtaatcaaaccgaagtgcacaaagcttttattcgaagtcgttggatgcccgcatggattgattctgttgagtatggcaagttcggccgtgcgaaggtgacggcaactttgttcggcggcatggacccttctctctatgctgattttcaaaaaggcgctactgcccaaatgaattccgtcgagatgacattgaagcatacccacggtgcatacgggccagcccatatggcctccgcaggctcgattctcgaggttatgaagattcccggagaggcaccccttggtagcagtggcatccaaattcgttttgagacggatctcattatcgagggtattcgccccggcagaatcgttcgaatcagccccgcaggttggcctaaagtggatgtgccacgcgaggaatacctcaacggtggatcccccgaagaacgctttccgactcctgcgatcttttccaaatattaaaatttggaagatcgttctaactcttttgcttgtgaaaaaggactctgatttctatgaaagctaatcccgccattttcgctgcgcttttatttgcgcttacctctgccaacggttttgctctcgatccccatgttgaagccgttattcgtgcagtcgaaggtgcaaaaggtaaagtcgagaagaccgaagatggtaaaagcttgaagcttgtcgatcttgccgtgccaggtgcggggccgcatgatcatcgtaaagtagatccgtacgatgctggtttcttcgagcatctgggttacatcaccacgctggaatcgcttaacgttatcgccacgaagtttaatgatgcgtggatgccaaacatcggaaagctcacccgcttgaagaccctgcgcttcaccaacaatggcaagctcagcgatgctggcatggcgcaactcgctggcttaaaagatttagagcagttctcttttgtcggcacgcagatcaccggccgagcttacgcaaagtttgaaggctttaccaagctaacccgagtcagccatcgtggtagcagtattgatgatgaaggcctgatgcagctatgtgatcatctgcctaatcttgaaaacatcagccttgcgcacgcgaagtttaccgatgcagccgcaccgaatcttgcgaagctcaccaagcttaaggggctggagctaggcactatgaatgctactccacaaactctgaagcacattacgaaacttccgcttgagtatctgcagcttggcgaaggattcgattccccagagagtattcctttcatcaaggatatttctaccttacgacgcttaacctttactaatgctaagccgcttaccgatgcggatctgaaggtcgttgctggcatgaagcaactcgagcaattggaacttggcaaaatcgaattgtcagatgcacgacttgccttcttcaaagacttcgcctttttaaagtcgatgaggctggtccccgtgaaagaacctttcacacctgaaacagaagctaagatcaaggctctgctgcctaagaccacgctgctgttcaagtaggctgcctgaaagagtaaatcaaacgggtcaggtctctttttcaacaaagagacctgaacccttttttcttaatcaaaagttgagcgaatttaactgcataaatttacaaacgaaaatctcgttttatctagggataaatccttagataaattgagctcattgtgatttaaaaaactaaatcatataaaaaagccagttccgaagaactggccggttgtcccgtaggacaataccttcgaatgtttcgtcttgttgcggaaagactaacagaccgagatgggctacacctcaaagatcaatataatatcaatttaatatttgtcaataattaaactgaggattttatgtctataacacttgggcttgatattggcacagcgtctatcggttgggcactgatagatgaaaataaaaaagaaataattcgaacgggcgtacgaatatttccagaaggtgtagataaaactaaagacaaatcaggcgtatccaaaaacatcaaaaggcgaactgccaggggattacgaaggcagattgccagaagagcaaggcgaaaaacccttgttaaaaaaatcctaattgaatcaaaattactaccttctgattctaaagaattcctcttagctctacagactgacccttattttttgcgtaaaaaagcattagacgaaaaacttccgccgtatgagtttggccgggtacttttcaatttgagtgaacgccggggcttcaaatcaaatcggaaaacagatcgcaataatgaaaaagaaaattcagaaatgcttgctgaaattagtcaattagaaaatacgattcaagaatctggatgtagaacccttggagaatatttattcaaaattagaagtgaaaatcaatttgaaagaattcgtggcaaacataccagacgaagtatgtacgaaaatgaatttaaccttgtgtgggatacgcaactaaaacataacaaacaacttaccgaagatttaaaaagtcggatttatagggcaatattttttcaacgagaaatttactggaagaaaagcaccattggccgttgttcccttgaaactaatttgcccagggcaagtttaaaagatcgtgccgcacaacttgcaagactatatcaagaagtcggcaatctccaaattatcgagcctgatggagaaataagaggattgaaagcagatgaaagcgcaaagttgcacgcatatctggcttcatcaaatgagagaaccttcgaaaacatacggaaagaaatgggctggacaaattgtgagtttaatctttctgcaggtgggcgtgaaaaacttttaggcatgccaattgataaagagatggaaaaaaagcatctttttggtaaagcatggagcaaaaaaagtgaggaagaaaaaacaaaaatcgtccgaacagtaatcttatttgcagaaagaggcaaagaagaagaggaagaagaattcattaaaaaggcaataaatgattggtcaatttcaaaagaaacagcagaaaacttattgaaatttaaccctggtaccggacgcgcaaggttttgttttaaagcactggataaactcattccttttcttcaaaaaggttatccaatgatgtcggaagacggtaaagaatcggcattttctctcgctggttaccaaaggccggatcaaaaggtacctaatcaaagggataatctcccgattcctttagcagaaataacaaatccaattgtaaaacaagccttatatgaaacccgcttattagttaacgcaatcattcgggaatatggcattccttctgaaattcatgtcgaattagcaagggaggctaaaggaaacaaaacacagagggaaaatgcaataaaaactattaacaaaaataaagtggagcgtgaagaagctgttgaaagaatagaagaaaatggattacttccagggcgcggatcaattgaattttaccggttatggaaagaacaggatggagtctgcatttacacaggccaagcgatatcactaaagcaattgcttgctggcgaagttaatgttgatcatatttggcctttttcaagatgtctggatgattctttttcaaataaagttgtttgcctacgaaacgaaaatgcaaaaaaagcaaatatgacccctagagagtggttggaaaaaaaagaaccgcaacgatgggaagaagttttgcaaagagttcgtagcttgccatacccaagcaaggtcaaaaaactcgagcgatttattgccaaggaagttaaacttgatgattttattaataggcaattaacggacaccgcttacattagcaaacaagtgactagctatctccgatgtttaggttgcaaagtagtttgtggccgtggtggggttaccgccgagcttaggcatcagtgggggcttaatggcatattaaatcctgacaaagaaggcggaaaaacgcgagaagatcatcgacatcatgccgtggatgcgcttgtaatagccgctacaaacccttcaaggctccaagctctttcgaaacggaaaaaagattcggtaattacaccaccttgggatacctttcgaaaacaagcagaggaaaaagtattggcgattttagtatctcataaaccaaacagaaaaattaaaggtcagcttcacgaagaaacaatttatggtggaacaatcaaaacaaaacccaatggtgaacatagaccttgggcccagaaatggatagaagaagatggaacctattgttatcgtaaacaactagtcggtcttacaatgcctatggttcttaaaattagagatttgaccataaggtctttagttctagatagattaaagcaatacggtgttaatccagatgagaattcaaaaataccaaaagaggtatgggaaaaccccctttatcttcccaataaaaacaaccctcaaggggttgttatcaataaagtacgaatactcaaaaatgataaatctttagtttcaatgagaaaaggttcatttcaagtttatgtgaagcccggaaatacccaccatattgttatatttgaaagaaaagatgaagtgggagaaacaataagatttatggaaagtattactttgctagaagcctataaaaggaaaatagaaggcaggccaatcattttaagatcttcttctgaattcccggatgcagtttttctaatgagcctctgttccggggataccgttaatcttaaacataaaaacactgaactactttgtcgctatgtaacttctgcttccacacagggtcaaatatattttgcagaacttaatgattcgaaaggatcaaagtatgaaaagattgtgaaaaacgctaacactttagttggcaaaaaagtaaccataggaattttgggagaaatgcgggactctggggattgacaattatgcatatttatgagatgataaaattctaaaattaaatttttgagattctcatgatcaagaaaacccttgaaatctccacggatggggcctatctttcttgcaaaaataaacaacttctcattaaaagagaaggggttgatcatgtttcaatcccatgtgaagatattaatatggtattgcttgatgcgcccaattctttaatttcttatggggcacttactcaactcctagaaaataatgcctcttttttggtgtgtggtaaaaaccatatgcccatgggcctattaatgcctttttcttcacacaatcaggtgttttctcgcattcagaaccagatacagtgtaataaaccaactcataaaaaattatggaagacattaatccaaaaaaagatcttggcccaaggagaattgcttaacaagagatctccagaatacactagaatgcaatatcttgccagagatgtcaaatctggtgattcacaaaataatgaagctcaggctgcacgcatttattggaaacattggttgcctgatgaatttttttttcaaagagactcggatggtgatggtatcaatggcttattaaactatggatatgcagtttaccgggcaactatttcccgtgcttgtgttattgcgggcctactgcccgcattagggattcatcatcataaccgatcaaacgctttttgccttgccgatgatttaattgagccctttcgcccaatggttgattcgcgagtaagggcattagttttaaagtcacaagcagaattaactccaaaaacaaaaaaagccctgctttcactgcttcatttggaagttaattgcaatggttcaaaggggccgtttgcagttcaaatccaccaatatgtttcaagttttgtccgtagcatccaggaaggagctgatcttcttgaggtgccctcatggaattatctggatacagattcatgtggattttaacattatttgatctccctgttgacaccaagcaagctagacggaattacacaatatttcgcaggcttttattaaaaaatggttttacacgaatgcaattttctgtgtataaaagacattgccccagtaaggaaaatgcaaatgttcatattcaaagaattaaacgaaatcttcccccagatggcgaggttagaatccttaccgttacagacaaacaatttgaacgaatgtacatttttcgaggaaaagtacgtaaaagaccggaagttggttaccaacaacttgagtttttttaaaactatctttcacaaccgcaacgccggaaagactttatgttcaaccgagtgtagcccatctcagcctgttagcaatccgcaacatgaactctgcaggttcacagcaagttatcagtgtagcccatctcagcctgttagcaatccgcaacacttcttagcattcatgtgtggcttttttgagtgtagcccatctcagcctgttagcaatccgcaacaaaccagttccaccactgttaacagtaagaagtgtagcccatctcagcctgttagcaatccgcaacctatcggtaaagatgctccaaacgtcttggagtgtagcccatctcagcctgttagcaatccgcaactcttgggcaggttgcttcaggatcgtagacagtgtagcccatctcagcctgttagcaatccgcaactccgggcgtaacgtgcccggctccagttgtagtgtagcccatctcagcctgttagcaatccgcaacgcccccggtttagcctggaacaattaccgagtgtagcccatctcagcctgttagcaatccgcaacgctttccattagggcagataagaacgccaagtgtagcccatctcagcctgttagcaatccgcaactattcgtatgaaattccactatcaataaatagtgtagcccatctcagcctgttagcaatccgcaacaatagccagaagggcaataaaacttgctccagtgtagcccatctcagcctgttagcaatccgcaactgctgtctcgttcacctacagtcagactcagtgtagcccatctcagcctgttagcaatccgcaactgtaaggctgattaatgtaatcagtaaaaaagtgtagcccatctcagcctgttagcaatccgcaacaatattggccttaacaattacgggtttaccagtgtagcccatctcagcctgttagcaatccgcaacaaggtctagcggattgttgctaacagccaaagtgtagcccatctcagcctgttagcaatccgcaacagacgcagagcatgaaattaaatgccaaaaagtgtagcccatctcagcctgttagcaatccgcaacacacgttatggcccataatgtcgatctaaagtgtagcccatctcagcctgttagcaatccgcaacataaattcgacatgatcttgcttagtgtaaagtgtagcccatctcagcctgttagcaatccgcaaccaagtacaccatctgaaaagcgtttcaaaaagtgtagcccatctcagcctgttagcaatccgcaaccttactggttgcttctaggtcaggtaagaaagtgtagcccatctcagcctgttagcaatccgcaacggaacatgaattttacctgacattgcagttagtgtagcccatctcagcctgttagcaatccgcaacagctgctctaaacgtgaaataataggctttagtgtagcccatctcagcctgttagcaatccgcaacagtatcatccatcgcaccgccagcaagcggagtgtagcccatctcagcctgttagcaatccgcaactcttgttaaacttttccagttcaacaggatagtgtagcccatctcagcctgttagcaatccgcaactccaccattaattgttgcttttgcttttgcagtgtagcccatctcagcctgttagcaatccgcaacgaatacctcggaatatccctgaccccacagagtgtagcccatctcagcctgttagcaatccgcaacttcgttagaggtagacgttgatcaattaaagtgtagcccatctcagcctgttagcaatccgcaacatgcatcttctaaacaatctgggtaatcagagtgtagcccatctcagcctgttagcaatccgcaacaatcagaattgattgttctggtatctatgaagtgtagcccatctcagcctgttagcaatccgcaactatcggctaaatgtgccagctaacggctcaagtgtagcccatctcagcctgttagcaatccgcaacaatccttcctgttaatgttgcaagcaatccagtgtagcccatctcagcctgttagcaatccgcaacagcctggaagaacctaggtatcagcgaataagtgtagcccatctcagcctgttagcaatccgcaacatattgttcataatccaaggctcttgggatagtgtagcccatctcagcctgttagcaatccgcaacagaacagcttgaagacctaaaaacaattcagtgtagcccatctcagcctgttagcaatccgcaactgatactctgaccatggcaataaacatatcagtgtagcccatctcagcctgttagcaatccgcaaccccaggtacagtggcaagatcgcgcatatagtgtagcccatctcagcctgttagcaatccgcaacgttcatttctttgcgtagttcgtcaagctcagtgtagcccatctcagcctgttagcaatccgcaacgcccagcttgcattcatcatgaagcgtgacagtgtagcccatctcagcctgttagcaatccgcaactgaaaaatcgatttttattcaaacgaatatagtgtagcccatctcagcctgttagcaatccgcaacagaagccatggtctgagccaagaaaagtagagtgtgtgttaagctcgtaatgtatagtgaaagtggtctgagccaagaaaagtagagtgtgtgttaagctcgtaatgtatagtaaaagatatccattaaacgaggagtaagccatgaagaaggtaagggctg

SEQ ID NO: 3646 - DNA, 23258 bp, synthetic construct
  misc_feature 1..23258: note = Synthetic
  variation 21479..21578: note = note, n is a, c, g, or t
  source 1..23258: mol_type = other DNA
aggaagagaagcaggcgctgggcttctacctgtcgggccacctcttcgacgaatgtcgcgacgaggtccgccgctttgcccggacgaccctcgccgacctggcccgcgaggtcaacggcaatggcaacggcaatggtaatggcggtggctatggcagtcgtgacgcgcgcaacaagaccgtgtccggcgtgatcgtcggcctgcgcacgcagatgacccagcgcggcaagatgatcgtcgtcatgctcgatgacggctcgcagagcgaggccaccgaagtgacggtcttcaatgagctgttcgacgccaaccgcgggctgttcaaggaggacgaagtgctgatcgtgcagggcaacgcgcggcacgacaccttcaccggcggggtgcggatgacggccgaggccgtgatggacctgacccaggcgcgctcgcgctatgccgaggcgctgggcctggtgctgcgcgacgacgcctccgccgcgcggctgcgcgagctgctgacgccgtatctggcgacccaggcgtccggcgtgcgggtgcatatcagctacgccgccaacggcgcgtgctgcaaagccgtgctcggcgagcaatggcaggtgacgccgtcggacgaggtgctggccagcttccgctcggcgctgtcgaacgagaacgtctacatgatctacggttgagcctcgcggggccgccaaaccggcaacgtatactcgctacgcgccagcctgatcgcgccgccggcaccgggcggcgcgcaagggcgacgcgcgggggagccgcacaacgacaacatgatgaactggtctgacaagcattccggccgtaccgacctgtggtacgcgccgctggcggtgttcctgctgatttaccctgtgctgacggtggtcaagcagggcggtgccagcgcgctgctgattgttgccggtgtcctctcgctcggtgccggggttgccgtccgccgtgtgttgagcgggccgcccacgccgtatggagcggacaggctggtcaggctgacgggctgggccctgtgcgcgccgctggtcgccgtgatcctgagcgaagcgtggcacgggcaactgcgctggaatgccttcgatgcgcccgcgcgctttctggcggcggtgccgctgttcctgctgctgcgccgggcgccgctgcggtggctgcgctgggccgacgggtcgttcgccgtggcagcgctggcggggctgggcgtctgcctgtgggcggcgcgcgactggggcgagggccgcatgggcagtgccttcctgaacccgatccacttcggcgatatcgcgctggtcctgggcgtgctgtccgcgctgtcgatcaactggtggcgcaaggacccgctcgccgtgcggctgctgaagatcggcggcctgctggcgggcctcgtcgcttcgctgctgaccgggtcccggggcgggtgggtggccctgccgttcatcctgatgctggtggtgatcgcgcgcggccgcgacaagccggcgcggtggcgggtgctggtgcccgccgcggccgtgctcggcgtggtggcgctgtatatcgtgtccggcacgatccgcgagcggatccacatggtgtgggcggacctggcccagtacgggcaggggcagaaggacacctccgtcgggatccgcctgcagatctaccaggcggcactgatgctgatcccgcagcacccgatcttcggcctgggccccggcggttttgccgacagcctgcaggcgctggtcgacgccggccggatgaccgccaccgctgcgcaactgggccgcggcgaggcccacaatcagctgctcgcctatacggccaacttcggcttggtgggcggcctggcgatcgtcgcgatccatctggtgccgggcctgctgtgctggtgctgcctgaaagcacccgccgcgccgatgcgacgggctgcgctgatgggtgcggtcttcgcactggcgtttttcgtcttcggcctgacggtcgagatcttcaccctgaagatgacggcatcgttttacgccgccgtcatcgcctgcctggcgggcatcgcctcgcacaccggccccgcggccgaggccggcacctcttcccctaccgagcgttgagcgcgatgttcagtatcctgatcccgtcctggaacaatttgccgtatctgcagctgtgcatcgagagcatccgccgtcattccgcgttcgagcacgagatcatcgtgcacgtcaacgaaggcacggacggcaccctcgaatgggtccgcgcgcagggcctgcgccatacgtggagccagggcaatgtcggcgtctgcctcgcgctcaacgatgcggcgcgcttggccacgcgcgactggatcctgtacatgaacgatgacatgtactgcacgccgggctgggatcgggcgttcgagtcggccctgcggcagatcggcgacccgttcgcctacctggccgcgcggctgatcgagccggtcgataccggcaacgtgcaggtcagcgtggcggatttcggcaccgggccggacaatttcaacgaggcggggctgctgtccttcgtggccgcccagccaccgtcgccggaccgcgacggcgtcgccctgcagccgatgctgctgagccgccggctgtggcacctggtcggcggctacagcatcgagttcggtcccggcatgagcagcgacgacgatttcctgatgaagctctggctggtgggctgccgcatttttcgcgtggtcggggccagcacgatctatcacttcggctgctcgaccacgcgccgggtgcggcgcaaccgcggtggccgggagttcctgctcaagtggggcattacccagcacgagttcgcgcacggctatgtgcgggccacggcgcgcgccagggcggatgcgctgccgacggtgccgtatcccggcctggtcgggcgcctcaagcggttgctctatgcgctgcggcaatacccgacatgcgacctgcgcggctgggagccggatttgcccgcgcagctcgtggtgaacccgtccggcgagcaaaccgggcgctgaggcgttggcgcctccgccgccggcgcgttacgcgctatggccggcggttcgcgccattggccagttcgcgggcccgctggtatttgcggtagctcaccgtggcattcatccgggcgatggccaggcccgtgccgccatccaggaaaccccgccgcagcaccagcgtgcgcacgaacgcccacgcgccgtgcagcgccggcgacagcgcgccgacgtgcttgccgcgctgggcgagatcccgcgcgccggcttccgcgtactgcacgctcttgcgatgcacctggtccatcgacgtgtagctgtagtgcagcagcgaggtgcgcagccgggcgacactgcccgtcacccgcaggctttcgtggaccaggctttccgagaagcgggccttgccgcgccggaacagccggatcacatagtcggggcgccagccgctgtggtgcacccaggcaccgcagaactgcgacagccgggggatcgcgtaggcatccgcatcggcgcgggccatggcggcgcggatctcctgggccagttccggcggtacgcgttcgtcggcgtcgatcgacagcacccacgcgccggtggcctggtcgagggcccggttcttctgggggccgaagccgggccaggggccatcgtcctcgatgacctgcgcgccgcgggcccgggcgatgtcgcgggtggcgtcggtgctgcccgaatccagcacgatcacctcgtccgccagttgcgcgagcgagtcgaggcaatcgccgatgttgtgcgcttcgttgcgcgtcaggatggtggcggtcagcttgccgggcatggtcaggggagccgtgggaggcggggacggtcggagtggcggatacggcgctgcgcggcgcctccggaggccggcgtggccggttgtacaatacgcgacggtttcatcttgccgttgccgtcacgcccgcccgcgtgcgccgatgcggcgcggcggccgcgcggacagccagggccggagtataccggtaccccgcgggcacccggcgggcccattgtccggcggctgacggcttacctttctgtctatgttctccatcctattgccgacctggaacaatctcgcgctgctcaagctgtgcgtgcagagcatccgcgcgcattcggcgcatgaccaccagatcatcgtccacgtcaacgacggttccgacggcacgctggcgtgggtgcgcgagcaggggctcgaccatacgcattctcccgagaacgtcggcatttgcctggccgtcaacgaatcggccatgctggcccggcacgactacatcgtgtacctgaacgacgacatggtctgctgtccgggctgggacaccgcgctgctgcgccgcctggagtcgctcgacaccgacctgttcatgctgtcgggcacgatgatcgagccggtcgacacgggcaacccgtgcgtggtggtgggcgactacggccgcgatgccgacacgttcgacgcggcccgcctgctggcggatgttccgcgcctggtccgcggcgactggttcggcgccacctggccgcccaccctggtgcaccggcgctggtggttcaagctgggcggctacagcagcgagctgacgcccggcatgagcagcgacaacgacttttccatgaagctgtggcacgccggctgccgcatcttcctgggcgcgggcgactcgctggtctaccacttccagtgcaagtcgaccggcaaggtcaagaagaacgacggccgcagccagttcctcaacaagtgggggctgtcgcagtcgaccttcgacaagtatttcctgcggcgcggcacaccggccggcgcggattggcgcctgccggagccggagctgacctccgccctgcggtggaacctgcgccgcaacgatctcacgcgccggctgcggcccggcgtccctgtgctctaatgcgttgccggcgccgatggcggccggtccgatttctcttcgatcttcatggcagtgacttcttcctcgtcttcccagccgcccgcgaccagccagccgggccacttcaagcgcctgtgggcctatctgcgccccgagcttgccagcttcatcctcgccatggtcgccatgggcgtggtggcggccaccgaggggatcatccccaaggtggtgaaggacctgctggaccagggtttcggcggtgaatatgccggcaagctgtggcgggtaccggccatgctggtcggcatcgcggtggtgcgcggcgtcgcccagttcggggccacgtacttcctgagcctggtgtcgaacaaggtgctgctgaacctgcgcatgaagatgttcgagcgcctgctgcaggcgccggcggcgttttaccagcgcaatacgggagcctcgctcatcaacgccgtcatcttcgaggtcaaccaggtgctgcaggtgctgaccggcgtgttcatcacgctggtgcgcgattcgatgacggtcgtggcgctgctgatttttctgttctataccaactggcgcctgacgctggtggtggccgtgatcctgccggtcatcggcttcctgatgtcgcgcatcaaccgccgcctgcgttcgctcaaccgcgagcaccagaacctgaccaacgaagccgcttacgtggtggaggaggcggccggcggctacaaggtcgtcaagctgcacggcggcgaggcgtacgagtcgcgccgcttcaacgccatgaccaaccgcctgcgcggctacgccatgcgcatggccgtggccggcgggctgaaccagccggtgacgcagttcctggcggcgctggcgctgtccgtcatcctggcgatcgcgatggtgcaggcgcaggccaaccagaccaccgtcggcggcttcaccggcttcgtgatggcgatgctgctgctgatctcgccgcttaagcatctgaccgacgtcaatcagccgctgcagcgcggcctgaccgccgccgagttcatcttcggcctgatcgacacgccgatcgagccgcaggaaggcggcaagcacatcgaccgcgcgcgcggcgacctgcgcttcgagcacgtcaccttccgttatggcccggacggccgggccgccctcgacgatatcgacctgcacgtcaaggccggcgagatcgtcgcgctggtgggcccgtcgggcagcggcaagaccacgctggtcaacctgctgccgcgcttcttcgagccgacctcgggccgcatcgtgctcgacggcgatgcgctcgccgacctgtcgctgcaggatctgcgccgccagatcgccttcgtgagccaggacgtggtgctgttcaacgacaccatcgccgccaacgtggcgtatggcgcgcgtgatgcctccgagatcgacatggcgcgcgtgcgccgtgcgctggaagccgcttacctgaccgacgtggtcgacaacctgcccgaaggcgtcgacactaatatcggcgacaacggctccaagctgtccggcggccagcgccagcgcctggcgatcgcccgcgccatctacaaggacgcgccgatcctgatcctggacgaagccacctccgcgctcgactccgagtccgagcgccaggtgcaggccgcgctggaagccctgatgcagggccgcacgacgctggtgatcgcgcaccggctgtcgaccatcgagaatgccgatcgcatcgtcgtgctcgaacacggcaagatcgtcgaggccggcacgcaccgcgagctgatcgaccgcgacgggttgtatgctggattgcatcgcatccagttcgcgacacagtaagaccgccgggcggcgcgtcccgggggtctcaaacgacacctcaggagacgccatgactgccaccacgccgtccagccacccacccatcagccgtttccctgtccccgcgctcgcggacatccccgaggacatccgcgagcgcatcctgacggtgcaggagaagaccggcttcgtgcccaacgtcttcctcgcgttggctcaccggcccgacgagtgccgcgccttcttcgcctatcacgatgcgctgatgctgcgcgaagccggcagcctgaccaagggcgagcgcgagatgatcgtggtggcctcttccgccgccaaccagtgcctgtactgcgtggtcgcgcacggtgccatcctgcgcatctacgagaagcagccgctcattgccgaccaggtggcggtcaattaccgcaaggccgacatcacgccgcgccagcgcgccatgctggatttcgcgatgaaggtctgcaccgcctcgcacaccgtcgacgaggccgactacgatgccctgcatatgcacggcttcaccgacgaggacatttgggatatcgctggcatcacggcgttcttcggcctgtcgaaccggatcgccaatgtgatctcgatgcggccgaacgatgagttttatctgctggggcggctgccgcgcggcgcctagcctgcctgcgacacgcgcacggtgactacggcgcgttgccttggcactgcgatagcggctggtcgtcgccgcagatcccgcggctgatgacgcgccagacatcggggttgttgaagtagccggtatgcgcgggaacgggggattccagcagccaggggagccacggtgtgttgcgcacgtagacgttggtgatccggagatgggatgtgccgtcgggattcgtttcgtccttgagatactgagaggggatgccccagctcagcacgtcgttgatatcgctgaacgcaacgatgttgagcgtgtcggtgcggccctgcacgagtggggactgcgcgaacgcgcgcaggccgaagtcttcccggcgcggcgcgggagagggggcggtcgatggcggcaacatccctggttgcacgggaagattgagtgtgcgccgcgcgtcgaacggcatgggtggctggtcaggctccgcgtcgggcggcaggttggacaggcccagcagcacgagttggttggccatcatgtagatggcgggggtcgcgttcatgacctccatgaccgtctttgacgagggccgcgcaatgccggagtgctgcagcatggtggcctgtgggccgacgccatgcaggccaagcagcacgtcgtagagaatccggctgcccaggctgtgcgtcacgaagagatagcgcgtatgcgcgtcgggcgtgccaccgcagtcctcgcccgtgtcggcgatcgctctgcacaggccgtaggcgacggcaagctgcaaagcctcgcggtacgagcccatgtacagcaccgcatcggcgagcgcggtgtcgaacaacgtttccttgacgccatgattcaccagctcccggctatccggcgggctgccggccccgacgctcaggtctgtcgagcactgtgtgtctcgggcgagcgagcttgcggtgtcgtagccgagatattgcgtcttgaacgcctgtgtgaggccggaccacgtgatctcgctcgcgtcgacacgcaactggcggccatcccggccacggaaaccgtaggatcgcttggccacggcaaaccatagcgcgctctgcgcaggcttgccgggcagtggccggatgccatggaccgggctggcgtaccagcgtacgtcggtgctggcgccaggcttcgtcggcgtcagtccgatttccgcccggttgtgcgcggacagccatgccgacgggtcggcgtcgtcaccattcctggagggaacgccgtccaacgcgtagccgggacaatgatcgccgacgccatgaatgaagatgaccttgatgcgcgagacgggctcgccgttcccggtctgcccgatcagcgtgtccagcgggggcacgaaggctaaaggctgttgtggcttgttcggattgtcctggggtttcagggcgacggtgtggctgccgcaggcggccagcaggagagcgctcgcaccaagcatcaccagacgcgcgcatacgcggtcaccgatcggactggccatctccacccccggttgttgttgtcacgccgccggatcagcggcgacgctgttcttctcgtgatagcaacgtctgcgcgcggccgcctccctacgggcggagggcattggcttgctgcggtgcatctatcatgctgcgccggtgctcaatacccgtgcgtcaccagcgacagcaccgacagatccggatgcgttccatcgatgatgctgcgtccgacgtgcagcgcctcttcgatggcttcctcggggttgcggaagcgctcgtcgccgtcggcgtggaacggcaccgtgtggccgggcagggccgggtcggcgccgggatggcacacgtagccggtgtacgtgtagcgcgtcttgtcgagcggagacgggctcggcaggacgtggatctcgaagccctcatggatttcctggggcggcatcggctgctcggacatgacggtctcgctttgccgcgccggcgtgcctgctgcgcacggcttcaggcccgtcgcggcgttttttcgggagatggaaaaattctaggcgatggcatgcggggcaggagccacttcgggcgttgccgcgccaaggtgtgtttgggtcacatcaagatggtggtgctgcgcttgtttccatcaatttctgatttggcatcaaaggtttatttatctttttgaagtgagagttcttatagccttcactgagcctgatggtcgtggtgcgagtggatgcgttgggcgtggggcatctccaagaatgcccaaacgccagcatatcttgtgccagcgaattaacgggggcaggcaccaactagttgaagcagcagatatggggccagaatctgacggtttggtccaaaaattcttgctttgtcaaaggtgtgacaccttttcagagcgcaattcccgatcggtatggcacatgcagagcgaacgcagtgcggcaaaagcaaagggccggcaaagccggccctctcatttggtgcatttactcctaacggattcagcttgttagtagcaaagcgcaattcccgatctgctggaaagtctggttagcatagcgatggccatactcggcgtcaatcgttggttgggtggccgatggatcgcatggtggatatagtgctacgacgaaatcactgcgccatatttttgaggggagcgctaaaaatggctgaaatgcagtatcgctggggcttggatatcggtaccaattccatcggctgggccgtgattgcgttaatcgatgggaggccggctggcttggttgtcacgggctcgcggattttctccgatgggcggaatcccaaggatgggtcatcgctggcggtggaacggcgggggccacgccagatgcggcgtcgacgcgatcgctatttgcgtcgacgcgaccgctttatgcaagcgctcattgatgccggtttgatgccgggtgatgcggccgcccgtaaagcgttggtgacggagaatccctatgtgttgcgacaaagaggcctggaccaggcgctgacgctgcccgagttcggccgcgcattgtttcacctgaatcagcggcgcggttttcagagcaatcgcaagacggaccgcgcctctgcccaagagtcgggcaaggtcaagagtgctatcgcggcgtttcgtgcgagcatgggtagtgcccggaccgtgggggaggcactcgcgcgccggttggaagacggccgtcccgtgcgggcacgcatggtggggcagggcaaggacgagcattacgagttgtacatcgcgcgtgagtggatcgcgcaggaattcgatgcactatgggcatcgcagcagcggtttcatgcggaggtcttgaccgacgccgtgcgcgatcgcctgcgggccatcctgctgtttcagcgtaagttgttgccagtgccggtcggcaagtgttttttggagccgaatcagccgcgcgtggcggcggcgctgccctcggcacagcgttttcggctgatgcaggagttgaaccacctgcgcgtcatgacgctggcggataagcaggagcgtccgctttctttccaggagcgcaatgacctcctcgcgcaatttgcagcccgacccaaatgtgggttcgacatgctgcgcaagatcgtgttcggtgccaacaaggaagcatatcgcttcaccatcgaatccgagcggcgcaaagagctgaagggctgcgatacagccgccaagcttgccaaggcgagtgcgcttggcgcgcgctggcaggcgttgtcgctggacgagcaggacaggttggtttgtctgttgctggatggcgagaacgatgccgttctcgctgccgctttgcgtgagcactatgggctcaccgatgcacagatcgacacattgctcgggctgtcgttcgaagatggccacatgcgccttggccgcccggcgttgcggcgcgtgctcgatgagctggagcgtggccgcgacgaacaaggcttgccgcttagctacgacaaggcggtggttgctgccgggtaccccgcgcataccgccgatctggaaaatggcgagcgtgacgcgttgccatactacggcgaggtgttgtggcgttacacgcaggatgcccccaccgccaagaatgacgctgaacgcaagttcggcaagattgccaacccgacggtgcatatcggtctgaaccaattgcgtaagctggtcaatgcgttgatccagcggtatggcaagccggcgcagatcgtggtggagctggcacggaacctgaaggcaggcctggaggagaaggaacgcatcaagaagcagcagacggctgatctagagcgtaacgagcgtattcgccagaagcttcaagacgcgggcgtgcctgacaaccgcgagaatcgtctgcggatgcgtctgttcgaggaattggggcagggcaacgggctgggtacgtcatgcatttacagtgggcggcaaatttcgttgcagcgactgttctcgaatgacgtgcaggtcgaccatatcctgcccttctcgaaaacgctggatgacagcttcgccaacaaggtgctggctcagcacgatgccaaccgctacaagggcaatcgcgggccgttcgaggcattcggcgccaaccgcgatggctatgtgtgggacgaaatccgggcgcgtgcggcggtgctgccacgcaataagcgcaatcgatttgccgagacagccatgcaggactggctgcataacgaagcggatttcctcgcgcgccaactgaccgacaccgcttatctctcgcgcgtggcgcgtcagtacttgacggccatttgccccaaggatgatgtatacgcttctcctggccggttgacggcgatgctgcgcgccaaatggggactcaaccgagtgctcgacggtgtggcggaggcgcaagggcgcctagccgtcaagaaccgcgacgaccaccgccaccatgccatcgatgcagtggtgatcggggccacggatcgcgccatgttgcagcaggtcgccacgctcgccgcacgcgcgcgggaacaggatgccgagcgcctgattggcgatatgcccacgccatggccgaatttcctggcggacgtgcgtgccgccgtggcgcgttgcgtggtctcgcacaagccggatcatggcccggagggcgggttacataaagacaccgcatatggcatcgttgaaggcccgcgtgaagatggactctatcgcgtgcagcatcgtgtcagccttttcgacatcacgccagaaaatctgtccaaggtggattgtgatgcgccattgcgagcagaacttgatctgatattcaagcaggatgatgtcaaggcgcgcgtcgcggcgctgactgtgttggccgaacgttacgggcagcgcaaggttcggctggtggagtggatgtctgtactgccgatccgaccgcgcggtgacgatggcaagacgctaccggattccgcgccatacaaggcatacagtggcggttccaactactgctatgaattgttcatcaacgagcgcgggcgctgggatggtgagctgatttcgaccttccgtgccaaccaagcggcttaccggcgcttccgtaacgatccggcgcgtttccggcgctacaccgcaggagggcgaccactgttgatgcggctttgtatcaatgactacatcgcggtgggcactgcggcggaacgcaccatcttccgcgtcgtgaagatgtccgagaacaagatcacattggctgaacatttcgagggcggaacgctcaagcaacgcgatgccgacaaggacgacccattcaagtacctgacgaaatcacccggcgcgctgcgcgatcttggcgcccggcgcatcttcgtcgatttgatcggccgcgtactggatccgggtatcaagggtgactgaatgatcggccgcatcgtcgagatcgctaccgataaccgctatctggggctcgatcgcggcttcatggtggtgaagtctgcaggcgaggaggtggggcgggtgccgttggatgatctggcggccgtcatcatcgccgcgcatggcatcacgcattcgtccaatctgctggttgcgctggcggagcggggcgtgccgttcgtgttgaccgctgccaatatgcagcctgtcggcatgttgtggtccgttgatggcaactaccagcaggcggggcgcatggaggcgcaattgggcgcatcccttccgcagaacaagcggctgtggcagcaggtggtgcgtagtaaattgcagatgcaggcggtagtcctggagtctatgggggcgccgtccgcgccgctgtccgcactcgtgcctaaagtgcgatccggcgatcccgagaactacgaggcacaaggggcgcgacgctactgggttctcctatttggcgacacctttcgccgtgaccggcagcaggagggcatcaatacgctgctcaactatggttacacagtgctacgcgctgccaccgcacgtgcggtaatcgcagcgggcttgcatcccagcgtcggcctacatcacagcaacacacagaacgccatgcgtctggttgacgatttgatggagcccttccgcccgctgatcgatcttcaggtacatgcttgctggcgggcaggcaacactgcattggaccgcgagactaagaagcggttggccgatgtgatgtacctcgatatgcccagcccgcaaggcatcacgccagtgatgggcgccgtgcagcggttgtgcacatcgttggcgcaactgtatctgggggaacgcaaggagctggagttgccgttgtgtcctacaccgattgatttagccgcaatgttcgtcccattggcatgagcatcgcgctttcgggatatcgcctcatgtggttgctgaccatgttcgacctgcccgtcggcaccaaggctgagcgcaaggcggcgaccagttttcgccattttctgcaagaccagggcttcgagatggcccagttctctgtttacatgcggttctgtacaggaagggaacaggtggatacgctgtgcaagcgtatccacgaagcactgccaggcggtggcaaggtcgatatcttatgcatcaccgataagcagtatgaaaacatcgtcagctttgctggcaaggtcaagcaggcacggaaaaatccagaccagtacacactgttttgacaccatgcgcgtagtttttctcgtttgcctgcgtgaaatcctccttttgattcaaggggttgcgtgtgtgccaggttagcagatcgggaattgcgctctggctacaacgggcggcggcttcacccgacatcgggcttcaggttagcagatcgggaattgcgctctggctacaactgttcacgctggtgacaggtgtcggtggtcaggttagcagatcgggaattgcgctctggctacaacacccgtcgcgtcggcgcggctgttttccttaggttagcagatcgggaattgcgctctggctacaaccgagccgtacatgcagggctcaaacaacctaggttagcagatcgggaattgcgctctggctacaacggaaaataggtatttgaatgaatccttggaaggttagcagatcgggaattgcgctctggctacaacgcgacgggcaagtgctccgctttcttagcgaggttagcagatcgggaattgcgctctggctacaacttgctgctgcaccattaacagcaatggaaaaggttagcagatcgggaattgcgctctggctacaacataccggtgtgttttatgtttctgggcgttaggttagcagatcgggaattgcgctctggctacaacgcagccgatgcactcgcggaagctgccgttaggttagcagatcgggaattgcgctctggctacaacacttggcgaagctcggagcgatcttgaccaaggttagcagatcgggaattgcgctctggctacaacgaagatgctgagacactacttaccgcaaataggttagcagatcgggaattgcgctctggctacaacgatcagttgaatacgccgcaatatcgtgttaggttagcagatcgggaattgcgctctggctacaacgctgatcgcgttcgtgaagcgagcgcttcaaggttagcagatcgggaattgcgctctggctacaactcaatcgcgatgttgttagcctggccgatgaggttagcagatcgggaattgcgctctggctacaacaaaacagatcgttgcgtgcatcgtatctcgaggttagcagatcgggaattgcgctctggctacaacaatcggtgacgtgatgacgaagcccgccgcaggttagcagatcgggaattgcgctctggctacaacgcgaactaacgtctgcaccagttgcggcagaggttagcagatcgggaattgcgctctggctacaactccttcaaccctgctacgcagcaaccccccaaggttagcagatcgggaattgcgctctggctacaaccatcggcgtgggtgtgcgccaattctgctgaggttagcagatcgggaattgcgctctggctacaactgcgctcggtgcgggccttctcaatggccagaggttagcagatcgggaattgcgctctggctacaacacgggggcgcaccgcaaaacgtcaaacttcaggttagcagatcgggaattgcgctctggctacaacggtgcgcttggtggcaataccgtcaacaacaggttagcagatcgggaattgcgctctggctacaactgctgggccttagccaacgtcgccgggtcgaggttagcagatcgggaattgcgctctggctacaacaaatggacgcttggccataatcatagttttaggttagcagatcgggaattgcgctctggctacaacaacgcaacgcgccatgcatcgtgcgcgaaaaggttagcagatcgggaattgcgctctggctacaacaatggggacgtccccaatggggagtgttctaggttagcagatcgggaattgcgctctggctacaacgggacgttcatgtactacatgagcggctcgaggttagcagatcgggaattgcgctctggctacaacttcgggcaacaccgttgctggtacgccgaaaggttagcagatcgggaattgcgctctggctacaacgcgttgcacgcgcgcacgcgcgccaggggtaggttagcagatcgggaattgcgctctggctacaacatcatctgcgacaaggtgcgcccgcccaaaaggttagcagatcgggaattgcgctctggctacaacgagcaccagctgtggcacgccggccagtcgaggttagcagatcgggaattgcgctcttgtaatgacccagcgaaacctgcacaggttaagctgctaaagcaaatgcctcagccggggtcttcatcttcagcgcctggtggggccgtcgatggttgtagaactgaatccagtcggcgattgcccggctggcatgctgcggggtttcgaagcgatgccggtgcacgcattgctccttgagcgtgcggatcacacgctcgaccatgccgttctgctgtggacagtgcggcgtgatgaactcctgacgcaggccataacctcgtaccaaggccgtgtaatcgcggctggtaaagaccaagccgttgtcgctgcgaagcaggaagggcgtcggaaccttccccagcgtaccgaaccgggcgatcagcgcatgctccaacgcgctcgacgccgtgctggccttcccgctgcgcgacagatgccagcccagcagctcccgcgtgtagcagtcgatcaccagcgccagcgtcgcccaaccgtctcgtcctgcccagacgcggcacatgtcggtcgaccagcgctcgttcggtgcggtagccaccgacggcatcgcctgaacgcgcggccggaagccaaccgggcgcttgcgaacttgccatcccatcaaccggaagacgcgctgcacggtgttcttgttgaaccccagcagatgcgcgacggtgcgatatccgaacgacggcgactcctcgatcatcgccttgatcggctccgcaaagcgggcctgcaccttcggttctgccttcactggccggtaatacaccgtgcggcgcggcacatcgaaccaacgacacagcttcgagatcgagatggtgatgccgtctgctttcagtccctggcggatcgtctcgatcacttgtcgtcctcgcccagcagggactgcaatttttttctcgcgcgcagctccagcatggcttcgccgtacgcttcctgcagatccttgatctgccgctcgtactgctccttcacgtccagcgggttggcacgcagcgcgttctccatgccgcgcttgccgtcttcccccccctcgacctcggagggcgacagatcataggctcggctggcttccgctaccgtcgtcttaccctggctgatgtccagcaccagcgcgctcttgcgcttggccgtccagcgtttgatgtcttcttccatcttcgtgcccatcgtctttcctcctattgtgacgtgagcaggaattcactggggcactacatgctgatggtgaccctgacgccggcagacattgccgacagtacgggagcgctaacggtgctggaggcagtgaagaaacgctggccgggcgtgaatcttgttattgcccgggctcgcttcggatcgggttggtctcacatcaggatgatgtcgtactgctcctggctcgccgccgccgattccacctgcagcgagatcggcttgccgatgaagtcgcccagcatcgccaggtgctggctttcctcttccaggaacaggtcgatcaccgactgcgaggcgaggatgcggaattcgcgcgggttgaactggcgcgactcgcgcatgatttcgcgcaggatgtcgtagcacaccgtacgcggggtcttcacctgccccttgccctggcacaccggacactgttcgcacagcacgtgtgcgagcgattcgcgcgtgcgcttgcgggtcatctccaccaggcccagctgcgagaagctgttgaccgtgatgcgtgtgcggtcgcgtgccagcgcacggcgcagctcggccagcacggcgtcgcggtgctcggtggactccatgtcgatgaagtcgatgatgatgatgccgcccaggttgcgcagccgcagctggcgcgcgatggtgtgcgccgcctccaggttggtcttgaagatggtgtcgtcgaagttgcgcgcgcccacgtagccgccggtgttgacgtcgatcgtcgtcatcgcctcggtctggtcgatcatcaggtagccgccggacttcaggtcgacccggcgcgacagcgcgcgctcgatctccgcctcgatgttgtacagatcgaagatcggccgctcgccggtgtagtgggtcagccgttcgaccacggcgggcgtgtattcctgggcgaattcgaccagcttctggtagttctcgcgcgaatccacctggatgctgcgcgtatcgtcggtcacgaaatcgcgcagcacgcgctgggcgaggttcaggtcctggtacaggatcgacggcgcgggcagggtggtggcgttgtggcggatggtcgcccagatcttgcgcaggtaggcgacgtcgttggccagctcttcgtccgtcgattcctcggcgatggtgcgcacgatgaagccgccgcgctcgtcggccggcaccatgccggtcacgcgctggcgcagcgcctcgcggtcggtctcgttgccgatcttctgcgagatgccgatgtgcgggtcctgcggcaggtagaccagcgtgcggccggcgatgctgatctgcgtggacagccgcgcgcccttggtgccgatcgggtccttgatgacctgcaccgtcagcgcctggccttcgaacagcgtcttttcgatggcgacgtgcggcgtgggcggtgcgtccttggcatcgcgcggatgccagatgtcggccacgtgcaggaaggccgcgcgctccaggccaatgtcgatgaaggccgactgcatgccgggcagcacgcgcacgaccttgccgagatagatgttgccgaccagcccgcgtgtcagcgtgcgttcgatgtggagttcctggacggcggcctgctggacgatggccacgcgcgtttcttgcggcgtgatattgacgaggatgtcttcggacatggacggggataccgggagagcgggtttcagcacccgcctccagggctggtcatgctcgcccgaagcgcgtcttgaaaccggccctcgcacgcggtccggcgtgcgatcgtacgaatcgcgtggccggtcgggtgcgggttaaggcgtgattgccgcctgcgcgagcagcgcggctgtctcgaacaggggcaggcccatgatacccgaatagcttcccgaaatatgggcgacgaaggcggccgcgcggccctggataccgtaggcgccggccttgccgaagggttcgccgctggcgatgtagcgggcgatgtcggtgtcggtcaggacggcgaagcgcacctgcgagaccgacagcgcgtgcatcggcgtgccgtccgcggtgacgacggtgatggcggtcagtacacggtgctcgcggccggacatgccgcgcagcatgcggtgcgcgtcggcggcatcggcgggtttgccgaggatctcgccgccgaggcagaccgtggtgtcggacgtgaggatcggcaacgcgggcaggccgcgcgcggcccggcggcgggtggcggcctgggccttgagcgcgcagacacgctggacgtagtcgtccggcgtctcgcccggcaggacggcttccagcgcctcggcgtcttcatcgccgtcggccagcagcagcgcgaagcgcacgccgatctggcgcagcaactcttgccggcgcgggctttgcgaggcgaggtagaggtgcggtgcggccgtcggttccatcgtcacacgcggtggtaggggtggttctgcgtgatgctccacgcgcggtagagctgttcggccagcagcacgcgcaccatgccgtgcggcagcgtcaggctcgacaggcgcatcagcatgtgggcgcgcgccttgagtgccgggtccagcccgtccgcgccgccgatgatgaaggccacgtcgccgctttcgcgctgccagccggtgagggcgtcggccagcgcggcggtggtcaggtctttgccgcgctcatccagtgcgacgatgcggcagcccttgggcagcgcggcttcgatgcgcgcggcttcgagctgcatgacggtggcggcggtgcggctgcccgagcgttgctccggcttgatctcgcgcagctcgatgcgcagttcgggcggcatgcgcttggcgtattcggcaaagccgtcctcgatccagcgcggcatcttgtgcccgaccgcgacgatcagcagctgcatggcgagagggcccgcgtgagctacgacgcgcgcttggccggtgcgcgcttggttgccggtttgggtttggccgcggttttcgtggcgggcttgcccgtgccggcagcacgtttggtggcagggcggctggtggtcttcttggccgcggtcttggcggctgtcttggtgggtgcggcagccttggtcgggcgctcgccggccagcttcggcttggtggtgcggcgtttggccggcgcggcttcctcggcctcgtcttcctcgtcgtcgtagccttcgctggccttgggcaggccgcgtccagcacccgtaccgctgagctggatgcgcaccggcttgtcgccccagatctcttccaggttgtagtactggcgcagctgcggctgcatgatgtggaccacggcatcgccgcagtcgaccagcacccattcgcccacgtcctcgccttccacggcgatcacgtggccgccggcttccttgacggcgtcacgcaccgatacggccagtgccttggtctggcggttggaggtgccgctggcgatgacggtgcggtcgaacagttcggtcaggtgggtggtgttgaagaccttgatgtcctgcgccttgacgtcttcgagcgcgtcgacgatcacgcgttgtagtttgcgaatatccatactgagtgagaagaacgttgagggcgggaaaaaagggcggtcaaaaaaagggtcaagcactgaccgtgccatcggcacggcggtacagcgcatgcgactggatcaggtcggccacgccggccggcaggnnnnnnnnnnnnnnnnnnnnnnnnnnnnnnnnnnnnnnnnnnnnnnnnnnnnnnnnnnnnnnnnnnnnnnnnnnnnnnnnnnnnnnnnnnnnnnnnnnnnccagccactgcaccgccgcgtcgggcgccagcggcaggggcgccgggcgcaccgttgcggagtcggcggccgccggcacctcggccgctttggtcgaggtggccgatgcggccggttcggccaggtgcggctcgggctcgaagcgcaccttgccgtcgttggcctccagcgtgccgccgcgcaccagggtggccagcagtgcacgggcgaaggtctcggtggtgaaggcgtcggtcaggtagccgacatggcggccgcggcgcacgcgcgccagcgccagctggatcggcagtgcgggcagcgtggcgctctcccacgagatcgacagcggcagcaggtagcgctcggtgcgctcggtgccgtccgcatcgcccagcgtgacggcgatctcgttgatgaacacctcgggccgggtcgcacccgtcaacggccggttggtggaactcgcatccaccggcacctccgcgccccaggcgaagcgcgcgccacgcagcacgctgtccttggcggcgaaccagcggcgcatgggcaggtaggccggcaggatctcgcgctcgatcagctggcggtgcgcctcgcgctggtgcgtgtcggccagcgcgtcgagccccgcgcgcaagaccagcgtggtgaactcgggcaactgctccgcggccggctgcgcccacgacgggccgggctcgttctcgcgcagctccagccagtagaacgcgtaggccggcagcgtcagcaggtaaggcaactggccgatgggcggaaacgccgtgccgccgatcagctccaccggcacgcgctgcgcgtagctggacaggtccagctccaccgcctgcgaggcccgcgacaggttcgccacgcacaggatcggcgggttgtcgcgatcttggccgtccagcgcgcggatgtaggccagcaccttgcggttggccggctgcaggaaccggatgctgccgcgcccgaacacgcggtggcgcttgcgcgtggccagcagccggcgcgtccagttcagcagcgaatgcgcatcgcgcgtctgcgcctccacgttgaccgattcgtagccgtacagcgagcccatgatggccggcagcaccagttgctccggatcggcgcgcgagaagccgccgttgcggtcgggcgaccactgcatcggtgtgcgcacgccgtcgcggtcgcccaggtggatgttgtcgcccatgccgatctcgtcgccgtagtacatcaccggcgtgccgggcatcgagaagagcaggctgttcatcagctcgacccggcggcggtcgcgctccagcagcggcgccaggcgccggcggatgccgaggttcagccgcgcgcggcggtcgctggcgtagacctcccacaggtagtcgcgctccgagtcggtcaccatctccagcgtcagctcgtcgtggttgcgcaggaagatggcccactggcaggtgggcggcacttccggcgtctgccgcatgatgtcggtgatcggaaagcggtcctcccgcgcgatcgccatgtacatgcgcggcatcagcgggaagtggaaggccatgtggcattcgtcgccgtcgccgaagtactcctgcgtgtcttccggccactggttggcctcggccagcagcaggcggttcttgaactccgcgtccatcgccgcgcggatcttgcgcagcacggcgtgcgtctcgggcaggt

SEQ ID NO: 3647 - DNA, 18592 bp, synthetic construct
  misc_feature 1..18592: note = Synthetic
  source 1..18592: mol_type = other DNA
tcgactctgctggagctgtttttttacccagcaaggcagaatgagcgaggtttagccgtgctaaatgagcgaatgataacgccgctgggtggaaaaacagccccagcccttcgggttgtgcctgaaaatgcgccactcggcgttgctcgtcactcatttggaatcaccaaacctcactcctcgcgccttgattggcgcattttcagacacaacagagccgattggattagtgttaacaggccctagtgactgaggaccaggtcttacgtgatgccggcctgtcattccgcaagattgaatacgccaaaggcatggcggaagccgtcgtgtcaggcagatttgatatcgatggtctggctgcgatgagtgatgatgatgcgatagccagcatcaccgcaatccggggatttggtcgctggagtgccgagatctacctgatgttctcactgcagcgacaggacatctttcccgccgacgacctggccttgcgcgtcgcagtgggccaactgaaaaacctgccgaataaaccgtcggtcaaacaggcgcgggaactggtcacccattggtcgccgtggagaagtgtgggttcgctgtttttatggcactactaccggggtgcccccacataagcggacagaattaactcggtgaatctctacgatgagtatacgagcaacaaacctatcgccgcaggaagggcctgaatcaacaggatctttctgctggcggttgtcgcaccgtaaacaccggcaagcagcacacagctcagaaagaagatcttcacgcccgtgccatccgcacccaggataaccccccacaagagcccggcagccagaaagccattgtacaagccttggttggccgccaacactcgcgtaatcgccgcggtctctctgctatgaccaaacacacgcattcccaacggcttgtcccaaaggaacatctccagcacaagaaaagcgatgtgttggagagcgatcagaccgaccacgatgtctgcgatcactggcactccttatctatgaatccgtctggcaagctttgccatgatgcccgtcatgcctggcaaaagcatacactgaatatcgaacatggaattatagcgtgggcctttatttggcattcagtttacccactgtattcgccagcttacggccaagcgccaaaacagcttcttgtttacgctcgtccaccagcgatccatcatcattgaaggccttaaatgcctgtggaacggtctgctggtcaggcaaaaccgtaacacctatattggcgagcaacatccttaaaaaaaccaatccacgaagcccgcccaaggcccctggagatgcagccaggattacagccgtcttacctcggaaagccaccagcggcggctcatcttcggattcggcacgggatgcccaatcgataacgttcttaagcaatgggctgaacgcgctgttatattccggagacgcgataatgaaggcatcgtgatccatcagaagtcttttaagttgaagtgcattctccggaatcccttgttcgcgctcaagatcctgattgaagagcggcatcgggaaatccaccaaatcgatccgcgtaacatccgccccggccgcttcggcccccgcagcggcaatcgacaggatctttttattgaaggatccattcctgctgctgcctgcgaatgcgagaattcttggtgccatataccccccttgggaatgcctgagcatttgtctccggactggacctgatggaatcagtgtagcgctacttctgccttctgtaaccgctcaacgactgctacgacagcgaggaccatgccacgcactgattgccggctgatttttcctctattcatttgatccctcaaatagccaatccttcataatccaatatgcttaagtggtaagctgtgacgaaattcggcagcctctacccggacctgtcaaccgccaccgaaaaacttgcctgcgccatatggacctgcacagatgaagctacatttctccgcagagcatccggaatcattgtccgagctgctactggcccgggcacgacgggtactcctgtacggcccacccggcatcggtaagagcacgctggtaaaagccttggcgggatcactgcacaaggcaggcagaccggtccactgtctcgcggcggacccggggatgccggcattcggtatcccgggcgcggtcaatctgggcctatggaaacaggacgcatgggaggttgtcggtcgcgcggctgtctgtagtctcgacgccgcccgtttccgcctgccactgatcgaggccgccggtgaattggccaaccaggtggaaggcggcacactgttgctcgacacacccggggttgtgcggggtgtggcgggggctgaactcctgacatcactggcacaccgtgcggatgtggatctggtgatggtgttgatgcgcgagggacagccactccacctcagtcaggaactgcgggcgctggccgccgaggttgtggctgtcgaggcttcagcgtcggcgagccggccgggaaagggccttcgcgaccggcagcgaacacgccactgggacgactatctgtcccatgcgagcaaggtggatatcgacttgtccgaagtcgctgtcctggggacaccgccccgccaggcaaccgaagcctgggtgggcaagcaggttgcgtttctcgatggatcccgcactgtcggtatgggtgaggtggttgacatgggagaggagagactccggatcctgctaccccctgataacaggcggacaggggttatcttggtgcgcgatgccgtccgggacgagtcgggattgctggtcaccggcaaacgctttgcggaaagcgtggtacgttacctccccccctccgatctggtgcccgacgacaagctgccgcaggataccggaccccggcccatggttcagaccccgagtgctaccgcagtcttgatgaacggtgtgttcggcgatccacaactccatctccgcctggcacaccagcggcgcagcctgctcttcgacctgggcgacggcgcacggctcccggcgcggatcgcacaccaggtcagcgacgtcttcatcagccacacccatatggaccacatctgcggctttctctggctgctgcgatcgcgtatcggcgaatcggcaagatgccggctgtatgggcctcccggcctcgctacgcagatagagcatctgatcaacggcatccattgggaccggatcggtgatcgaggccccagattcgaggtcactgaactgcatggcgaacaattgatccgcttcaatctgcaggctggttcggcaggcattcggccaaacggtgagactgtgatcaagaatggtatcctagtcgatgagcccggatttcacgtgcgcgccgtcaccctcgagcacggcatacccgtcatcgcctacgccttcgaacctgtgccgcagatcaatgtgctcgaggagaaactcagtgaacacggactgcaacccggtccctggctgaccaggctgaagcagctgatgaatgaacagcggctggatgagtatctttccctgccggatggaaccagcgagacggttggcgccttggccgccaccctcaccctgaccacgcccggcagcaaaatcgtctatgccactgacctggctgacacgccccataaccgcgatcgactcaccctgttggccaggcaggcacacaccctgttctgcgaatccccattcatgcagaaggatgccacgcaggcccgacgcaccggccacctgaccaccaccgcctgcgcggagatcgccaacagcgccgctgtccgccacctgattccgttccatttctcccgcaggtatgagggcacgtcatggcaggtgtataacgagatcgcggcaaactgcccacatgtcgtgataccggccacgacagacagcgcaaaccatgaatgatactgcacaactgaaccttaccgtcacctggaatagatcagagaaatcacccgcgaggataaaggattactttcctgttctatccaccgggccgggtttgatcattaatgcaaaagggatcgcaagcggaccgaaggccgcgcccagaaccgcccacaataccggcctgcctccacgcgatttagcgatctggtgacaaataaatatgctggcgatatttattgccagtaaaacatagatagccattgtaatctaagtatgcaattcggattgatcccgctggcgattgatttcagttcatcatgtaagaatcgaagttttttaaaaataatccctagttgctcgcttccctgataaaacgatagtaggtaaattgctgcgacttgtttgccggcgttatatgcatctcgtttttttcttccaccaactcgaacgccacgcccaactcacgctttagttttgatgcatcatattgcacgatatccaaaccactgcactttttcgtacccccgatcgcaaacgctgcgataatcagatggcctcctggtctcaatgccagcttcaacgcctccaaataggcatccctgtccgatttatcggtcaagaagtgaaacacagcccggtcatgccaaagcgaaaacaggtggggtgatttgaattctgtaatatcggattcgaaccactcgatttcacctgccgcatctcccagtcgctgtttagcgacagccagcgccctatcggagatatccaatacagccaggtttgtataaccttgcctatacaggtgatcgaccagtaccgacgcaccaccccctacatcgatgatcgccccgtccctggcaacccggcagcgatggatcaattccaacgatagctttggttctgtctgataccagctgacttccgagggaggtttctcccgatatattttttgccagtgcgtttttctgtcaatcacttcaacccggcctccaatcaatgccctggtcaaccctctggaagcgtcgtctacaccgggatcggttgacgaactataggtgacctgtcgcaacccattcctccggggtaactcaatggttcctggggctaattacagctccaggtacggggcttcagattaaagtatagagccagactggcttttccattggaggtatcggttcaatcagcggtcgatcaatagcgaaacgactgcagcacttcatatcccagttccggtttccatccccaggaatagtttcgcaggtcatagagcgccgcccgttccgcttcggcggcctaaaaataaaggccgggtaaagacccggcctctcatctgttggcaattctgccttgttagtagccaagaaacagaacgcgatttccgatttgaaacttaacactaacaaagatcgtttgacattccaaatacaagacaggacccttagccggtggagaataaaaaaagggagtaattaccatgaagtatcgcctcggactcgatatcggcactcactcgatcggctgggcgatcgtcgcactggatgatgcaaacccacccaagccggcgtcgctggtacggatcggatcgagagtttttcccgacggccgtgatccccaatccggcgaatccctggcggtcaaccggcgggagccgcgttcccagcggcgccggcgcgatcgttttctgcgccgtcagcaagcctttctcgaccatctgattcgttacggactcttaccgcagggggagaaagcgcgtaaagacctgcagccgcgcgatccctacactttacgcaaaaagggcttggacggcgcactttcactccatgagttcggacgcgccctgttccacctcaatcaacggcgcggcttcaagagcaatcgcaaggcggaccgcaaagcgggggagtcgggcaagatcaaacaggccgccgaccgcttcgccgcggaggagctctcccgctaccgtaccgtgggcgaggcgctctaccaccgcctggcggaaggcaagggcagccgcgcccggctgcagggcagcggcgtcaaggcggcttacgacttctatatcacccgcgagatgatcggcgacgagttcgacgccctctgggcgaagcagcggagctaccatcccgaacaactgcacgaccaggcccgggcgacgctaagggatatcctgctccgtcagcgccccttgaaatccccgcccgtcggtaagtgctggctggagccgagcgagacccgggcgcccctggcgctgccctcgtcccagcgtttccgcctctaccaggagttgaaccacctgcggttgatcgacctctccaccggcgaggagcgctccttgagccgcagggagcgcgacgatctggccacctatctcgccagccgcgcaaaggccaagtaccaggcgctcaggcagcacctgttcggcaaagagaaccgggatgcctttgtcttcaccatcgagcagggcggtctgcgcaaggagctctacggcgataccagcgcccatcgtctggcccacaagaaaggtttcggcaaagcctggttcgacctgccgccggccgagcaggacgccattgtcgaacggctgctggagaccgaagaggaagcagcgctgaccgattggttgaaacaacgctacgggctcgatcaggcagcggcagactatctggccggcgtcccgctggacgaaggccacctgcgcttcggccgcacggcgatcggccgggtccttccccatctgatcgaaggctggaaccaggcggaagaccagccgttgacttacgaccaggcggtgaaggcggcgggttacgaggaccaccgggcagcggcgggaaatgcgctgctggagcgactcccttactacggggagatcctctggcgccatacccaggagatgcccaacgctaccgacccggacgaaaaggagtacggccggatcaccaatcccaccgtgcatatcggcctcaaccaactgcgcaagctggtcaacgccgtcatcgaccgctacggtccgccggcgcagatcagcgtggagctggcgcgtgaactcaaactcagccgtgagcagaagcggcgcgtcaaccgggataacgtcgaaaaccgtgaacgcaacgagctgctgaacaaagaattgatcgaagagtggaaacagcgtcccaccgccgccaaccgtctgcgcctgcgcctgttcaaggagcttggcccgcttgcgccgcgatgcccctacaccggcgaactgatcaagccgaccctgctcttcagcaaccactatcaggtcgaccatatcctgcccttttcaaaaaccctggacgacagctacaacaacaagatcctcgccacccgggagggcaatgcggccaaaggcaaccgggacccctacagctacgccgccgagacccccggcgtggaccgggaggcgatgcaggcgcgggccgaggccctgccctatgaaaagcgcaagcgcttcaaggaatccgcctacaccaaatggctggggaacttcgacgagttcgcaggggaggacggaaaaggctttctcgcccgacagctcaccgacaccgcctatctctcccgtgtatcgcgccactacctgcaatcggtctgcggacgggtggatgtcacccccggccggttgaccgccctgctccggggcaagtggggcttgaacgccctgctgaatgaggggaaccggaaaaaccgggatgaccatcgccaccacgccatcgacgccgccgtcgtggcggtcaccgaccggggtctgctgcaacgcatcgccacccgggcggggcgggcggaatcccggggcgacgagcggatcttcgccgacctggaccgggagatgccctggcccgacttccgccaagcactggagaaggccctgacccgctgcgtcgtctcccacaaaccggaccacaacccccagagccagctgcatgaagagaccgcctacggcatcgtcgacggccccaccgacaagggcgtctacacggcccgccatcgcgtttcgctcgccagcctgaagggaccgaaggaccttgccctgctggagagcgcccggctggcgagaaagctggaaaaacagctggcaggactcgacggcaaggcgtttcaggcgaggctggccgagctgcagggccgcgaggactaccccaacaaagtccggctgctgcgcaagatctccggcgtcacggtgccgctgagaggcaccgccatcagccctgatcccagacgtaggcccgcctaccccgccaaactctacaaagggggcgccaactattgctacgaactcttcgtcaacgaaaagggtcgttgggacggcgcgttgatcaccagttttaccgctaaccaacccgcctatcgggcattcatgggaagtgataaacagtttcggcaggagacgtttaacggcatgcccctgctcatgcggttgatccgtgacgaccttattgctattgaagaaagtcccggcaacaggtgtattatgcgaatcgttctgttgactgaaggcaaagtagtcatggcagagcattttgaagccaatgccgatgccagaaaccgcgacaaacaatccccattcaagtatttgaccaaatcgcccgataaattacgtaagctccgtgcccgccgggtcttcgtcgacctgctggggcgggtgaaggaccccggtttcaaggggtgagaccgatgacggatagaggaaagtccgatgcccggacgcatcatcgagatcggcgagagcaaccgctatctctcgctcaagcgcggcttcatggtgatcagccaccgtggtggggaacttgctcgggtgccgttggacgacctggcggcggtgattgcctcgggccacggcaccacccactcaagcaacctgctcgccgccctggccgaacggggggtgcccttcgtgctctgcgccggcaaccatctgccggtgggtatgctgctgtcggtggacgggcactttcaacaggccaagcgcatcgacgcccaactgaccagccgacgcccccaacgtaaaagactctggcagaccctggtcagggccaagctgcagatgcaggcggcagcgctgcgatcacttggtcgaccccatgcgccgctgagcgccctggcaatcaaggtgcgctccggcgacccagagaatgtcgaggcccagggcgcgcggcgttactggaacctgctcttcggcaatgaattccggcgcgatcgcaacggcgaagatcacaaccggctgctcaactacggctataccgtcctgcgctccgccgtcgcccgaagcgtcatcgccgccgggctccatcccagcctggggctacatcaccacaacagctacaacgccatgcgcctggtggacgacctgatggaacccttccgcccactggtcgatctgcgggttcacgctctggtgcaggctgagcggctcacactcgacacccaggacaaggggcagcttgcgcgcctgctcttccacgacctggaaaccgcggcaggcaccaccccggtgatcagctgtctgcagcggctggccgtctccctggcgcaacactatctgggggagtgccgtaccctcgacctgccgctgctgaagccgctgccggacctcacggtcttcgcgcgactcccatgagccagctctcggcataccggcttatgtggctcatgaccctgttcgatctgccggtgacgacaaaggccgaacgcaaggcggctaccgggtttcgtcattttctgctcgaccagggcttcgaaatggcgcaatattccgtctatatgcgcctctgttcgggcaaggagcaggcggaaacctactgccggcggatccgggaaaacatgccggacggcgggcgcatcgacatcatcaccatcacagacaaacagtatgagaatatcgtcagtttcgtcggcaaggtcaggcagacgcggaaaaatccggaacaatattcgctcttctgatcaaaccggactgttttttcctgaccggaaaacggaaaatcccggtaaagaccgggagttgcgtgaattggagtctatcaaatcggaaatcgcgtaccagctacaactatgcaatggctaacttatttgttttggacagtctatcaaatcggaaatcgcgtaccagctacaaccaatcccgaataacccatcagtccacatatagtctatcaaatcggaaatcgcgtaccagctacaactgtaaggctgtgtctatggggatttgcttcagtctatcaaatcggaaatcgcgtaccagctacaacgaaacagtcttcaaaaaccccgagtttggtagtctatcaaatcggaaatcgcgtaccagctacaactcgaaataacacgccagcagtgagcctttcagtctatcaaatcggaaatcgcgtaccagctacaacaccaatgcagttgcccatctaataatagtaagtctatcaaatcggaaatcgcgtaccagctacaactaaacatagctttagcataaacaagctcagagtctatcaaatcggaaatcgcgtaccagctacaacgcaggcgcgctttgcgatatccgatccaatagtctatcaaatcggaaatcgcgtaccagctacaactgtgtagcctttgcctatggtcgccccgtaagtctatcaaatcggaaatcgcgtaccagctacaacagggcaacatctcgatcgacgaaagtgaggagtctatcaaatcggaaatcgcgtaccagctacaactatcggacccatcacgcccctcacaaagtcagtctatcaaatcggaaatcgcgtaccagctacaacgtaaccggctgtgacggttggtatgacctgagtctatcaaatcggaaatcgcgtaccagctacaacatataagatatacatctatgaggaaccaaagtctatcaaatcggaaatcgcgtaccagctacaacaggtatttgtgttggtggtgtgacgttaaaagtctatcaaatcggaaatcgcgtaccagctacaacgaaataactgacgcatactggctgaatgacagtctatcaaatcggaaatcgcgtaccagctacaacaggacaaacccaggggttccagcagcccgcagtctatcaaatcggaaatcgcgtaccagctacaacataatgattgtggttggctatatgaggtaaagtctatcaaatcggaaatcgcgtaccagctacaacaatctctcaatgcgccttgtagataaatacagtctatcaaatcggaaatcgcgtaccagctacaacgaaagcaaggaaatactggtaactaatataagtctatcaaatcggaaatcgcgtaccagctacaactggtagcagcgtcgagctgtccagagatacagtctatcaaatcggaaatcgcgtaccagctacaacagctgtggggtgaaaccgatcaggacgatgagtctatcaaatcggaaatcgcgtaccagctacaacatcaagcgggcgcatgagcgaataaccaagagtctatcaaatcggaaatcgcgtaccagctacaactgaaatgcgcctgcactgaattgcatagcgagtctatcaaatcggaaatcgcgtaccagctacaactcaacagctaatttcaaagacccgcattccagtctatcaaatcggaaatcgcgtatcagctacaacctggtgtgtggtgggtatggttaagatctaagtctatcaaatgggaaatcgtatacctagtctctcactatcccatacctcattaaataattggcaatcctgctttaacacgctacgctatgccggtccgcgggacgtcgttcaagacaacggatttttcagggcctgcggcaaaggaaaacatcttggaccgattcaaggagtagtagttatcatgtctcaaaatttaatctccgcggagtttactacggaagagcaggctgccgcgcttgccgccatacagcaaatccagtcactgccctttctcatcgggctcagtaacggtgaaaaacgcaaactcaacaagatgggcgttctcgtgaaccttagcgatgattgatgaatgacaggacagactgaactgatgattatcggacaggtagttcacaccctgccgtgactcgaatcgacgcgttcacgcatcaatagcgaaacgactgcagcacttcatatcccagttccggtttccagccccaggagtagttgcgcagatcatagagcgccgcccgttccgcttcggcggccgagcgcgggctgtagccgcagccgtagctggtgcgggtgcgccccgtcattgtggtataggtggtcttgactatgaccatgtgggcatggcgcaatccgataccggcctgggcgtgaacgtcttgccctttcttgcggtaaccctgttcgatcagcttctgtttggccttgtggatggccgactcgacgctctcgtccggagcggccacccattcgatggccagggagttgccgagacgctttgccacggcacagccggcgcccgccatggcgtcatctgcccaaatcagcgtcatcagtgtaagcaggaacagggtgaaagcacttcgttcaactgccggtctgcatcgattccagtgtttcccaacgctcataggcctgatccagttccagttgcaccgcggacatctgctgctgaagctctgcgaccagttccccctgggtgcgatagaggtccggatcgcccagcctggtctgtaactcgtcgagccgcacttcaagtacttcaatcctccgaggcagcgcatcgagctcccgctggtctttgtaactcagcttctcactcttctttttcggcctctccggaacagacttgaccccggccccgccctttggtttcgactccactgattgcctggctcgggcatgcgcctcccagtcactgaaaccaccgacatattccgccaccctgccttcaccttcgaagaccaggcagctggtcaccgcattgtccagaaactcccggtcgtgactgaccagcagcagggttcccgggtagtcggagagcaactcctcaagcaactccagcgtctccacatccagatcgttggtcggctcgtcgagcaccagcacattggccggcctggtaaacagcttggccagcaacagacggttgcgctcaccgccggagagcgccttcacagggcttctggcacgttccggggtaaacaggaaatcctgcaggtaaccgatgatgtgcttgctttttccgccgacatccaccttgtcgctgccgccccccacattatcctgtaccgaactttcctcatcgagctgaccgcgcagctggtcgaaataggccacctgcagctgggtgccgagtttgaccctgcccgtatcgggccgcagttctcccagcagcaggttcaacagggttgtcttgccgcagccgttggggccgatgatacccacccggtcaccgcgcaggatggtggtggagagatcccgcaccaccggtttctcctcccaggcgtaaccgatatcctcgacctccacgaccagcttacctgaacgctctcccgcatcgatccgcatctttaccctgccctgctgatcgcgccgcttctgccgtgcctcacgcattgccttaagcgtcctgacccgaccctcgttgcgggtgcgccgcgccttgataccctgacgaatccagacctcttcctgggcaagccgtttgtcaaaacgctgattagcctgttcttccgcattcaacagttcctgcttgcggcgtaaaaaattggcatagtcacccggccagtcggtcaagctgccgcgatccagttccagaatccggctcgcgatccgacgcaggaaggccctatcatgggtgacgaagaggattgcacccggataaccgagaagaaattcctccagccatcggatggcctcgatatcgaggtggttggtgggttcatcgaggagcagcaactcaggctccatcaccagggcctgggccagcaagacacgcctcttcaggcctcccgacagcgcactgaaccgggtatcggcatccagaccgatcctggatatgactgtctccacccgttgctccagttgccagccctcaacggcctcgagttcatgctgcgccttcgacagcgatgacaacaggctgtcatcgcccgtctccgcaagctgatggcttattttgtggtaagccttgatcttgtcggcaagttgaccgacgccgtccgccaccacatcgaagacactcccctcgaccttatccggcacctcctggatcagatgcgcaatccttgtcccgctgctcacgacacgctccccgtcgtccgggacgataccaccttgaatcactcgcatcagggttgacttgccggccccgttacggccgagcagcgcaatcctctcccccttctcgatgttgaggtcgatgtcatccagtaacggccgatcgccatagctgagctgcagcctgcgcagggttatcagcggcatcgaagaacccgggtgaattcattcatgacatatctcaattaaaaagcttcatcctacgctgatccaatctgctctgctggtaaaaaaccaatcgttatgtgattatcgccatgttagggcacgttaacagaccctaataaatcggtagtttcatttatatcctgcttcgttaccaggatatataaaaacacccattccaatccaacaagatctgcatcatggacgggctatcaaatcactatttgggactcgggccaagtagcgggagacgataacttatgaagaccaagattctgctgaaagaggcagatatgccgacccattggtataacatcgtggctgatatgcccaatccaccggcgccaatccttgcccccgacggctctccggtaactccggatgcgctcagcgcaatttttcctgacgccattatcgaacaggaggtgagcgcacaacgttggatccctattcccgatgaggtccgtgaagtgctgcgtctgtggcggccatcccccctatatcgcgcagaacgtttggaaatggcgctcaagacacccgccaagatctacttcaagaatgaagcagtcagcccggcgggatcgcacaaaccgaataccgcggtcgcgcaagcctattacaacaaaatgcagggcatcaaacgactcgccaccgaaacgggggcggggcaatggggctgttccctggcccttgccgggcaactgttcgatttggaagtcagggtctatatggtcaaggtcagttatcaacaaaaaccctatcgtcgctcgatgatggagacatggggcgccgaggtctttccgagtcctacagacatgacccagtcgggccgtcatatcctgcaacaggatgccgactctcccgggtcattgggtatcgccatctccgaagcggtagaggaggctgccggccggccggataccaactacgccctgggttcggtgctcaatcatgtattgctgcaccagaccattatcggcgaagaggcgaaaaagcagctagagcttgtcggggactaccccgatgcgatctacgctccctgcggagggggctcgaacttcggcgggatcgccttcccgttctttgccgacaaggcggcaggcagggagatcgatctggtcgccgttgaaccgacctcatgccccacattgaccaaaggggtatacgcctacgattacggcgatacggagggcctcacgcctttgacgaagatgtatacgctgggccacgatttcatgccacccggcatccatgccggcggtctacgctatcacggcgattcggcgctcgtcagccagctctacaacgaagggctattgagcgcagtggccatcccccaactggagactttcgaagccggcgaactctttgccaagacccaaggcatcattcccgcgcctgagtcctgtcatgcggttgccgccaccgttcgggaggcgagacgttgcgccgaaacgggtgaggcgaagaccctgctcttcaacctgtccggtcatggacatttcgatatgagttcctatgaccgctacttcaaaggagaactggaagacttcgactacccggacgatgcgattcgggcatcactcagccatttgccgaaggtgggttgaacggcgtttgagagcctgggatttacgcccgctgtgactcccaggccatgcgtaaccggttcaggtcgtggcacgcctgatcccagttcaggtcatccccggagtgctgcagcttctcgatcaactggtggatacctgcgatcaggggttgcaggcgttcccgctccttctgcctgttgccttgttgctgcaggctgaagatgcggctgttgacgacctccacaagcagtttgagattgtcccgccaacgctggtaacgcgtctggtcatggacaggcatattgcgcacaagcacggaaaccgattctgtgttgaacagcgaacggtggccgaaatcgatgattttgccattatcataaaggctctccatcatctcctggtccaacatgccgacttcacccgcatgggaaaagtagtgtccgctctcaaccagcctcactatcaccctcaaaccgaaacgatcaaaggtctccagcaagccctcacccagggtacgcaaatcatcgcaatcgaggctgttatcgataaaatcggcgagtaggttcagttcgatacaggctgccagagaagcctccatctcctcctgggcaaggagggcgcgctcccgggccgcttccagatcgtgacggttattgagggcaatacgaatcttcgccagcagttcatccacatcataaggcttggtgacataatcatcagctccggcctgatagccggcaaggcgttcgctgaggcgggacaaggccgacacgaagactatggggatcatggatgtggcgggatccgccttgatccggcggcacacagtcagaccatccatcaacggcatatccacatccaacaggataagatcgggtgtgctttgcgccacctgttcaagacaagcctggccattggccgccaaagagacctgatagctatagcttaatatctgatccaggcttcgcagattctccggttgatcatcgaccaccaggatatgctgtgctgaagcctctaccggtttggttgacatcaccctcctccatgtacggactcccgctattattgcaagaattccaattacatgtcctgttgtttactgatgaaatatgcattcccatggccggtttccacatcttgtaacaattcgattgccaaccccggcacgccggcaccgcggctatcatcaagaagctggaccctaagcaagaattcaccctcacttatgcccccggattcccttttggtggccgaaaagccgcccgccgaatggctctatccacactctctccgatctggtattgttgactgaactaccctgtttttcaacgcttatgcgggtgataacggttcatcccttatggacgaacatgcaatggttaaaaatgtcactttcacggatgccagggatggtgtggctgactgtttgaagtgctccctgcgcgagtctgtgctgtttgccaatctggaagagaaggatttcgagaagttacacgatcctatcgatcaatataccctaccggttggctcaacactctaccgcgcaggtgataagggcgaacgtatgtacacggtacgttcgggggtcctgaagcttgtacagtacctgcctgacggcagccagcggattgtccgcctgatccgatccaccgatattacgggattggagtgcatcgtaggcgaaacttatcagcatgacgcggttgtacttcatgagaccgaggtctgtgccctgccggtgcgtgtggtggagagcctgagcaaggagaatcccgccctccaccgggaactgctcaatcgctggcagcgcgccctgaaggaggccgatgcctggttgaccgaactctccacagggtccgctaaacagcgggtggcccgtctgctgttgcgcctcgtcaaggatacgcagatgagcgaatgcaacctgtttgcccgggaagacatgggcgccatgctgggtatcaccaccgagacggccagtcgtacgatcgctgaattcaagcgccagagtctgctggtcgaaaccaactccaaccatttcctcctggatatcccgaatctgcatagaatcgcagaagattgacctttttcaatgcctgcagcaatccgctatcttattctgctctcctgactcatcaggtaagggagaggtaagttgaaacaggtcgtcaaggagatcgggtttccgatcttcagcattgaaatggacttttcggaatgcagattcgacacaaccgaagagattgtcgcctatcttgtggaacaggtgaagtcacataaagctgcacgctatatcacgacattcgaccacctgaaacacacctcggaactagcggaaggcattgtcgctgagcatatcgtcgccgcatataatattgtcttctgtttcggcttcagcctgcaggatgccgagcagttggccacacggccccgctcgctcggtgtctgtgaaacggacaaccgtgtcacactttcgtttatggaagcccccatgccggttgcaaatgctctcatggaacagtggacgagatccctgctgagcgatgagcaccagtcctctcagcatgccacatcacaaggtcatcaggaagatgtgcaattgcactcttaactatcgacgaccatagccc

SEQ ID NO: 3648 - DNA, 15256 bp, synthetic construct
  misc_feature 1..15256: note = Synthetic
  source 1..15256: mol_type = other DNA
cagaccgcgggacggtgcgaaggaggctgtgtgggcgtcatgggcggtagggcgccaaggcgggcggcatcgataaaaggggctctattgtgccgcatcccgatgggaattcgccggcttgtgcccaacggcgcaccgcaaactgcgccgggaggcgccgtcaggcgcggcggatcggtgggtgtcgggcggtatttttggcgagcagcttccacagcacgccaagggggccattgccctgggagaccggtttgcgcggtagggtcaggaggtcgtcggccggcgtggcgacggcacgcaggcaggtggtgccggtgacgtaaccggcttcggctgcggcctcgacggcgcggatgtcgtggctgccgtaggggtagcagaagtgatcgaccggcgtgccgagaatgtcttcgagcatttttttgctgatcgtcatttcgtcggcgatttgcggcgtttcggtttgggccagacggggatgactgacggtgtgcgagccgacggtaaagcccatcgactgcacttcgcgcaactgggctgcggtcatcagaggagcgggttcgaggccttcggggatgacccactcgttggttttgccgagcaggccggcgacggcgtagacggtggccggatagttgtgagcgaggagaaccggggcgacgtgttcaaggaaatccagatagccgtcgtcgaaggtgagtacgacggggcgaggcggtagcggtttttgtccgcgcaggccggcgacggcttcgtcgaggccgatgaccgaatagccgaatcgcttcagcatggccatttgggccttgaagcagggaaggtggcaatactggccgcgatggctcggcatccggtgcgggaaatggcctacccggtggtacatcaggatgtggattcgaatcatcggttcgggggggaatctcgcctggcgggccatgatgccagatttatacgctgggagcgttgtcaggaagagtgaaaggccgcgtttcgaagcggtcgggttcttacagccagcgatatgccagccacgccaagccggccagaactgcggcgccgatggtggcattgcgggcttttttcatggtgcgctgaagcttgacgcgctgtcggctggcctggaagtgctcgacgaccggggtttccgtgccgcggtcgaagattttgacgtagctctcgggcagggggccgattttcaggtcggtgtgcttgtcgatggctgtagtgaaactgtcttggtccaccccgagaaccatgccgtcctgggcgtcgatccagtcctgcacgaaggtgtgcactgcgggcgtgttgcgcagatagagggtgccggtgaggtaacggtgggacagcccggccgcggcaggtgcgctgaatacgccgatatcggcagtgaagtcgaagaacagtttgaggggcgagcggaccacgcaatcggcatcgagatagacgatgtcgcggcccggaaagcggcgcaggcattcgagcaggaattccggcttgatccgcgtgttggcctcccagtatccgcggctcgggtagtgtttctggaaatagggcgtgccggtctgctccagcgagctgcgcaactgggccgcttcggctgcgtagccgtcggtgaaaaagccgcaggtaaggaaaggcgtgccgggcacgtcgttcaggatttcgccctgggcgctggttttcattggtgggctttcgtggcggggtggagcgtggcgaaggagttggcaattattttgcacgattcgccgcggcttgtcggccttgccggttcaggcgtatggcggttgcgatggggtgccgccgagactgcgctggctcagcagcagggccgcgaagagcacgaacagtaggctggtgttggagcgccacagatagtcttcgaaaaggctgatgaagccgatgaagaccgccaagccgacgcgcaactgggccagggcgtcctgccggcggcgccacaggatcggcggaaagtaggcgagcaggaggattgctccgccgagcacgccggttgtggtgagaacgaagaggtattggttgtgtggattgttcgtcgtcatccagtccggagaatgacgtttgttgatctgtgcgtattcctgttcgaaatcgccggcgccgacaccgaagagcgggtgctcggcgaacaggcgcagggtgttggcgtagaaggtgaagcgctggccggtggaggtggcgatgtttttctcgctctgggatgtttcgcggatggtttcgtcgacccgtgcccgcaggtagtcgttgccggtgtagccgagggcggcgatgccgccgaccagggcgattgaaaccagggccgccgcgaccgggcgttttgcgaggcgctggaaggccaggatgacgagcagcacgaggaaggccagctggccggcccgtccgcccgagaacaccaggttgccgagcgttgcaagggtgaggaggaggtagccgatgcggcggccgagtgtgccggacagggcttgccgtgccgccagatagccggcccaggcaaggattggcgcgtagaggatgtggtcgacaaagggtgcagtgtcttccagatccttgcggacccggatgccccgcggccagtcggggaagtgcagcatctgcagccagttgtagtaggcgagggcctcgctcatcgcgcagccggcgaggaagacggcaatgcagcgcggcgccagctcgcgtcgcgcaacggtcaagtagagcggcgagaggaggaagaagccgtagcgtcctgccattttcaggccgctttgagtgtcttcggtccatagcagcgagaacgggacgatccagaagaaggcctggaaaatccagaacagcggatcgccccgcagttgagtccatttggcggccaagtcgccttccagcagcgtcacgacaaggatcaggccggtcagcgtgtaggcgggcgcgacgtgcccaggcagaaaaaagaacagactcgcgaagagggttgcgttgatggacggcagcgcggcacgcaggcgtacaagcagcgacatcgtcatggctgtgtcggggcgaggtggatcatcgggcgacggtttggctgtcgcgggcattgtgcagtcgggacttgagtcgtagcgccatcaggtaaaccgtgatcttccgtctttgggcttcggcgacgcgggtcaggtggcgacgcaggctccagggcgtggtgctgccgaagcggctgccgatggtgctggcgatgctggcgtcttcggcgacgaggctgggggaaacgatgggtacgcaaagaccgtgtttccagtaggcgtcgagggcgttgtcgatggggagcttgggcaccgacagcacctgcagcaggtgtcgggcgccctgcaggctgaccatgtagccctgggtgccgctggggttcttgttgggcagcaggaggctgtggccgccggacaggtgggcgatggtgcgtccgcggatcggctgcaaggccgacagccggacggcgtcgacgggcagtttgagggaggcgatttcctcggccacggtcatcatcgccgggtcgcagatcacgtcatcctcaaggacgatggcgtgttcgagctggcgttcgacgacgatctgccagaagcggatgtggctcaggtagcagccgatctcgccggccgagaggccgggctcggcatcggggccgagggtcgagcgttcgatcttggcaccttcgacggccggcaggatctcggcttcgaggccgagttcgtccaggtgccgcaggatggtcgcgcggcgctcggtggcgcgcgccatgttgatgacaaagattttcatgggcgttttttcggtaggggaacggtgaccgccgttccggttcaatcctcgcagtgttggcgatgccccatcagtttcatgaacctgcgtttgtgcttctcgacgatctgggcggcgagtcgtcgcagggctgccagcgggcctgggcggacgtggatgccgataagccggtgggtgtggtagtcgcggggcagggcgtcgaggatggtcttcagttccgcgccgggatcgatgccgtcggcggcgagtttgcggtagaacgcgccggaggtttggatcggcttcgtgtggcggattaccgcgctgtcgatgatgccgacccggccgccgttggcgcgggcaagatggctgtaggcgtggtcggtgccccaggtgctgtaggtgatcgccagcgaatcgagatgatgggcgatgaagccggtttcgaagcacgggcacatgacttcgacgaagttggtctcccgccactcggcaagcgggtttcgcagcatgatccggtgtgaccagtagccggcccagctttgggccgggtgggagaccgtcaggccgagacggtcggcgtgctcgaaaaaggccgagatgctgccgccgacgatttcgagatcgtcgtcggcgagcattacgaggcgataggcgctcaggtcgagctggccggactggacgcactcgcggaagtgggtgagcttgttgtagccgccggtggaggtggcgatggcttcgggatggggcgggttcggcgtgtagcagctcaggaacaaatcccagttgcggtccggctcgcgctgcagccattggggatgcagcgcgttggcgccgatgcgcatgaacaccaggtagggccgggttgtgccgttggcacgcggcggcgcggtggaaggcgattcagtcggcgccatgcagggagactccggtgaggcggaaggcgtcgcgcatctggcgtttttcgtccggcgacttgaagcggatgcggtcccatccgaaggcgacgaccggaacctcggccgggctggtctggcgggcgaacagcagggcgctggagcgcacgccgacgatggcgtcgtagggggtgttggcgaggtggacttcgagggcttcgtcgagggtgatgacgctgtagtcgggtcggttcagttcgagttcggggtctttcgggtggcccttgtagaagatccggccgatgccctgggcggcgagccaggcgtggatttcgtcgctcaccgcgtcgcggtcggcggcttgcatgaggccggcgccgaccagcggctggccgatcaccagcgcgcggcgttcgccgctgcgggcgcgctcgggctggccggcggcggggcgcaccagcggcggcagcgtcaccgtcttgtcggccgggtattcgtggggcaggccggggatcacgtagatgcggtcgcagaagggcgcgtcggagccgatgcgatcgcccgagaaacaccagtagtcgagttccggggcaaccagccggcgcagcttgcgggcgtattgggcgaggcgcttggcgaagttcagcggatagcggcggatgctgatgaggccgtcgggcaggatgcgggccttcatctcgcgggcgccgcaggccttgggcagcgcgcgcaggaagtagttgatggcttcggtgtcgaagacggcgctgtggatgtgcagggtgtggcagcggccgaccagcccggccaccagacggatgttgtcgcgctggcggcgcaggcggccgaaggggccgggaaggggttcccagcgcggccacggcatgtaggcggcggcgtcccagtcggcttggcggacgatgggggtgacgccgggcttgtaccacaccagcacctgacgggcgccgggctcgaagtcttcggcgatgcgccgggcggccaggtattgcagcggcgaggcgacgaagtagagggcgacgcgttcgttcatggggcgggcttcagagggccgcggtttcgtggccggcttcgccgctggcgagcaggcgggcgtaggcgccggcggcggcctggagcgattcgtgggtgccgctttcgacgatccgcccgtgctccatgacgacgatcttgtcggcgtcgtggatggtggacaggcggtgggcgatgacgatcacggtgcggttcttgcgcagttcgatcagcgcgtctttgacggcgcgttcggattcgttgtcgagggccgaggtggcttcgtcgaggagcaggatcggcgcgtcgcgcaggaaggcgcgggcgatggcgatgcgctggcgctggccgcccgagagctggctgccgttggcgccgacgcgggtggcgaggccgtcgggcagtttgtcgatgaactccatcgcatgggcggcgcgggcggcggcgacgatgtcggcctcgctcacgtcgggctggccataggcgatgttggcggcgatggtgtcgtcgaacagcacgacttgctggccgacccagccgagctgctggcgcaggtgggccagcggcaggctggccagcggcgtgccgtcgagcaggatgcggccttggtccgcgtcgtagaagcgtgcgatcaggttgatcagggtgctcttgccgctgcccgaggcgccgaccagggcaaccgtctggccgggatgcacgtcgaggctgaagtgctgcagggcgagttcggcctgaccgggatagcggaaactcacgtcgtcgaagcgcagttcgcccttggcgcgggggaggctgccgctggcggtgtccacttcgggcggcgtgtcgaggaggtcgaagatgctctgggcgccggccaggccgcgctggatcaccgcgttgatgttggtcaggcggcggatcggctcgaagagcatcgacatggcggtgacgaaggcgacgaattcgccggggctgagcttgtcttcggccgacagcgagctggccgtccagatcaccgtggccaccgccgccgcggccagcacctgcaccaggggcacgttgatggcggagacgcgcacggtgcgcatggtctgctggcgcagttgttcggaaacgtcggcaaagcgccggtcttcgtggtcgtgggtgccgaagagcttgatctcgcgcacgccgctgagggtttcttcgaccatgccggtcatgcggccggtggtttcctgcatttcgcggttggagccgcgcagtttgcggctggcgacgcggatcagccaggcgacgaccggggcgatggcgacgatgaccagggtcagctcccaggcggtatagatcaggtagccggtgaggccgatgatgaccagggtgtcgcggatgacgatgatccaggcattggacagcgccgcgcccacctgcgggatgtcgtagaggatgcgcgacagcatgcgcccgccggtttcggcctgatgcaccggaatcggcagatgcatctggtggcggaacacctgctggcgcagatcggtgatggccttgttggcgatccactggctcgacacgctggctacgtattcggcgatgcccttgccgagaaaggccagcatcaggaacagcggcacctgccattgggcgacgtggtttttcttgatcaggctttcgtccaccagcggcttgagcaggctgggcagcaccggttcgagggcggccgcggcaatcatcgccaggatcgacagggccaccaccttgagataagggcgcgccgagccgagcaggcggcggtagagctggaaggagtcgttcattcccggtgcaggaccttgtccacgatcaggctggcccagccctcctcgcggaagcgggagtggagatcgagccggttgtattcggtgtccacccattccaggaagccgatcggcgactgggcgttgcgggcgacgtaggtggcgaagaagaagtccagcacgccggtcttggcgcgcttgaagtggccgtatttccagcccagctcgctcatggcgtcctcgaccctgtggcccaggtggaggatgcggtaaagcgcggcgccgagcccggcccggtcggcgccggatttgcagtggagcagcgccggatattcgagccgcttgaacaactcgtccatggcgtggacttcctcgatctcgggcggcgtgcgcgagtagagcttgatgtcgtgcagcaccagaccgagtttgtcgcaggcttccttttccagcgcatacgagccgtagccgtgggcgccgcgcaggttgatgacgctacgcagcgcgtactttttttggtacttggcgagttgggccgggctgggctggctggagcggtacatgccgccgccgagatcgtagaagttgttgtagatggcccggatcgcgccgtggtccaccagatgcatgtcgaaccaggcgcgcacgcggccggtggtggtggagatgtccatggtcatcggttcagtccgtcagcagggcggatttcaacccgaccggcaggctggcggccgtggcggcatcgcacagcagcgcgtcggggcggacttgcagcagcagggtggcacaggtggcgggatcggcctgcacaacccagtcgaccgggcgcaatgccgccagcaccgcaacgctgtcggcgtcggtggtggagggttcgaccaccagcagccgctcggccgcttggccggcccgacccaactgggccagcagggctgcgtcgggctggccgagcggccccagcagcaccgccacccgttcgccgacggcgcgggcgcgctggcacgcggcgagcaccacatcgggggacagcaggccgtgggcggcgggcgcgttggcgtccatggcggcgtagagttcgtcgaggctggcggtggcggtgcccagcttgccgaccaccacgccggcggccagattggccagggcggtggcgtcgcgcagggccagaccggcggcgatgccgcagccgagggccgccgagacggtgtcgccggcgccggtcacgtcatagacttccagggcgcgggtgggttgatgttgggccggctggcccttttggagcagggtgacgccggcttcgccgcgggtcacaagcagcgcttcgagctgaagttcggcgcgcagggcttcgcccttggcgaccagcgtcgcttcgtccgggcaggggccgaccaccgcctcgaactcggccagattgggcttgacgatggtggcgccgcggtagcgggcgaagtcggtgcctttggggtcgaccaccaccgggatgttctttttgcgggctgcggcgatcagttccgccacgccggacaaggtgcccttggcgtagtcggacaacaccagcacatccacgccgtccaggtgggcggccagcgcagcgccgacacgggccgcgtggcgggcgtcgaagcgctcctcgaaatcgaggcggatcaactgctgatggcgggaaatcacgcgcagcttggtgatcgtcggcgcgtccgggagccgttcgaaggcgcacgcaacgccttgggcaacgaggctttcttccagcagccggccggcttcgtcgtcgccgatcagcccgatgacccgtgccttggcgcccagcgaggcggcgttgagagccacgttgccggctccgccagcgcgcacttcgtcgttcttcacctgcaccaccggcaccggcgcttccggcgaaatgcgcgccgtcgcgccgtgccagtatcgatcgagcatcacgtcgccgcacacgagcacgcggcaggcggaaaaatccggcagggaaaaatgcatggacgcagacaggccgccgcgagacggcacaccgatggaagcaaaggccggattatcgcatcaaggggggaatggcgggagaggacgggggagcccgagcggacgccaaggtaaaagggccgactttcgccggcccttctcagtttggtgcatttactcccaacaagggattctgcttgttagtagcaaagcgcaattcccgatttgctggaactgagtttcaacaatagttcagtttggaagcggccgcaagttttaaaaaatatatgagatggttgtagcggcggaatcgtgtgctatagttgagccgtggttgacgtacaactttcttttttcgcaccttttgcggatgaggtggttgtgttgtagtcagagcgcaattcccgctattgttggatcgcagcccggatcccgccaactcggaaagccactgtagcgaggtccaagccgctactaggggttggcgtgtggatacaatcaactggactccaaatccagttgctgatcagctagcatggtcaggttgtatccacacggcatccctataccatgcgctaccgtctcgctcttgacctcggaaccaactccatcggctgggcggtcgttctgctcgatgagcagaacccgccccagcctgtccgcttgattcgccttggttcccgaatctactccgatggccggaatcccaaggatggctcctccttggcggccgagcgtcgtgggccgcgtcagatgcggcggcggcgggatcgttatctcaagcgccgggaccatttcatgttggccctgatcgagtgcggcctgatgccgccgttcgaagccgcgcggaagtcgctggtgccgtccaacccttaccttcttcggcgtgatggtctcgacaaggccttgcaaccttacgagctggggcgcgcgctctttcatctcaaccagcgccgcggcttcaagagcaaccgaaagaccgaccgctcggcgggcaaggagtccggcaagatcaagctggccatcgcggcgtttcgcgaggcgatgggcgacgcgcgcacggtgggcgaagcgctggcgcggcggctggatgctggcaagtcggtccgggcgcgcctgatcggaaagggtaaggaagagcactatgaactgtacgtggatcgccaatggatcgaggatgagttcgatgccttgtgggtcagtcagcggcgctttcatccggagttgctcaccgacagcgctcgggatcgtctgaaaggcatcctgacccaccagcgtccgctgagaccggtggtggccgggaagtgttttctggagcccgatgagcgcagagcgccggctgctttgccgtcggcacaactatttcggctctaccaggaggtgaatcacctgcgcgtcgagacgctcgtcgatagacgtgagcgtccgttgaaacgggacgaacgggattcgttggttaaaacgctggccgagagtccgaagaagggctttgaaattctccgcaaaaccttgttcggcgccaaccgggaggctttccgattcacgctggagtcggagaaccgcaaggaactcaagggttgcgatacggcttgcaagctggcgcgcaaggaggccttcggggcgcagtggcatcgcttgtccctcgaagagcaggacgaactggttttgctgctgctcgattccgagaatgaagccgcgttgcagaaggcattgatggagcgctatggcctcggcgaagcccaggcccggcatgtggtcggcatcaatctggaggagggtttcttccgtttcagcctgaaggcgatccgcaaggtgctgccgccgttacgggcgctctggaacgacgcggaaaatgcgccgctcacctacgacaaggcgatcattgccgcgggctacgcggcccatacgatacagtcgcccgacgttctgctttccgcgctgccgtattacggcgagagtctctggcgttacacccaggatgcgcccacggcccgcaatcccgacgagcgcaagtggggccggatcgccaatccgtcggtgcacatcggcctgaaccagttgcgcaagctggtgaatgccttgatcgagaaatatggtccgccgagtcaggtggtggtggagttggcccgtgagttgaaagccgggctggaggaaaaaaagcgcatccgccaggcccaagccgaaaacaccgagcggaaccgcaaagtccgcgcccgccttgaagaactcgggcagcgggataacgccgaaaaccggttgcgcctgaagttgttcgaggaactcgaaaagcccggttcgcggtgcatctacagcggaaagcagatttccttaggacgtctgttctcgaacgattgccagatcgaccacatcctgccgttctccaagaccctcgacgacggtttcaacaacaagctgctggtccatcgggacgccaacaaatataagagcaaccgcacgccctttgaggccttcggaaaatcgctcgatggatacgactgggagcagatcgttgatcgcgccagccgcttgcccaaggacaagcgcaagcgcttcgagccagacgcttacgagtcctggttgcggcacgaggcggattttctcgcgcgccagctgaccgacaccgcctatctcgcccgcgtcgccaagcaatacctggcatcgatttgcagcgggaagcaggtttatgtttcgccgggccgcctgacctcgatgctgcgcggcaagtgggggctggaccggattcttgccccttacgacgaaaacggtgaactgcgctcgatcaagaaccgcaacgaccatcgccaccatgccatcgacgccgccgtgattggtgtgaccgaccgaagtctcctccagcgggtcgcaacccttgccgggcgggcgagggaagtcgataccgagcggctcctggcgaacatgccgtggccatgggactcctaccggctcgaagtggaggaggcgatccggcgctgcgtcgtttcccacaagcccgatcacggtccggaggccgccctgcacaacgacaccgcctacggtatcgatgaggggccgcgagaagacggaaagtatctcgttcatcaccgggttgcgctcaccgcgctcaagccaggcgacgaatctcgcatccgctgtgaaacgcaactccacgaggcaattagcgtcgcgctcggccaaaaggagccgaaggcacgggaggcttccctcgatgccctctccgcccgttacggccagcgcaaggttcgctatgtcgagccaatgtcggtcgtgacgatccgtccgcgcggaaaagacggccagagccttcccgattcttttccttacaaggcctacaagggcgattcgaattactgctatgagttgtttgtaaacgagcggggacgctgggatggcgaactgatcaccaccttccgcgccaaccagaaagcctatcggaagttctcggagaacaagcttcgcttccgtcgcgaaacagccgctggacgtcctctgctgatgcggttgtgcgtgaatgacatggtggcactggaagagggcggtgtccggcggctgatgcgtgtggcccagctttcggaaggaaaaatcgttctggccgaacacttcgaaggtggcccgctgagagatcgggacaggagcgcaggtgatccgttcaagtacatgaccaaatcaccaggcgtgctccgggagcttaaggcgagacgcgtcttcgtcacccttctcgggcaagttctcgaccccggcttcaggggttgattcggcaggccgcgagacgaagatgatcggccgtgtcatcgatatcagtcaggacaaacgccatttgtcccttgagcgagggtttttcgtcgtttcgtcggggcgggatgagttggggcgcgtgccgttggacgatattgcggcggtgatcgtgagtggccatggcatcacccattcgtccaacctgctggcggctctggccgaacgcggtgtgccgttcgtgctttgcgccagcaaccatcatccggtaggcatgttgtggtcgaccgcaggcaattaccgccagtctggccgtatggatgctcaactcgccgcccccaagccgctccagaaaagactttggcagcaggtggtgaaaagcaagttgcgtatgcaggcgagcgtcctcgaatgcgtgagtgcgccgacggccctgctgttgcgcctggcggacaaggttcgttccggcgatccggacaacattgaagcccagggagcacgggcttattggcagctattgttcggttcagacttcaggcgcgaccgcgaagcgcccggtgcaaatgcgctcctaaattacggctatgccgtgctgcgtgccgcaacggcgcgggccgtcatggctgcaggcctccatcccggccttggcttgcaccaccggaatgcgctcaaccccatgcgtctcgtcgatgatttgatggaaccgtatcgaccgctgatcgatcttcgtgtgcacgggatgagcgctgcgggtatccaagttcttgagcccgcgaacaagaagatgctggccgatgtgctttatcacgatcttccgtccccggcaggcgttacccctgttatggcatcgatacatcgccttgctgtatcgcttgtacaaacttacgaaggggatcaaaagcaactcgatctaccctgcgtcgccattgagcccttgtggctgcaagacttggcgcgatcgctgtgactgacctctcgtcttaccgcctaatgtggatcatgaccttgttcgacctgccggtcggaaccaagaaagaacgaaaggccgccaccgatttcagaaaatttcttctggatcaaggttttgagatggcgcagttttcggtttacatgcgtttctgctccggcaaggagcaggcggaaacacactgcaagcgcataaaggcagcgctgccggacggtggtaaggtcgacatcctgatgatcactgacaagcaatacgagaacatcatcagttttgccggtcgtgtccgtcaggcgcgcaaaaatccagaccagttcacccttttttgaccccgtttccccatgctcccactcggccaaaaaccaaacaaccccatgaaaatcatggggttgtttgaccggtagtgtagcaaatcgggaattgcgctctggctacaactacctcgaagtcaagctgtacgcgaacaccagtgtagcaaatcgggaattgcgctctggctacaacgaccagtgcgccgagcggcttgccgacgccagtgtagcaaatcgggaattgcgctctggctacaactattcgccgttgctgcaaatggcaccagcgagtgtagcaaatcgggaattgcgctctggctacaaccgcgccaagaagttgtttgatcttggtttgagtgtagcaaatcgggaattgcgctctggctacaacccgacgtcgaggtcatcgacgtcgagctctagtgtagcaaatcgggaattgcgctctggctacaactgctgtctctacatagcggcagcggggttcagtgtagcaaatcgggaattgcgctctggctacaacggtgtggttggcgtagcgggtggcggagtcagtgtagcaaatcgggaattgcgctctggctacaactgggagacggggtcgagggtggccaggaggagtgtagcaaatcgggaattgcgctctggctacaacaattactacgtgttcccccagggggagtacagtgtagcaaatcgggaattgcgctctggctacaacatactgtccgtcgtagtcgccggggatcaagtgtagcaaatcgggaattgcgctctggctacaacggacggatgttgcgggatgctgtgcttggcagtgta

SEQ ID NO: 3649 - DNA, 13358 bp, synthetic construct
  source 1..13358: mol_type = other DNA
  misc_feature 1..13358: note = Synthetic
gcgtgatttagcccgtgacacactcgggctaacaaacagcgacaaggcacagtctggcgttggacaaatcaccacgttcaaccaactcgggttcaaggggatctgattcgccctgggttttgttccgatccatgacctgagaggatctgaacataaccagcaaatacacgcctgatatgcgagctaaggcagtgcgtctggctgtggaaggcatcagcaaagaaaaatgcagcatcgatgctgcctgtagggaggccccccccagattggggtttcacccccacacgctgcgtaactagctcaaagcatccagagcaacacatcagcccaccaaagagatgagctgttacgagttggctgtcgaagtgaaggaactacgtgccaaactgtctgaaatgcagcgagccaacgagattttgaaagcggcatcggcttttttcctagcagaactctcccgtcccggcccgcgatgatccgctttatcgatgaacacaaggatcgttacggggtcgagttgatttgccggacactacgtgaacacctcaaaggcaggttcatcacctcgcgtgcttaccggtacgccaagaccaggccgcgtagcgcccgcactattcgtgatgatcaagcaggtgcatgaggacaactacagcgtctacggcgcggtcaaacttacccaagccctacgtcgtgaaggctggcacctgggaagtgaccaggtggcgcgtttgatgaagatcgctggtattcgtggggtgatccgtggtcggggcgtgaaaaccaccctctctcgcggcggcaaggatgatcgcccggatctagtcaagcgtcagttccgtgctgatggccctaaccagttgtgggtggctgacattacctatgtgcgtgtacgcacggggtttgtgtacacggctttcgtcacggacgtgtttagtcgcaaaatcgtggggtgggctgtgcgtacctccatgaaaacagaggctttgcctctagaggcgcttaatcatgccttagcgtgtgctactggggacatgagccagttggtgcatcacagtgatcgtggcagccagtacgtatcccatctctacactgagcatctgcgacagcagggaatcaaactttctgttgggacaacaggtgattcttacgataacgccatggctgagagtgtcaatggcctatacaagaccgagttgatttattcgcggtagtggaacagtgcttttgaggtggagtatgagacgatgagctgggttcattggtggaacactaagcgtcttcacggtgaacttggtttatgtacaccccaggaggtggaagaggagtattatgccgatgacaccgcccgggtgttagcgacccaatgacggaacaaaacccagggcgaatcagactggtgttggatttcaggtctgtagcccctcgggttacaccgccttgccaagttcgtcgatgaagtccagttggatttcagatctgtagcccctcgggttacaccatcaccgtcaggaggctcaagtgagggagttggatttcagatctgtagcccctcgggttacacccctccggcgtgtaaataacaccggataggttggatttcaggtctgtagcccctcgggttacaccaggtggcaggcccaccaggtagaacggagttggatttcaggtctgtagcccctcgggttacaccaggccatagcgcggcacgttcaacgtcagttggatttcaggtctgtagcccctcgggttacaccgtgaacactgctaacagtggacacgtgcgttggatttcaggtctgtagcccctcgggttacacctgagatccaataacctctagcaatagagggacattccccatctcactgtgggtgggagcattacccccgctaggcatcgacctagtgggggtaagcaaattcttggagcgcttttgctgcatgtttcaataatattcatcggccaacacactccgaccatgagtgaattgtcagttacttcagagaggacaaccaccgtggaatacgtaatcggcattgacgcaggaatccgatcactgggcttttcagcagtccagtacgcagacggtaagcctgtcaacattttggaagcttacactcaactccacgacgggggagtgtcaccgcgcgatgaaaaaacaaaggtcagccgccgccacaacaacggcctggcacgccgtgcgcgtaacgctaaaaagactcgtaagcaacgtctcaaggcactagataatcttcttgaccgcctgggtttgcctgaaaccgatattccaggagaccagttctggtctgttcgtgcacaactcatggaacgctacattgacaacgacacagagcgtctaggaaagatccgcgccgttgttcgtcacatggcgcgccaccgtggctggcgcaactcatatcagaatgtgcagtccattgatccgcttgcacagacacccgtctctacggcgcttgctgacaccatctaccgttcaatcagccagtatgctgcacaaaacggcggcattcgtggaagccgcaactgccagaatgtgccgttcaactccatgcgtcaaagcgacaacctggcagagttgaacacaatctttgccacacaacactttgatcaagacagtgcacgtgagattgtgcaggctgtgttcttccaaaagagtccacgtggctctcatgttgaaaacgtcggctacgatcaactgcccggaatgaccgataagccccgtgcaagcaaggcaagtttggctttccaggagtttcgtatcctgcacacgttaagcaacctgaaagtgaaagacgctcacgacgagcgttctttgactctcgatgagattgagaacgtgtctgactttcttttctacgaggctgatgagaacgtctcatggtctgacgttgaagccgtcattgggctaggcgagaacgaatccttgaccggctactctttcaagcgcggtttttctcgccctccgttcaacaccacgttcaaagaactgcgtcgcaatgacagcattttcgctggacaagatgaagacgttcttgaagcggttgttgatttgctcattgatcagcgcagcagtgacctggccgaagattttcttagccgtttagacgacagcgaactttcttcattagattcgttgcgctttgagattggtcgcagtccatacagtgcggactcgctcaacctcattaacgagggtctaatgagtggctacactttgccctacactctctaccgtttctttggcgtagatcccacgtggaagccgcgccccagccggttagatgaaaagaccggcaacctggctgtagaccgcgtattgtcttatgtccagtctttcgttgaccactgcacagacacctacggtcagccaagcaaggtggttattgaaagcgtcaaagactcgttcacctctgttgcgaaagcgcaagagaaggcaagcaaggccaaccggcgcttccagatccgtcagaacaaccatgagcgcttcacagcggaaactggtcagcagccttctgtgcgtgcaatgaaacggtgggaggcagtcaagcgtcaaaagaatgagtgtgtctactgtggcgcgttcattgactttcactcctgccagcgcgaccacatcattccccaggcttctgacgcatcaaactctgtggaagaaaacctggtggccgtgtgcgccccatgcaaccaagaaaagagcaacactcctttcgctgtgtgggccaaaaccactgatcgcaaaggtgtgagcgtcaaggctgctatcaaacgggcgaaaaagtggaagtacgataagagcgttgaaacttttgattcgttcattgcagtgcgtagcggtgttattcgtcggctctcgctgacctcgtatgctgaggttgatagccgccaaatggctccggttgcacggatggcagttgagatgaaaacccgtctcatggactatctgccggatactgaagtggttgcatacagtggtgcgctcactcacgccgcatggatcgaaggtggtttctcagagaagaattggcttcatggtggtccaggaaagcagcgcggagacaaccgtcaccacgcacttgatgccataatttttacgctcatgaacgacgacattgctcgcgtgttttccacccaactcaaatggtatatcaactcacgtaacaccgacattggccagatgaagttgagcaaaaaacaacttcaagcaatcgaatcgttcaaggagcgtagtgctcacatgatcacgctgattgatgaaaacatcggctcgattgatgtacgcacgccggttcgcaaaaagttgtactcaggcagcgttcatgaagacacaatcaagccttttgaccgtagtctcaaactgactgacaaactttctgccagcgacattaagcgcgctgcaacaccgcagctctatgatttcttgacctcgtttgcctcatactcgcccacgcgtggcttgcctgctgatgctaaccgtcgagcaaaaaagcctgttgctggcctacacagtgacggcacacttgatctgtttggttcatcgagcgcatgtgtggccgtgcgcgggggatgggcactcattggtgcaggcgtgcaccatgtgcgcattttcaagcacaaggaccgctacattttccagcgcgtgttcaccagcgatcttgctggcaaaaagggttcgctgttctatgcgaagttgcccaagtcatctatgaccatgcgccagttatccacaaaagacgctctggccattcattctggcgacgctaagcgcattggcgcgctccaactcggttcaaaggcacaagtcaatggacggacatggatcgtgcgcgcatgcaatagcggcaaactggttcttgaaaacccctatgataagagcgagacaactatcgtgcgttgcccgtcagtgacagacttggctctggctgttggattttaggtctgtagcccctcgggttacacctacaccatcgcttattgccgcacagattgttggatttcagctctgtagcccctcgggttacaccccgggcaaaaaatatagagtgtgtgattgttggatttcagctctgtagcccctcgggttacaccccgtgatcgatgacctcgtgcccgtgctgttggatttcagctctgtagcccctcgggttacaccatggccggatatgttcaccaccagcgcggttggatttcagctctgtagcccctcgggttacacctgagatccaacaacctctagcaatagagggacattccccatctcactgtgggtgggagcattacccccgctaggcatcgacctagtgggggtaagcaaattcttagatatttggtcggctgcagaaaatgtttactctcaaaacttttcccgatcataattaaggcaggtgtcagcgcaatattaataagactttctcgcaagaaataacaacgagaaaattgatcgcactaaaaatgcacattcttatatatgtagacataataaacgactctgaagtatatggggaatgtatttaaatagttgaaactttttagtaaaactgtaataaataaatgcgttgtaaacacgagagcacgggccgtcgaagagacggcccgtgctctcacctctagtggagatgtcacttagcggaagtgatggtgacttcagaaacctgagacagcagagaatcgactgctgaggaaggaactgcgtctaaatcatccatgaactttttggtcttgctcatagacttcgtgttacccattattacacctcttaacaaaaaattgagacaaataagaaacttacgccttcattccttcagtgaggtttcagacctagaataaaaagagttcgggattgttacaactaatccaataacagtccaaagaccaactgcaatgagcaaagaaactgttggattaaatgccaaatcagtgaaatatccaacttgtaaaccaattagagtgcccactgctccaaacgaatatgaccaactcatgattcgagcaaattgcttacctttaaatactacttgtcgataagtctcaagtacgacaactcgaatacggttaagtacaacgatgataaaaataaatgacaaaatggcaaacgagttgatagtagcaaaatgagtatatgcaacaaaagacatgatcagtgcggctgcgccaaaagccgtcaatcgaaggacaaactcaacatttgttttctttttaacccatgacgctagtagcggaccgacagcagcggcaacaccaaaaacgactaatactacacccatcccagaatatgcagatgagacaaagttagagtcaccaatggtacgagcagcccataaaaggaataattcgccagtcaatgctgaagctactctgattaacaatgacaataagggggaagcgggtccagagagaaaaagatccttaaaaaaccgtgcgacaggcatagactcgcccgtagcttgccagtcttcatcatctgactcttccaagggaggtgctgcccactcatgacgtgcgtatagccgaaatgctgcaccacctaatgacagaaatatgtttgctactaaaagagtcacgattgacattgacgcgaaatatgaacctaaaggtccaccaaccacgaaacccaaagttgcaacggcggaatataaaaatgcgttgaacccaagagcaatatcttcatctacgtcagcaagaacagccccatagaactcatcggcgatgtcacttattggtgctaagagagaatcaactagcacgaatagagttaagacaattgctgacggaagagtgttagtaacgattagaatcacagcaacaaaactcaatagagtttcggctaaatccactccgatcaatgcactgtccgggctgtagcgtgaaaccactcgtgcgtacagtggaaagaaaaacacagcaatttgttcaagcgtcttaattgcaacaaggaaacccactgcaacaagtccggcggcagtcgttgcatcaaaacctgcttcgacaactgaattaccaaaagcactggcaataagaccagcaatcatcaaccttcttacgcgaataagttgattcttttttttcaaagataaagaagtcattctattcctcaagtaaaaaccggatattttcttcatttcgcaatcttcctaaaagaagaattggttgattgaaaatgagattattcaaagtttcaagacctagaactacaacatgggatacaacaacactccctgcggcaatgtcgtcgcgccaaatgcacctagccattggcgaatacccacgatctcgtaattgcttaacggaacttatttctattgagtcttcaatagagataatagatgcttcagttcgcggagatatatcgaagaatcttgatgccaactttgccatatttggatacttctctaagttatccggaaaatcagcgccattgtccgcccaggctgacccgatgctaataggatagtggatttgctgtaattcggtagtagccctttgaatcgcagttttcaacgaagaagagcacccaaagcccaactcagcttctccattaggctctctctgatgccgcgcacaccacgaaagatgcttcagacgcgagtaaaaaagaactccgtttttcccttttcctactgtcaattcatcgaataactgacgttcatcggttccttcttcgggtaagaaaatcttccaagattttctccccatattcatatcaagaagaaattgactttcgtcatcacgttcaatgacttcattaatcgcatgaagtgtcgtatctgaccagcacgcaccagatgcagtgcctgtgtttgtgacatagccactaagcgccaatagattccccatatcggaggatagttccgtactcacatcacaagtaatacggggatacaaaacaagtttatccagatttaacgaggagtcatcattaagttcatagaaaactgttagtggctgtgttgtaccgttcgataattgtttaactagcgcgtatccaaggtctaacaattcgattttcatcattatcgacaaaaacatagtcgtgattgtcgggtttttgccctggaagtttttgtgaaattgccgcatgttcaatagcctcaaaaaccgcggaggcaattgaggcatcaccgtatccttttcctgatgcctgagatagtctctttccttcagaatccaccaaggcggaagaaactgtgatcgatctggttgcctcagatgcacaaacaatctcgtaattgatgttcaggttgtgtaaaacagcccaagacactgcaatcttaagtgcatcgcctactccaacagttctttcatctacacgcacaaggtttccaacctcttagaccattaatacgttagcacactaatttgggattagggtaattcgtcgcgaacttccagaaatccaacagtccttaaagatgaatagaattacgagagcgaactgtgaattcgacacacggctcttccctgcgactcagagatgtgcgctgcgcttgcagaatttttctgaccaccaaaccttcaatatttttgttctccgtcgcatttgactgtgcccctcgggttacacctgagatccaataacctctagcaatagaggaacatctccccatctcactgtgagtggcagcattacccccgctaggtatcgatctagtggggggggggtaagcaaattcttgtgacacttttccaactatagataaggcagaagttcagccaaaagtaagaaggttccccatggataacaacagcgaacaagctgagcgtaagcaagaactgggtagcacgatacaggaggcatacgccaatgaaggcgttgagcggaccacgtctgacgacgactttcattcattgatgaaacaagtgcgcctatctcatgccagcagttgaactgcatgactcagacatgcgtgctgcgcttgcatctcattgaaactgagaaactagagcatagaagttccgcaccattagatcaattgatattaaaatgtcgcaacgaggttcttatttctgataatattcaaactccgggaattagataccattacgacgtatataaagaacttgttgctcagttatcttcacaagataaaccaacgtgttcttctcgactccgagctgcggggcaaatgtttctaattcaaactcagaagtaacattcatgcgatcaatatacctacgtttatatacagccactttccttaatatattctctgactcaattgcatcagtggctttacctctagcttttctcgtccaaactggttcggtaagtttggcagccacattaaccgctgcaacatcgctaacacaattacttttatctgttccattgagcgcagtagcagatcgacttcctcgtaaacctctcgttatcactgcatatgccattgaagcgttcagtttactccttctagtcattctgctgtttaatcacttcgcctcttttccgttgattgtgggtttaggaatgttacgaggtgctgtgagccaattgggtatatctgcatctgctggatacatacctcaaatgctcggtcgggaatcaatgcttcattataattcgcgtgttgagactgtagagggggttagtgcgataggtgggccaaccgtcgctggggccttaacatcatttcttggtggcccattaactatgcttgtgccagcatgtctttcagctattaacggatttctatatattttacttccatcggtagacttaccgaaaaatgaaaaacagaatattgagatcaatattgtcagacaattagttttagatcttaaagatggtttcgctttcattatcagcgatcgcgttctaggatccatgatcctcgttcaattcatattaggtttcaccaccactagttatgtcttcggcattattacgtatctaaaaaatggcttagggctaagttctgtgcttactggcgttttcatggccgctagtggagttggtggaattttagcatcactaactttagaaaaaatttttccactttcagaatttaaaaaagttttaatcatttccttgtgcggcgttggtctgattattggccttttcccgtttatgcatatcattatgttagtgcctgtcctgctatttatgcttgatttcttctggacagggctttttatttatgcaggatcgcttgaacaatgccgaactgatgattcgaaactagctcgagttgatgctgtcagttccactgcatttacgctagcggccacgatttccgcttctatcgcagcggccattattccgcgctttggagtttcactttatatgccgctaatcgcatcatcggtactgttacccgtattctccttgttcagaatttacacaaatgagcaagaaacctgcaactaataccgacatttgttaattcaaaagtctttgtgaattaatccaccgttagcatcttttctaaaatgtcaatagttaagtcctcgccgaacggcatagtaacctacaagaattttaagaagcacagcacaatatcgtagtttggagaacaaaagcccgcgacgaatcaactttgcatgagactatctactactagatgtcacaattataccgttttggtataattgtgacatagaaccgaacattaaatatcgagatgttttacgcgaaatcgcgctcgatcagtatagttacgtatcgacgaaggacgctatagttgtgggggttccagccattgagttcccaaagttgacagcccgaggcggattggaaaatgtcgcttacggaatttatcgcgtcactgatattctccccactcagtatgatcaatttgctgaagcactactacgcgcaggtgacggggcatgcttgtatggagaatctgtcttggctctgtattggtttagcagatgtgaaccttcataaaattcatgttgccactcctcgtcgtctgcgtgcgaaaacaccgccattcatggaaatcgttcgtatgaaagccaagccacgaaacaccttctacgagggattagcagcccaaccagttgctgacgcaattcttgcgtgtcggggacgaattgaaacctcacgcttgcatgatgctctcaaaactgcaagaaaacagggtctcgtcaccgcagccgaatatcaatatgttcagaaagaactacgttcgtgaaatatgaaagcatacctccaaatgtgcgttcactagaacagcgtattcggaatttagaaggctctaatggttaagtccaacgtcgtcgtaatgcgatggcattgctcgtggttagccaaatgctccccgaaggtgctatcgagggtggcagcgctacggctctacgctacggtcgcagcacaagattcacccgcgatcttgagacggcgcgagttcaatccttggaaaagtttcgcaatgattttgaagagtcactagcctctggatgggctgattttaccggacgactcatccaaaaaccggcacctaaaccacctgcggttccagccgtatatgtcatgcagccttttgaggtcaaactcgcttactaaggtaaatcatggtgcacagtgatcttcgaacttgaccacaatgaaataggcgatgccgataaaccagaatatcgaatgtcacatgaattggcaggtctctttatcgaactcgggttagaaaaacctcacccagttcctgttatgagaactgatcaccaaattgcacagaaacttcatgcggtctctagtccaggaagtgatcgagcgcacgatctcgtagacctccaactactcgtggccgaagagaaacctgatttttcagaggtagctatagggggtcgcggggtcaaatcccgccagccaacagtgaaagaaaaccgtcgcacaacgcggcggtttttctgtttcttactcgagcgtcatctccttgtatctcccggctcagatcactcacgatgtgagagcggctacaaattgttttgtgggccgtggttgataggcgtggcgcgggtgaagcgttctatagtgaaaccacttgatcctttaagtccgtccagagaggcggggaaggaggcccgaagtggcccattctgtgacaggtggaaagcagattcttggagcagccgagatgacgcgttccctcgttcgaattgctcatgagattctcgagcgtaatgaaggggcccaggacattgtccttctgggcatccccagcgcaggagcaccgcttgctcagcgtttggctgatcttctccttattgcgcagcaagaagatcccactattgataagccggtaaatgttcccactggcaccctggatatcacgatgtaccgtgatgatcttggacgtggccccattcgcgttcctcagcccacagtcattcctgacggcggcctcgagggacgcgttgttgttttagtagacgatgttctctactcaggccgcaccattcgtgcagcccttgatgctattggcgctattggccgtcctcgctctgtgcagttggccgtcttggtagaccgcggtcaccgcgaactgcctatccgtgcagattacgtaggaaagaaccttcctacctcccgtaaggagaccgtgaacgtcgaactcaccgaactcggtgccgacgaagaccgcgtcaccatcgcaccccaagccaactaagcattgagttaaggaacaaacaccatgaagcaccttctgagcgcgaaagacctctcctacgacgaagcaatcatgcttctcgacaccgcagaaaccatggccgctacccagcagcatgctgtgaagaaactgcccactctacgtggcaagactgtggtcaatatgttcttcgaggactccacccgtacccgcctgtccttcgaagctgccgccaagcgcttgagcgctgacgtcatcaacttttcgggcaagggttcctccctgtccaagggtgaatccctcaaggacactgcccagaccctccaggctatgggtgcagacgccgtggtggtgcgtcacagcgcatctggcgccgcacatctgctcgcctacgctggctggattaacgtgccgatccttaacggtggcgacggcacccaccagcaccccacccagactcttctggacgccatgaccttccgccgctggttcgatgctggtgagaacgaaggcaagcccgcgcccaagggcaaggaccttaagggcgccaagttgatcatcgtgggcgacgtgctccactctcgcgtggcacgctccaacgtggacctcatgaccactctcggtgctgaggtcaccctcgttgctcctcccaccctcctgcccgtgggcatggagaactggccctgcaaggttatgtatgacctcgacgaagccatcgcaactatccagcctgacggcatcatgatgctccgcgtgcgaac

SEQ ID NO: 3650 - DNA, 15552 bp, synthetic construct
  source 1..15552: mol_type = other DNA
  misc_feature 1..15552: note = Synthetic
acggtgcgttcgtcgacctcggcggcatcgacggcctgctgcacgtcaccgacatggcgtggcgccgcgtcaaccatccgaccgagatcctcaacatcggccagacggtcaaggtgcagatcatccgcatcaaccaggaaacccaccgcatctcgctcggcatgaagcagctcgagtcggatccgtggggcgacatcggcaccaagttcccgatcggcaagaagatccgcggtacggtcaccaacatcaccgactacggcgcgttcgtcgagctggagccgggcatcgagggcctcatccacgtttcggagatgtcctggacgaagaagaacgtgcaccccggcaagatcctgtcgacctcgcaggaagtcgacgtggtcgtgctcgaggtcgatccggccaagcgccgcatctcgctcggcctgaagcagacgctggagaacccgtggcaggccttcgcccgcaaccacccggtgggctcggtcatcgagggcgaggtcaagaacaagaccgagttcggcctgttcatcggcctcgacggcgatgtcgacggcatggtccacctctccgacctcgactggaaccgtccgggcgaacaggtcatcgaggagtacaacaagggcgacatggttcgcgccgtggtgctcgatgtcgatgtggagaaggagcgcatctcgctcggcgtcaagcagctcggccgcgaccgcgtcagcgaggcggcggcgtccggcgaactgcgcaagaacgccgtcgtcacggcggaagtcaccgcgatcaacgacggcggcatcgaggtgaaactggtcgatcacgacctgacgagcttcatccgtcgttccgacctgtcgcgcgaccgcgacgagcagcgtcccgagcgcttcgccgtcggccagaaggtcgatgcgcgagtcatcaacttctccaagaaggaccgcaaggtccaactttcgatcaaggcgctggaaatcgccgaggagaaggaagcggtggcgcagttcggttcgtcggattccggcgcttcgctcggcgacatcctcggcgccgcgctgaagaagcagggcggcggcgagtaggtttgcccggtgatccaaacgatacgggccgcggagcgcgcaatcgctccgcggcctttttcttgtccgcgcttcgactgtaagcgagacatccaggggaggggatcgtcatgcgtacacaggtcgccatcatcggctccggcccgtccggcctgctgcttggacaactgctcaccaatgccggcatcgacaacatcgtcatcgaccgggtgagcgaggaatacatcctcggccgcatccgcgccggcgtgctggaatacggcgcggtgtcgatgctggaacaggccggctgcgccacacggctgcatgcggagggcttgccgcatgacggcttctcgatcgctttcgacgggcgcctgcatcatatcgacctccacgggctgaccggcggcaagcgggtgatggtctatggccagaccgaggtgacgcgcgacctgatggcggcgcggcgcacaagcggcgcgacctccttctacaatgtcgaacatgcccgcccacgcgatttttcaggcgacagccccgccgtcacattcgagaaggacggcatcgcgcaccgcatcgacgccgatttcgtcatcgggtgcgacggctttcacggcccaagccgccaggccgtgccgctggacgcaatccgcaccttcgagcgcgtgtatccgttcggctggctcggcattctcaccgacacgccgccggtggatcacgaactggtctatgccaaccatccgcgcggctttgcgctgtgctcgatgcgttctgcgacccgcagccgctactacatccagtgcgcattgagcgaacgggtcgaggactggagcgacgaaacgttcttcgatgaaatccgccgccgcctgcccgatgagctggcgcagcgcatgacaaccggcccgtcgatcgaaaagtccatcgcgccgctgcgctcctttgtcgccgagccgatgcggttcgggacgctgttcctggctggcgacgccgcccacatcgtgccgccaaccggggcgaagggattgaaccttgccgccagcgacatccactatctcttcgaggggctgcgggaacattacctggagcgcagcagcgccggtctcgacgcctattccggccgtgcgctggcgcgggtgtggaaggccgtgcgcttctcctggtggatgaccaccatgctgcaccgattccccgacgactgcgaattcggccagcgcatccaggaagccgaactggactacctgacccgttctaccgccgcctccaccgcgctggccgagaattacgtcggcttgccgtactagggcgtcgttcggtcaaattgaattgtttggacacaagatcccggcgtccaaacgattcaatttgatcgaacaacgctctaggccctgtagacagactgtagggcgtgtgcgaggcggaccggagcccgcctcgcgttgcggctcttcagccttgtcggcggagggcggcagtgttccgctggtggaacgccgtgttccatagcaatctctggacgaaacggcaattcccttgcgacaccccttgcgggacgacgcgatgggactggtgtttgcattcgacatcggagcccgttcgatcggggcggcggcggtccgctcgggcaatgcgcctgcgacgggggcagtgagcgctgggccggtttggtgcggtgttgtcgtgcacgatgcgcatgacggcgcgagaacgcttgaccggttccgccgcctgcgtcgtcgccagcaacgccgcaggctgatgcgccgcaggcgcaaacggctggtggagattatgcgccgtaacggtctgctgccgccggccgggcaatcctgcgatgatgcgttcgagcgcgatccctggctgttacgcgccgaggcgctcgaccgtgcgcttgcgccgcacgaggcgggccgggccctgctgcatttgcttcgtcgtaccggccggccttcgcagccagctccaccagaggacggcgacctgctggggagcggaccagacgacgaagcaaccgaccggccgcccgcaagccgcaccttcggcgaaaggctatggcaacgtcatgccggaccggtcaggcaacgctttgcggtgatccggcgcgcgcatctttcgacggacagtctgcaaggcatcccggaacgcatggcgcaccaggttcgtaacgaattcgatgcgttgtggcgcgcccagatgcgcttcaacccggagatcttcacggatgggttgcgtgcggctatcgaggcggcggctttcgcgtctccacgccgttccgccggaccgggacggagctccccgggcgggcatggagaaatgccggccttgccatcgcaagaggcggtgcgcgtgctgtttgccctgtcgcggctgcgcgttcgccaatccgacggcgcatttcgccgcctgtcgcgcagagaacgcaataccctggccaacatggccctgcgcggcgaggtgatgaccgcgcgaagggccggcgttgcgctcggcctcgatgagaacgaacggatttcggccatgaccggtcattcaccgcccgtgattgtctcgtgccgtatatcggccgcgttgcgccgttttccccgtaacggcgcgctctgggcgactttgccgcttggcagtcgcgacgccatccttgccgccgcgctcggcacgcaacgaacgccggacgcaaacctttccgtgccggcatttgccgcgcttgcgcgctgcctgcgtatggtcgtcgatcaactgccgaagggcccgcgcaaggccttgcctgccgatctcggcgccgcgttgttgttcgccttcggcggcgaggcgggcagacctgcgcattcgccgcgacaagcctggcgcatcgcccgtgccgatctcgaccggctcggcattgtgctgcaagaaccgccgcggccaccgtggcgcactcatccggggcagtcggcttttgcccggctgctgcaggccatgatcgccggtttcggtcaaccggacgaaatcgtgttcgaaaacatccatgccgccgcatcgcggcgcacgccgcagagggcagccgatgtcgcggagcttctgcatcgcatcggcgcccgcgccacgcctgcaaatcgcaggcgcgcggcgctgtggctggatcagcgcggcgcggacggcaaggttacttgcccctattcgggtttgccaatccatcccgaggcgctggttgggccgacgatcgagatcgaccatatcgcgccaaggtcgcaaggcggtagcgcggatcgcgcaaacactgtgctctgccatgccgccatgaatgcgtggaaaggcgaccgcacgccggttcaagccttcggcgcactgccgacatggccgggtatcgtcatgcgggcggcgcttctcgatccgcagcgccgcgacgccatttatggatcgacagagccggtgtccaacactgcgcgcatcgcagagacctcggaattgctgcgcgacgccatcgaaactgccgaggaactggcgccgcaagcccgtttcttccttgcgccggttccagcaaggccgggtgcaaaggaccggcgcgacctgcgccatcatggcgaggacgccttggagcttgcctgccgccatgctgcgccgcaaagggaaaaagttccaggtgcgactgcatgcgatgagaaggttcgcgccgatacagggcggttggccgggacgtggggcgtttcactgatccgcggctgcatggctaaacaccgcatcaagctgcacgatgaaacaccgatcggctttcgccgggatggccggggcagcgaacgtttcgttgttcgcacggcactgcgcgacctgaccgcgaccgaccttccccgcattgccgaccggcgcctgcgcgatctggcgcttgccggcggcgttcaggccttgcaggcgcgatgcaaacgggtccgtgttgaaagacggcttcacgcggtcgatctggccgttgtcgaaagcaaggcttcccggatgcgcgcccatgcgcggccgcgcgtccggttcatcgatgtcgtccagatgcgtgacggaacatggcgcagctatcccgcgctggagcgggatgcgcggatcgcgggctggcggcccatctgggaaacgcagcggatgggcgcaaaactcgtcatgcgccttggccgcggcgatctggtcgcgctcgaccatccgaatttcgggtgcgagttgtatgtcgtcacccgcctgtcgccgtcgaacggtgtcttctatcttgccgggcatgcgcaaggcggtgatctcgacgcccgtcatcgcgaccccaacgatcccttccggtggctctttgcctcggtgggacggttgcgggagtggaatgccttcgcagtcgacagcggcccgcttggcgaaacgatgccacggcgatgcaacacggcaagcgatgtcgagatgctggaccggaagcggcgactcgctgctttcgccgcctccggctcccccagcgtttcggaacaccgccagttccgaccgcgaccagacgagttgatcgcgcaataaatggttgtgtatttacgttgggaagtaaagggttccagcctgcgatgggcggaaacctcaacctttggttaaccgtaatcgaccaatggccgatcatcatccctgaggattgcgggcttgcgacgtggctgtgaccgcgcgttccagatacatgtcgcggtcgtagatgtcggtaaaatactgtatcttcccgtcgacatccggccaggccgtgaagtacgctacatagaccggaaccttttcattcagcacgacctgctggttcttgcctccggcgatcctcgcatcgatttccgcctccggcaccttgagcagcgccgccgccatgcgacgcggttcgtgcaagcgcacgcagccatggctgaaggcgcgctcgtcacgctggaacagcgccttggccggcgtgtcgtgcatgtagatgtcgtgcgaattcgggaacaggatcttgagttcgccaagcgcattggacgagcccggcttctggcgcacgccatagggcacgctcttgccgacccgccaccaattgaccgaactcgacgacacctgcttgcccgaggcgctgacgacctcatagccctgccggtcgagccaggacggatcgcgcctgagttttggcagcatctcgttgacgatgatcgattgcggtacgccccaataggggttgtagaccacggtctcgatgacatcatggaagaaataggtctggttcgcttttgtgccgacgacgacgcgcatggacagttcaggcttgtcgtcctcgtagtacgttgcggtgaaggccggctggttgatcagcacatggcgcgcgccgaaaacctgaggatgccagcgcagccgctccatggcgtggcgcacacgcgtcatccggtctgcgaccgaaagatcggtcattttcgaaagcgtgcgcgggccgatcacaccatcagggctgaggccgttttccttctggaaatcgcggaccagcgccacgagtttctcgtcgtagaccgaggcggattcgcccaacgtcagcgcctcggcatgcttctccttgagttgcgccgtgccgcgccgaccgaccgccgcgacgatcgccgcaaggtgctcgctttcaccgccagccttcagcaacagtttgtcgggcaagggaatgactgtgtccgtctgcttgccgagcgcggccagctcgtccttcagcgccgcgaattccggcatctgcggatgctgcgccttcagccaggctgcgggatcgtcgcttgccgcaagcttctcgacggcttcctctaccgaaaggccccgcctcggaaagtcgtgatagccgctgatcttgttcggatcgacaatgccgttcgaggcgtcaagcgcataacgcaccgcgcgcagcgtcagcatcgcatcgaagcgcgcaaggtcggccaaacggccggccgtgtcgttcatcgaccaggcggccggcggcggcgccaccgcgtaatcctgcgccgacaatccccaggcgtcggcctcgccaagcagcttcagcaccgcctcggcatgctgcgaaatgccgaaaccgctgacccagaggaatttcgggctggaactgtagtgatcgagcaccgccttggcgatgtccttctctgcgaccggcttgaagccttcgaaatggcgcgccgcctcggcgaattgcgatggcatagccagcgacggaagaccggtcgcaccggtaatctcaccgctgacctgcgggtctcgcgccagcttggagaaatcgaacgcgacgacgggcgacgccttgtaggcatagtattccgggcccgtgatcgtcggctgcggatcggcgtcggcaggggcggctcgccgcttttcggtggttcggtttgctttcggcgccttcgggtagactttggtcgccttctgctgcttgcgcggctgttggacgctgcgctcctttgcgggtttgtcgcggccgcgaaagagcaggcccatcagggtgtttttttcggctggggggggggaaaccgccactatgcttgccatcaaaacggcaaacaggcggagcatcggacgagattgcatcggatcctgcctttacgcatggtcacacaacacggcattgtaaccgccagagtaccatttacaaaacgttaaggcgacatttcatagcgaaacatttttgtgaacgatattgtcacaattcggttacaccgaattcgccctgcactccccggctggcggctggttgccgttgcccagccgagcctcaatcggccagcccgaacagcgctctcagccttgccgtatcgatggcgcggcagacttggccagccggcttgaacgtggcgacatcctcgccggcgacgatggtgttgaccaccgcctcctcgatcgcctcgaccgcgccgagatagaggggatcgagccggtcgttgttcagttcggttcgggtaagcagcgcatcgtcgtcctcgggctgcgggcgcgggttggagaccgagaatgcgaggaaaatgtcgccggaattgttgccgcccggcgtgccgccgcgggcgatgccaagtgcggcgcgcttggccatctgtcgcagggacgtgcgtgacagcggcgcgtcggtggcgagaacgacgatgatcgacccgctctcggtttcgcgcagcctgccctccggcatcagccggccgaccggcacgccgagcatcatgagccacgggcggatgccgtgattggcctgcacaagcgcgccgacggtgaaggaatggccgtcgacatcgacgatgcgggacgcagtgccggttccgcccttgaactcgtaggcgatcatgccgttgccgccgccaaccgatccctccgccaccgggccggtacgcgctgactcgattgcgtcaatcgcatgctgtggcgtcacgtgcagcgcgttgatgtcgttcagcacgccgtcataggtttccgccaccaccggcatcgcccaggcatgggcgcgtgcgaagtacccggcgaagcgatcgatcatccagcgcaccgcgccctggtgtgcggcgccgaccgagtgggtgtttgtgatcagcaccggaccgatgaagtagccggcgtcgtcgatccagtgcgtgccggtcatctcgccgttgccgttcagcgcatagtgccccgcccagaccggacgcggcgcctcgccatcctcgcgcggcacgatggcggtaacccctgtccgcatgttgcgagcagggtcagtcagggtcacgaaaccgacgcgcacgcctgcaacgtccgtgatcgcgttgaactttccgggctttccgggaaacggaaggccaaggtcgcggccgcgtggctttcccatcatgccggctcctgatgcgtggcgcgatggagcgcccttcggttggaaacctatccgaccagccacaagccgatcaagccggccgtgccaacgatcatccgccaccaggcaaacagcgcaaagccgtgccgtgacacgtagtcgagcaggtagcgcacgacaaagacgccggcgatgaaggcggtgacgaagccagcggaaatcacggcgaaatcgtcaaaggtgaggatgtcgcggttcttgtagagatcgagtgcgaaggccccggtcatggtgggcatggcgaggaagaaggaaaattccgccgccgaacgcttgtcggtaccaagcaacagcgctccggcaatcgttgccccggagcgcgaggtgccgggaatcatcgccaggcactggcaaagcccgatcgcgaaacacaggccgagcggataatccatcacgttgacgtagcgcggcttcagtacgagcttgtcaacccacaagaggattatgccgccgacgatcagcgtgatgcagatcaacagcggcgtctcgaacagcacggacttgataaagccgtgcgccagcgcgccgatcaccgcagccggcaggaaggcgacgagaatgccgatgacgaagcgttgcgtacgcggttcgcgcggcaggtcagtgaggattttcagcaggcgtgcggaatagaccgtgaggatcgccaggatcgcgccaagctggatcagcacctcgaaggtcttgccggtcgattcgaagccgaggaaatgccccgccagcagcagatggccggtcgaggataccgggatgaattccgtcaggccttcaagtaacccgagtgcgagcgcctcggcgatcgtctggttttccatgctgatgtgctttcgaaggtgatcgcagcccgcgccgcaaaaaggaccgttttgcgggcgaattgatcacggcatgcttaacgcgcccttaacctcgcctctgcgatgtctgtgcgacaaatccttggcgcccgcatcggaccggggtttgcgctgcgccgtttcgacctcgtgccggatttgtcttccccatgctcgttctgcatcaccaggttctcaactccgcctcacgtttcgtccgcctgatcctcgccgaatacggcgaagagccggaactgcgcgaggagcagccgtgggaacggcggcgtgaattcctggcgctcaatccggccggcaccgtaccggtgatgatctcggaggctggcgcgccggtggtcggcttcacggcgatcgccgagtatctcgacgaaacgcgcggcgtgctgaagcgcgaccgccggctgttgccggaatacccgcttgaacgcgccgaggtgcggcgcctcgtcgactggttcctgatcaagatggaggccgaggtcacccggccgctggtgcgcgagcgcgtgctcaaggggcagatgcccgccggccaaggcggcggctcgcccgatgcggcggcgctgcgcgctgcgcgctccaatgtgcggcaacacatgaagtatgttggctggctcgccggttcgcgcaactggctcgccggagggcggctctcctatggcgacctcgccgccggcgcggcgatctcggcgctcgattaccttggcgaagtggactggacgctggagcctgcggcacgcgaatggttcgtgcggctgaaatcgcgtccttgtttccgcgccctgctgagcgatcgcgtgcgcgggctgacgccttcgtcgcactacgccgacctggatttctgagcatccgcctgcaccagcgaccttgccggcgcgatccgcatgacgcagatggcaatcatgtctgacgccgggatcgacagccgcaccgccttcctctctgacgaggcgcacgcgcatggcttcgacgccttcggaacctgtcgcgccgacgatccgcgcctgcttgaggccggtgaacgcctccgcgccttcgtcgcgggggagttgcatggcgagatgggctggatggccgagacgctcgaccgccgcgccgcgccgcagcaattgtggccgcaggcgcggtcggccgccatgtttgcgatgaactacggcccgcagaccgatccgcttgccgtgcttggacgcaaggatcgtggcgcgatctcggtctatgcgcaaaaccgcgactatcacgatgtgctgaagggccggctgaagcagatcgccgggcggttcgccgcccgtttcaatgcgcaggtaaaggtcttcgtcgacacggcgccagtgatggaaaagccgctagccgcgcttgcaggcatcgggtggcagggcaaacacaccaatctggtcagccgcgcgcatggctcatggctttttctcggtgcgcttttcacgaacgtggaactcgcagccagcgaaccggaaaccgaccggtgcggctcgtgccggcgctgcctcgacatctgcccgaccgacgccttcctgtcgccataccggctcgatgcgcggcgctgcatctcctacctcaccatcgaattgaagggccagatcccgcaccagttccgcaccgcgatcggcaaccggatctatggctgcgacgattgccttgccgtgtgcccgtggaacaagttcgcgtcgcaggcatcggaggcgaagctgcgcgcgccgcaggggcgcgatgacccgcggcttgccggactgctcggacttgacgacgcggcgtttcgcgcgatgttcgccgggtcgccggtcaagcggaccgggcgcgagcgcttcctgcgcaactgcctgatcgccgccggcaacagcggcgatgttgagcttctggcgccggttcgcaagctgcttggcgatgcttcgccgctggtgcgcggagcagcggtgtgggcgctgtcgcgacttgtcgaccgggcggctttcgcgcatgaacgcgacgcgcggctgccagcggaaaccgacgcgcatgtgcgcgaggagtgggccgtggcaagtggatcaccaggtgcggaccggacgccaatgccgggccgcaaggaatgacgattgaagggcagacatgagcgacgccagaaccatcctgatcttcggcgccggctattccgggcgcgcctatgcgcgcgtgatggcgggcgaaacggaggcgatgtacggaaccacacgcagccttgcgaaggcgggcgaactggtcgacgccggggtgacgccgctactgttcgacggcatcgtgcggccacccgacgtgctggccgcgttgcggcgggcgaccgacctcgtcatctcgattgcgcccggcgaaacgggcgatccggtgctgcgcctgtttgccgacgacatcgccgccgcaccgaagctgcgccacatcacctatctgtcgactgtcggcgtctatggcgatcaagacggcgcctgggtggacgaggacacgccgtgccggccggtgtcgaaacgttcgacagagcgcgtggaggccgaacaggactggctttcgcttggcgcgcgcagcggcaagccgctggcgatcctgcggctttccggcatctacggtccgggccgcaacgctcttgtcaaccttgcaaacggtacggcgcggcggctggtcaagccgggccaggtcttcaaccgcatccatgtcgacgatatcgccggcgccctgcgcttccttgccgggcgcggcctcgaaggcatcttcaacgtcaccgacaacgagcctgcgccgccgcaggacgtcgtcaccttcgccgccggattgatgggcgtcactcccccgccggaacagccgtttgggacggcggaactgtcgccgatggcgcgttccttctatggcgagaacaagcgggtctccaacgagaagctgcacgcgctgggctatgagttccgccaccccgactatcgcagcgcattcgaacggatgtggcgcgacgactgctggcgataaccggaacccggctcagtagcggatgacgtcgaaccgcgcgccgagcgcatcgtagagcagcaggcggccgatcaacggctcgccgacgccggcgatcagcttgatcgcctccatcgcctgcaaggtgccgatgaccccggtgagcgcgccgagcacgccggcctcggcgcaggttggcaccgcaccaggcggcggcggttcgggaaaaaggtcgcgataggcgggcgcgggccgcccgtcaggccgcgtcatccatggcgcaaacaccgtgagcgagccgtcgaaacggccgaccgcgccggcgaccagcggcttgcccgcctcggcgcaggcatcggccaccagataacgcgtatcgaaattgtcgctgccgtcgatcaccacgtcgcaggcattgacgagggcggcgacattgtccggccccagccggcagcgatgggcattgaccgtgacatgcgggttgagcgcgccaatttcacggctggcgctctccaccttcgcctcgccgatcgccgccgtggcatgcagcacctggcgttgcaggttcgacaacgagacgatgtcgtcatcgacgacatcgagcgtgccgatgccggctgcggcgagatagagcagcaccgggctgccgagcccgcccgcgccaaccaccagcacccgtgcgcgcttcagtttctgctggcccggcccgccgatctccgccagcacgatgtggcgggcgtagcggcgaagctcatcgggagaaagggtggtttccggcgcatcggacatttggcgacaaaagcattgtttcgcctcgccgtccatcgcgcctgcccgtatcaaggcgcataagcggtcgccacatcgtttctgctttcggcgccgagcgcctgcatggccgaaatcgtctcggcgatgctgcgttcgagggaagaaatcaggccgggggagattgtttcgccgcgcttcgcctgatcctcgattgtctggcagatcgcggcagcgcgctcggcgccggcgctgccgcacatcgatttgagggcatgcgccagttgcgccaattccacgccctcgtcgaaggcggcggcaagatcggcgaaaccttgcggagcatgggtctcaaaaagcgagaacacatgcgttgccatgtctgggccgagcgactcgaacatcgccagcgtgtcaggcgcgagcaacggcgcttccgtctgcgtaagagacggcgcgagcgcctgctcgacttcccgcttttgcggtttcgcctgcggtgagacggcagcttcggcgcagccggccgcgcgcagggttgcgatcagcgcctgcatgccgaatggcttcaagaggtggctgtccatgccggcttcgcgcgcctcagtctcgatggaagagccgacatgggcggtcaaggcaacgatatgcgtccgctcccggccgagctcggcttcgatggcgcggatacggcgggaagcctcgaacccatccatctccggcatggagcaatccatgaagacgacgtcgaacgagcgcgcgcgcacccagtcgagcgcttcacgtccggaggagacgatcaccggttcgatcgccagcgcggccagcgcatcgcgcagaacctggcgattgaccgcgccatcgtcgacgccgagggctctcacctgtgagaaatccggcagcaactggccgaccgcgccatcgcggcgcggtccggtttgcccgaattgcccggacgatagcgattccgccagttgacgaatggcgctgcgcgataccggcgccagcagacgcccggcaatcccttcaaccgcttcctgttcgctttcaatgtcgtccagaagcaggagtggggttgcgcctcgccgctgcaccatgcccggaagggcttcttcgtcacagacaataacgtccggcacaatcccgcgagcaatggaatcgggatggagcaccgttgcgccaaaaccggtaatctgcgcggtcagggtttcgcgcatcagccgatcgccgatcgaaatggcaatggcgcggccggaaagcggcagatcggatagcgcttccacttccacctcaagctgcaaacgcatcgtgaagctggagcccaccccaaccgcgctctctaccgtcaattcaccgcccatcgcctcggcaatgctgcgcgaaatggcgaggccaaggccggtgccgccgaaccggcgactcgtcgaggagtccgcctgcctgaaccgttcgaagatatggccaacatgctcgggcggaatgccgatgccggtgtcggttacgctgacctcaatcgtctgccggccccggtcgccgccgatggcggatacggtcagcgtcacgccgcccgcctcggtgaatttcagcgcattgccgagaaggttcgccacgacctgaccgatgcgcgccgggtcgccgcgcaggcgcaaggccaccgaccggtctacccgcgccgcaagcgtcagctttttttccgcagcgcgcccgaaaaacaacgccaccgcgtcgtcgacaatgtcgtcgaaggaaaatgacatcgtctccagggccagttgcccggcctcgatcttggagaaatcgaggatctcgttgatgatagtcagcagggtgcggccgcttcgcaccacggtctgcgcctgcctgcgctggcgatcgtcgagcggggaggccgccagcaactcagcggtcgccatcatgccgttcatcggcgtgcgaatctcgtggctcatcatcgcaaggaagttcgacttcgccgcattggcggcctccgcctcttccttggccgcacccagttcggcggtacgcaatcgcacggtctcttccagcgtctcgcgatggcgcgacagcatcgcgtcgcgctcgg

SEQ ID NO: 3651 - DNA, 24380 bp, synthetic construct
  source 1..24380: mol_type = other DNA
  misc_feature 1..24380: note = Synthetic
tatcaaccgaggttgattttttgccgctgtgcacggatatctgcagattccatgagttgtcgccgttgatcatctgactgcttttccagaacagctgatttcgtgttatagagaggttgccgtgaatgcccgcttctcttgcgatgatcacccccagccgttccagggtttcctgatctgccgataccggaaaatcgccccgcctgcgccactctatatcgccgccgagaatgcggctggaggtgctgcccccgctgtccagttccatcatcgcccggttgattgcgtcccgtgagattcccagttcgccgccgacgttcatgacttcttcaagatccattcccgagtctccggatgccgtgcccgaagctgatgtttccctggcctggatttctatggcctttttcaggattcgctcaagttccttgttggagtatttttcgtctgccatgagaccatgataggtgaatccatccggctcagcaagaaggacagggaacggttgagcataatgtcgccgggagaaacgtatagtgttactactgcagttatgatatatttaatcccatgaaacaggatgttgattccataatccgtgatctcatggatgcgggttttatcgagtacgaggccaaagtgtacctctcccttctccaggcccacccggccagtgcatacaccatctcacagaactccggcgtcccccactcccgggtatacgatatctgccggcgtctgaaaaagaagggctatgcggtatctaccggcaccaatccggagacattttctcccctctcgccggatgaactgatcgataaaatccagcgggacaacgacacccttaccagaaaattgaacaacagcctccactccatctccttttcttcggactttgatccggtatggaatatccagagccgggaggaggccctgtccaagacccgggaaatcatcgcccaggcgaaaacatcaatatacatcggtctctggagcgaggagttcgaacttctgagggaagagcttaggaaggccgatcagcggggcgtggatgtgttcatgttgatatacggccatattgacgtggatttcggcgaggcgtactttcatgaccgggatcatctcgaggatattttcgaccaggggcggagcatcgacctggctgcggacagggagatctgtctttcaggcattctgggtgagccgggaaaaaccgaaatggtgtggacccggaatatcggcctggtgcactccatagagggctacattatccatgatttttacctggcggagttggttgaggtgatgggaaaccaagtaatggttgaacatttcggaaaaaacctttccaagcttcgggacaagttcaacagacggcattgaccggctccgaacccgcaacacccgaacccctaacacccggtccagaaagccgccgggccgctcatagccgagctatcgccccgccgaatccggacccggcccttgtgtgctggaattccctcaggccgtgaaatgggactggatgaccgttcccgcctccccgcgaatcgccgctggaagactctctacgtcggtaatgatcacccgattctccggatccgcctgtacgaattctatggcagctgcaattttcggccccatggatcccgccggaaaatgtccctgacgctgataatgccgggcctgtgccagggtaattctgctgagatcctgctgctggggagttccaaagttgatactcacctggggcacaccggtaataatgatcagttcatgggctcccaccgacagggccagtttcatgcttgcaaggtccttatcgattacgcagtccattccttctatggttccgtcttcctgataatagaccgggatgcctccgcccccgccggttataaccaggtagttttcatcgatcaggtggcgtatggattccttctccacgatgtccaggggatagggggatgccacatagcggcggtagcctctgcctgcatcatcccggaccacccagccctgttcttcttccagtttctttgcttcttctgcgctgtaaaacgggccgatgggtttggtgggctcatccagtgccgggtcgaagcggtccaccaccacctgggccggaatggtgaccacattcctccatatgccgtggcggatcatggtgttttgaaggctctgttcaatcatgtagccgattgagccgcaggtcatggcgtctgcaacccccaggggtgtttccggaaggctggttttcgagcattccaccatcagcatgatatttcccacctgcggtccgttgccgtgggttaggagcagcttatactcctgcttcaagagctccaccaccccctccatggaaagccgtgtggcctggaactgggcgtggatatccgttccccgtttcttatccagaattgcgttacctcccagggcaactaccgccagttttctctcatccatcctcgactcctcgctgggctgtggtcttccatatatcagcagacatcaacattactactataatagtaaaatgccggaagttgatcttagacctcccgcagtcccccgtcaaggaaatttacagcagggattctttccttgacagcagtatgggacggagtatacttactactataatagtaaatgcaaccggcaggaccggaccagggacgggtatatgagcgatacggtgaaagtgctgatttggggattcggagccatgggaagcggcatggccagggcattgctggggaaaaccggcgtagaaatatccgggatctgcgacatgcatccccaacggcggggcaaaagcatgctggaggttctgaagatgaactccggcggagctgacagcgccggagctgggaccggaggcagcgccggaccgggctacccacgggacgtggtgatcagggaatccatcgaggaagccatggaagacgcccgggatgcatccatcgctcttctggccaccgactcatttaccaggaaggcctatgaaaagatcatcaccctcattgaggccggctacaatataatatccaccgccgaagagatggcctaccccgccgccggagaaccggaactggccggaaaaatccatgagaatgcagcgaaggccggcgtcacggtgctggggacgggaatcaacccgggactgatcatggaccttctggtggtgatgatgaccggcgcctgtctggatatcgaccatattcaggcggaacgggtgaacagcctctcccccttcggaccagcggtaatggaggagcagggagtgggactgagccccgaagagttccgccggggcgcacaggacggcagcctggccgggcatgtgggcttccaagagagcatcggcatgatcgccgacgccctggggtggaagctcagcgcaccaatccgccagagcatggaagccatcgtcaccggcgttccccggaggaccgagtacgcgtctgttgagcccggagatgtggccggatgccgcatggaaggccacggtgaggtggacggcgttaccagaatcgaaatgcttcacccccagcagatcgagccggaggccgaaggaatcgaaaccggagattacatcagaatcaagggcactccgaatatcaacctccagatcaaacccgaggttcccggcggcatcggcaccatcgccatgtgcatcaacatgattccccatgtaattaacgcatctcctggactgaaaaccatgctggatctgccggttccccgagctattctgggagatatgcgggagatgattcaccaataggagcacccgggcacggcccaggccccggtccggcccctgcccgggcccgggattgggcattacaaaaccgaacaagcagaataaggagcagatatgcaggagcgaaaggatgattttcaggtcaggagaaaacatctggcagatttgagcgaaaaacagctggaggaacggttctggcagctcgccgacgccctcacccagccgctgatagatacggcctaccatcacaccagcccctccattgaacggtcggtgctgctgcggatgggaatttccagccttgaggcggcggcaattgtggaaaaagccctggaccacgaacttctgggcaaaggcgcagggcatatcgtgtaccgcatcgcagcagatcagggcatctcaatcggcgaagctgcggcggccctggccgaaggaaaattctggaaggaggcccgggccatatggacatgaacaccgaaaaccccaataaaacagggaaatcagctcacatgcagctgaatcccaatgaaaaactggatgtggaacggatcctggaggatcttgagcattatcatccccggaggcggggctggttctggcgcaaaggcggcggacagaagcggcagatcggccccttcgagtattatcagaccaccgaaaacctttcccattccgtccccctccccgccgcccactacttcggcgatattgatccccagccggtgagcactatcaccaccgagatcgcctccggccgctttgaggacgatattcggcggatgcggatggcagcctggcacggagccgatcatctgatggtgatccgcaccgccgggcagagtcatatggacggtcttctggaaggcagcccccaggggatcggcggggttgccattaccaggaagcagctgagggcccagagaaaggccctggatctcatagaagatgaggtggggcggcccataaactaccattcctacgtgagcggcgtggccggacccgagatggcggttctcttcgctgaagaaggggtgaacggcgcccaccaggatccccagtacaacgtgctgtaccggaacgtgaatatggtgcgctcctttgtggatgctgcggttgccaagagggtaatggcatgggcggggatcgcccagattgacggcgcccataatgccaacgccaccgcccggcaggcctggaaggtaatgcccgagctgatggttcagcacgcactgaactccatgttctccgtgaaagcgggaatgaagcccgaggatatttgcctctcaacagtaccccccagcgcacctcccgctccggccatgcggctggatctgccctatgccgtggctctgagagaactgttccgggattacaagatgcgggcccagcagaacaccaagtacatgacgtcatcggccagggaggccacggtcacccataccctgaacctcctgatcagtcagttcacccgggctgaaatccagtccaccatcacccccgacgaagggcggaatgttccctggcatatttacaacgtggagggcaccgataccgccaagcaggcgttcaacggcatggacggcctgatggagatggtctccctgcggcgggacgaaggggaactggctgagaatgtccgggaactgaaggagcgggcggttctctacatggaagagatgctggagctggggggatatttcgatgcggtggaagcgggaatgtttgtggactcgggaaagtacccggagcgcaacggggatcccattgtacgcaaacgtgacgggggcgtgggtgcgggaaccgtatatccccgggacgatgattacatggctccggtgaccgcgcatttcggttacaacaatcttgccccctacggaacagaggccgagaaaaacccctccagtctcattgacggctgcaccttcgaaaagcccgagaaaattgtgtttattgatgagctggatgaaaacgataatgtggcggtccggatggccgaaaccgcccatttacgcaactcatccatcatcaaaccggagatggaatggcagggggacggcacggtgcttctcaccatgtttctgcccaccgaccagcggaccgcccgctttgcggccctggaggctgcaaagaacatgaacctttccgaagccgaggtgattcacgcggaggtgatgcatccggcggaaggaacccgcattgaactgaaggggaaggttgccttcaccatcgatacctccaaactggaaattcccccggagcccaaggtactcagcgaagaggagatcagggcagagatcaaggcccggcccatggccatcgtggctggtacggtgggcgaggacgagcattcggtgggcctgcgggagatcatcgatatcaaacacggcggaattgagggctacggaattgaatgccactatctgggaaccagcgtacctgttgaaaagctggtggatgcggcaattgagatcaacgcccaggccatcctggtttccacgattatcagccatgacgaaattcattacaaaaatatgaaacgggtccatgatctggcggttgagaaaggcgtgcgcgataacattctgattatcgcaggcggcacccaggtgacccccgaccttgcggtgaagcagggcgtggatgcgggattcggccggggaaccaagggaatacacgtggccaccttcctggtggaaaacaggaagagctgatgcaggttgatatcctctctgcggagatcggaagcaccaccaccgttgtgagcgcgttttccggcatggattccccccgggcggcccgctctccccggccccgctttctgggccagggagcagctcccagctcggttcagcagggggatgtacgcatcggcctggagcaggccgttgaagagctcaagaaaagcctgggtgtaccggagcttcggtggggccggttctttgcatcatcctcagccgcaggcggcctgaaaatgagcgtacacggcctggcctacgatatgacggtgaaggccgcccgggaagccgccctgggggccggcgccaatatctccctgattactgccgggaaaatgcgctctgaggatatccggagcatgctggatgccctgcccaacatcatcatgatcgccgggggagtggattacggtgagcgcgatacggccctgcacaacgcacgggccattgtatcggcgctgatctgtgaggggcgaagcgtcccggtcatttatgcggggaactgtgagaatcaccggcagatccgcaccctcttcgacaacactcccctgccccttcatatctgtgacaacgtatatccccgaatcgatgagctggtaattgagcccgcccggaatatcattcaaaaggtgtttgaagagcacatcgtccatgcaccggggatggagcatatccgggatttgatagacgctcagatcatgcccgtgcccggggcggtaatgcgcagcgccatggccctgaacaggcgaatcggcaaccttctggtgttcgatgtgggcggagcaaccacggaccttcactcggtgtgcgacgcctcaccggaaattgaacggatcctcatcgccccggaaccccgggggaaacgcaccgtggagggggatctggggctttacctgaaccgccaccaggttctcaagctggcaggatcacagaaaattgcagagagtctgggtgaatcagttgaagccctggaggcgggggtggatgccctgccaccggttccccggaaccccgatgaactgaggatcgcagaaaccctctgcttccatgccgcaaaaagggctctacagcggcatgccggaaggctgaggagcatgtatactatctccgggaagcagcagctggcccagggaaaggatctcagcgccgtacggacggtgatcggcaccgggggagcactgacccgtctgcccggcggaagggaaatactcagccgggtgctggaatccgcacggggggtggaattgttccccccgccggaggctgccattgtgcttgatacccgctacattatgtccagcctgggcgtactggcggaagagtatccggaggcggttcttgaacttctggctgaaagcctgggcatggaactgccgccggagcagaccggccagaaacaggcagggagggaaccttcatgagcggaccggaagtgatggtcgatgttgcccggatagaggaaaacacccgggtcattgtcgaactctgcacacagcacggcatagaagtaaccggagtcaccaaggcaagctgcggcatgccccaggttgccaaagccatgctccggggcggagtcaccatgatcggagaaagccggctggagaacatccaccgtctgagggcgggaggcatttccgctcccatcatgctgctgcgcatcccccccctttcggcggcggaggagatcgtacgcagtgtggatctcagcctgaactccgaactttcggtgatccagcgtctcagcgatgtggccctctcagtgggtaccgtgcacgatattattctcatggtggatcttggtgatctgcgggagggtatctggcccgaggatcttatggagacagcatcccgggttatggagatggaaggggtgcggatccggggcatcggtacaaatctgacctgttacgggggcgtgattcccagtgaggaaaacctcggcaggctggcgggctacgcggatgaaatagaaaaccgcttcggcatccccctgcccatcatatccggtgggaactccagctccctgaatctgctggcagaggggggcgttccccggaaggtgaacaatctgcggatcggcgaagccatccttctgggtcgggaaaccgttgaacgacgggcctggccgggcaccagccagaaagcctttctgttgagcgctgaaattatcgaaaaaaaacgaaaaccctcggttcccatcgggatcaccggacaggatgccttcggagcaacgccggtgtttcaggaccggggcaatattctcagaggcatcctgaatatcggccgggaagatgtggatgtggaagggcttgaacctgcgaatccccgtatatccattctcggagcctcgtctgatcatcttcttgttgatatcaattccctggaaaccgagcccgggctgggtgaaagcgtggaatttatccccaactattcggccctgctggcctgcatgaccagcgcctatgtgggaaaacgggtgattctcccggaacatctgagacacccccgccgccgctctgtgttactggtgggacggctctttcagaacgaacgctacggccgggagcttgaaaccaggctggaaagactcaactaccggttccggagaaccgaagcaggactcggggttgaggagctggccggggagatagaaccgggagccattcccgttctcggggggcgggaactgtgcgttaccgggcttgaagccgctgccgcaagcatgaaccagttcggcctgctgtgggtggactccaccatccggagcgaggaactgagccgggtgctgggcagggacaatgaacagatcagcagaagtctggatctgagcaacattgttctgctgggggtccgggagatagaagaagatgcggcccagattatcaggtctctgaacatccaggtgttcaccatggaggagatctccctcatccccatgcgtgaaatcatccgccagtccctgaagcgaacctccatgggaaccgaggggctctacctgaagttcagcggaagggttgcggacaacggcaatgacgggctcaccaaccgggaaacccacctggtcatggaaatgacggcggcatacaacaccctgagggttctggaaattgacgacgacgaaccggacgaagccagccttgactcggcctacatccgctccagcagggaggcaagcgcaaacatgccccgcttcctgctgtcggccctgggtaaacggatactgccggtgatctctgagcctgatgaatagaaagatagagaattgggttttattttatctatagtatgatcacattgctctattcaggaatagtttttcttttttattcacttattcacaaaaataaagatcaagtgactcgttttttagggaatagaaaaaaacgccctgcctaggcagggcaatagtgctttccgcacttcggcgtatagccttattgtggaaagaatcagatatttgaattataatacatttagatattttgtcaactatgagaggtaaatgatgccttacacccttggattggatttaggtagcagctcccttggttgggcgctggtggatgaagaacaacagaacataatcaagaccggagtgagagttttccctggtgctgccacggatattggaaccgggaaggaatcatataagaaccaggatcgccgtttatcccgccaggctcggagacagacactcaggagaaagcagcgtcgaatagtcttattgagaacactcgtagacttcaaaatgtgtcccttgagcaaagatgaacttgaaagttatgcaaaataccggaaaggaaagaaacaagaatttccatcctcatccgaatttaattcttggttaaaactaaatccatacgagttgagagatagggcattgcatgaagacatttcccggttcgagtttggaagaatcctctatcacataattcatcatagggggttcaaaaccggacgtaaaagtaatgaagatggtgctctatacaaagggaatgaagacaccgtcggtgtagatgagacaaaaaatcttcttcaacaatatgcaacccttggtgagtacttgaattcactccggattaagtctgatggcaatgaacgattacgagggcgttacaccctccgcaactggtatgtagacgaattcaataaaatttgggaacgtcaggcaggaaagcttggacttgaaaatgagactgtacatagcagaaacaagcggtactacggaccagccgggagcagtgaacacaggcgcaagcttcaagcatataaaaaggctggaatttcgttcgaaatcgagggtgattttatctgccgcgaacaaactgtgagcttgaaggattaccttggcaatccagacaaaggaattcttttctaccagaaaccattgaaatcgcaaaagcatctcctgagcaaatgccgctacgagaaaagaaagtcagtatgccagatatctcaccctgagtttgaatactacagagctatgcaatttgccaatcaaatcgagtacggagcgggggaaaaactaaacgagactgatcgcaaagatgtaatcattcttcttctctcaaaagataaagcagttaagatgagcgatttaaaaaagaagattcaaaaaactggagtgcaattcaattatgcagatgatcataaagttcccggcagcccgacaactgcctttatttccaaggtgacggacacttctaacgttgaaaatattgattgggaacttttccattctatctggaacgatctcgtgttctacgataaaagcgaaaaactcaaagagaagtttcaaagaagctataacattgatgtttccattgagcagcttaacaaatacaagataaacaccgattacagctcactctctctgaaggcggtacgaaatatcaatccatttcttcagatggggatgctttacaatgacgcagtaatatttgccggaatcaggcgtgtgataggtgaaaaatcatttgatgcaaatgctgatgaaatcatttcacacgtttccaaattgaaagaaaaaaataaccgggatgtgaaccaaagtttcactgatgcgcttcgggaatatgttatgcagacattcaacatttccatgaatcagacgtataagttgtaccatcacagtcaggagatgagtgtccagaacaatcgttactatctcagtgaactaccaaaccttcgcaaccctattgtacagcaagcattgcaggaactgcgaacactcgttaacactctcgtagagcaatatctccctgacggagagcaattcagtaaaatcaaagtggaacttgcccgggaattgaagctcccgagagatgtgcgcagacgaatgcattgggagaataatcagcgggcagagcgaaacaacgatgcaaaaattgaactgcaaaaattcggtctttcacccagccgtgaaaatatccaaaagtatattctttacaaggagatacagaacagcgttcaaggtcaaagtgttcaatgcccctacacaggtcaatccttggctataaccgatgtatttggtaacgacaacaaggttcaagtagagcacataatcccatatagtatttccctggacgacagcctgagcaataaaaccctttgcatcgccgaagaaaatggaaaaaaaggagagaaaacgccgtaccagttttataaatctgatcccgatcactgggaagtagtgaaggcaagagcctttacacttctaccttacgaaaaagcaaagcgatttgtatccacccgtgattacgagccagaagcatttttacagagacagctcaatgatactcgctacatcagcaaggctgcacgggattatctttccacaatttgtgatcaagtctatgttttcccgggcagcttgacagcaaaagtcagaagaatgtgggggctaaactcaatactatcacctccaatcaaaaccaatttcgaaggaaatgcaggaatgtattgggcggtaatgaatgacgacggggtcattatcgaactaagcgaacaggaactccctcctccagcgatacgggcatctgatatccttataagtggagaaatgaaaaacggcatattcaaagttgatcgtaaatttacagggcaaagccaaacacgagaagtaagtgtagagcatcgtacatacgattctcccgggtggatggtttactcactattatcagttgaaaaatatctccctttattctcaaaactaccctcacaagataccaaatccatctggctgaaaggccgtgctcaggtaaaagatcgcgagtcaccatctctcatgttgaattccttgcctgttaaactgatgcttccccctggagaatatgatgataatgccccatattgggtgaatatacccgtgaatggagaacttcgttgggagaagagaggggaaaagccgggtaaaaatgagctattgattaaacgaaccaagcatagggatggaaaagttgaagcttttatcgacaaacgaaagtgtctgttcgatatcccccctcaagataataaatctgctttgattatcccattagaccttcaggagatacttcaggtcgtgcggatgtttacacctactcctgcaatagcggaacatcagttcctcattaagggtaaaattgaccaaagctacagatttaccgcggaaagcaatttcagaatagctttggatgctcctgaaggaaccccatccggccccgcattcgctatagctaactgtgaaccacgggatatgcgtttttatccgaaaaagaacataaaacctaaaaacggaaagggaaaaaatgtcctttccggttttgtgttccaggaagacgggagtcttgtatttaaccccggaaaaaaccgtatggatcatcgacatcacgccatagatgctctgacaatagccctactgaatacggggcagttgcgggaacttagcggatattttttaaagatcaagaaaagacagcgctacagcgctcctaagccacagttcccgttaccctgggacaactttcgagccgatgcattaaattcaattaacagcattctggtggttcatcgccaaaatagggaaataatcaagagaataaaaaagaacacaagacttaatggacgcacatatgtatcccaaggcatgagtgtgcggggtcaactgcacaaggacactgtttacggtaagcactatataccgggaagtgatgaaccgggataccacgttcgaaagcaaataacagatttgacttctctgagtaaaattgctgatgctggcacacatgaaattcttcgaacgttcgtcgaagaaaatggttactccattgatgagaaagaaaaagtaaaaggtgaatggtttacaaagggtaatgattaccaggttataatgccaagctccggtaagcccggaaatccaataaagaaggtgagaatcagggagaacctgggtaatgcagtgcaatggcatacaggtataaaccagtacgtgaacccacgcaataactacgcattcatcatataccgtgattcagacggcaactataaagaacacccggttactttctgggatgctgttcaggcaagacttgctgggaaaagcgtttatcagcttccggaacccggtaagattattaccacccttcacataaacgatacgtttttgcttggattaggtgatgagcagctgcagggagatcttccccaggagcttgtctcacggcatctataccgggtacagaagttgtcttcaatgtattactgcttccgccttcatacagaaagcacattggatcgagattttgagccgtactacctcgggatacaaagcttcaaagcttggaaggaacaaaatccgttaagagtcaaggtagccaccaccggggaggtgaatttagaatgatcaaacgaaccctctacttcagcaaacctgtatacctcaagcaggccaataatcaacttgaggcattttcagaccatgagctgatcacttcagcacccattgaagatatcggcttcctagtcctggataacccacaaattgcatactcccaatcacttgttgcaacccttttggaaaataatgcggctatcatctactgcaatagtaaacacatgccaaccggaatggtattaaacctggattcacaccatcttcaacatgaattacagcgatcacagatcgaagtaaagcaaccggtaaagaaggcattatggaaacacatagtcgagagaaaaatccgcaatcagatagccgtggctgaatttagcaagcttcaaataccagagctactccgtgcatgcagcaaagaggtaaagagcgatgattcaaccaatagagaagcggttgctgctaaatcctactggaagactgtgatgccggagggatacacgcgttcaaacagggacttgttagctaacaaaaaactgaattatggctatgcaattctgcgggcagcagtagcccgttcgcttagcggatccggacttcttcctactattggtattcaccataggaatcaatataacagttttgcactggctgatgacattatggaaccctatcgtccattcgtagatgcacaagtacttcaaacaactacaccggaccgattattgaataaggctgatcttacaaaggaggacaaagctgatatgttaaatgcccttacccgggatgtatattttcctgaaaagaaacgtcctttaagcaatggtctgagcctgacaacggcatctattgcacgacatttcactgacaaaacaatgaagccgatgtttccaaaattcaagaagctatagccatgggacatggggcaatcagtgcctatagaattatgtggatagtagtattctttgatttacccacgaatacaaagcaggaacggaaagtggccagtgattttcgaaaagacttgctgcgtgatggattcaccatgtttcagtattctgtatatatgagagcttgcacaagcaatgaatcggttgaagttcataaaagtcgtatttcggcaatgttgccgggctccgggcaggtgagtatttttagtttaaccgataagcagtactctgctatcgaaaattttacagggaaagcagccacgtccatgccccaaaccccttcccaattggagatgttttaatgaaaaaaaatggcaatcacactaataaaaattcaatgcaattgccaaaaaaaatgaaatggatcagctttaattctttgtgcccaagtagtttgcgaaccatgtattctaccatttcaaagatctgattcaagccacaacgcaaggccggggaacctttcaaaaagccaaattctaccatttcaaagatctgattcaagccacaactaggaccacctatataatcattataattaattctaccatttcaaagatctgattcaagccacaacgtgtcgtcgtgcttccgtcaacggcaaggattctaccatttcaaagatctgattcaagccacaacttaacattaatcggcataaatttcccccttattctaccatttcaaagatctgattcaagccacaacgtaccggagacatgggtttactgattcctgattctaccatttcaaagatctgattcaagccacaacgaagactctatttatgaatactttccaaaaattctaccatttcaaagatctgattcaagccacaactatctgggtcttaataactattacctccgcattctaccatttcaaagatctgattcaagccacaactcctttccggctacttttttcaccagatttattctaccatttcaaagatctgattcaagccacaacaaagaaatgattgacagatggcaagtagagattctaccatttcaaagatctgattcaagcgtaagcgtaaatttaagcctgtaaaatcgacttcatttccaagagttcgtccttaatgttccagggcagtaattcttcccattttccagaaagggcaatctctggtgcacgggtgaatacatgaaccagatagccgtaggggttcaaaccattctgtctggcagtctcgatgagcgagaacatgaaacaggaggattctgccccctgtgggctcccgctgaatagccagttcttgcgtccaagcacaaaaggacgaatagcattttccgaactgttgttgtccggggtgagctgaggatgttcgagatatttcatgatcttgtcccactgcgagagcgcataacttactgcctgaccagtggcactggtggggcgaatgctcagggctttcttgtcgagccatgctttgaaatctttggctaccggtgcaattcgtgccttgcgttcagagataaattcttcatctaacagatcaaggctacgcagttctttctctatacggtaaaacttggcgattttcgaaaccgcctcatgagcgcttccggctttctttgatgacttgcctgcttcgaagaatttccggcgaatatgagccatacagccaacatgtacgatatcgttccggttcttgagagctgtttcgtatccaacatacccgtcggtttgtaagtagcctgagaattctttgaggtaattttttgcatagtctgacccgcggcttcggtgatattcataatccaccacctttttatcaggcgggcctcctcttgcgagccacatatacgatttactggtattggatttttcctcttcattcatgacctggacggtggtttcatccatctgaacgaccgatccggacagaatctgcgctttcatgagggttttaaagggtttcagtagctcgtacgctttctgttgccaatttgacatatcctgccggctgattctcgctccaacccgttcaaagcgcttttcctgccggtaaaagggtagatgatcgacaaacttgttctgaataatgaatgccagaagctccggggtgacaatactcttagggatgatggacggaggaaccggagcaatacggaacaccggtttgtcttcgtccccggaaccttcacatttacggcaggcatatttgggccgtatatgccgttcgacgaaaaactgttcggggatggttttcagtttttcactgacttcttcgtcgattttggagagctcatgaccgcatccacagtgcttctcgtcttccgggatgtcgtggatgacatcgaccctcggtaggtcatcggataatggttttcgcccccgtttctttcgggtatgagacgtgactgttgtaactgtgtctgtggcatccgtatcatctgccggtgtcgaggcgacctgcgactcttcaaacagcatcgtctgcagtaggtcagaagcggactcgctggtgcgggcgaactttcgaaaccgggccagtttaagttgttcctgaaggtcttcgatttctagttcgcgctcagcaagtcgggagtccagtgcggttatatgggtcttgactgcgtctggtaactgttcaatctccgctgcgctcaacatgatctaaattctagcatggactcagcagttgagggaagtcatttcagttacattcgacatactcaattgccttatgggcgtgccaaaaatcaatgccgtccagaatcatctgtagttgggctgtggtgatctgctttgcctgttcctcggtgtccggccagggaaagcggtctttttccaaccgcttgagccacagacagaacccgttgcggtcccaccagatacatttgagtaatctccggttccgattgcagaacagaaacaaggatccagacatggccaagtggttcatcttctgctcgacaatttccgataaaccgttcacctgcttgcgcatatcagtaacacctggacggacataaatatccagttgggacagatcaggaatcaccggaatgccgccaaaactgcttgcagacgttcggaggagattctatccggcaccatgatgcgaaaccttcgatcaatctctattactatatcattggaagaagccatgcgccccttcggttcaatgtggaccagatcccgatttggagattcactggtcatggaattcttaacccgcttcatccagtaatgtagcgttgaaagcttgatttcgtgatttcggcagaactccttttgggtttgtccactttcccgccattgatcggtgatagccttccatttctctacttttttatccataattcctccatgtggaagaattattccatctaaagctcaggttgtgcagggcctggtaaattgacggttacattcaagccacaactcaacagggtttatgaaaataataaccccaattctaccatttcaaagatctgattcaagccacaaccaacgggaaaccttatatcgtgtgatgtcaattctaccatttcaaagatctgattcaagccacaaccgctgtggtctgctaataagctaatggagcattctaccatttcaaagatctgattcaagccacaactaccgccctggcttctttaattcgtctatcattctaccatttcaaagatctgattcaagccacaactgcccctctgaccggatgcgccccggctgaattctaccatttcaaagatctgattcaagccacaaccggcagggctgtttaatttctatccactctattctaccatttcaaagatctgattcaagccacaacacccgaagcaaatagggatagatattgacaattctaccatttcaaagatctgattcaagccacaactatctacgagaatatcaccggcggtgtccaattctaccatttcaaagatctgattcaagccacaactccgccgcagcttaagggctgaatccgattattctaccatttcaaagatctgattcaagccacaacttgagaccggagaaagccgaaacgaagccgattctaccatttcaaagatctgattcaagccacaactctggcctttacagcaaagaggaggttatgattctaccatttcaaagatctgattcaagccacaactcaagttgtttccctggtcgttcgggtcggattctaccatttcaaagatctgattcaagccacaacgaaatgctgaacagctggtacgaagaatatattctaccatttcaaagatctgattcaagccacaacggccaaccgatttatgtctgcttcggttatattctaccatttcaaagatctgattcaagccacaacactgacattatttatgatatatcaatgctgattctaccatttcaaagatctgattcaagccacaacacccatcagaaagtaaaaaatttctgtttcattctaccatttcaaagatctgattcaagccacaacaagtggtggacatagtgaataccgttgaaaattctaccatttcaaagatctgattcaagccacaacaaccgaaagcgacgatacgatgttttctgcattctaccatttcaaagatctgattcaagccacaacgggataggtgtcccactttcaataaaacgcattctaccatttcaaagatctgattcaagccacaactatccgccagttgattgtgtcctcctaaaaattctaccatttcaaagatctgattcaagccacaactcaagaccggggaaggacgggctgatgcgcattctaccatttcaaagatctgattcaagccacaaccactcactcctggttatgatatcgctgacgattctaccatttcaaagatctgattcaagccacaacaatcatgactttcctcttttagaatgggatattctaccatttcaaagatctgattcaagccacaacagtacggcctgagcatggacctgaagcataattctaccatttcaaagatctgatttaagccacaacgactaatagatttaattcttttcagcacagattctaccatttcaaagatctgattcaagccacaacccactataagaatcattagctataacaacaattctaccatttcaaagatctgattcaagccacaacacaaacacccatcgcatgatgtcaacaccgattctaccatttcaaagatctgattcaagccacaacacaagatctgcaaattgatctgtactataaattctaccatttcaaagatctgattcaagccacaacagactctttgggaatgacccactttcgagaattctaccatttcaaagatctgattcaagccacaacaggcaacccgtctaagcgccgccggtcggattctaccatttcaaagatctgattcaagccactattagatatagcgttatcattactatctcctgaacctgtcatttcaaaatctcatctacgacccagctgatgaccccaccccaccgcaccccggcgaacaaattgcggaagttcgaacatcagcctcactccggaaaaagcatcacgtaataaaagtaatttattatacgtgagaatctgtgggcatgggtggtttcaaaccgctcccgcatatgtgccgccccagccggcagggggcgcccattccgggcgcagggccggcaggaggcgcagatcccgggtgcaggcgccggctcccggggggtatgggcaagctctggttttaaaggtccccgatggtggccaccatcaccgctttaatggtgtgaagacggttttccgcctcgtcgaacaccacagagtgcctgcttcggaacacctcatcggtcacttccatctctttcagcccgaatttctcgtaaatctcctgaccgatctgagttttggtatcgtggaaggagggcaggcaatggaggaacagcacctgatcgtttccggtgcccctgatcatatccatgtttacctggtagggcttgagaagtttaatgcgctcttcaaactgatcttcttcacccatggaaacccatacatcggaataaattgcatcggcatccttcacccctgcttgtacgtcatcggtgagttcgatcactgccccggtttcctttgcaagttccttcatttccgccaccagggattcctgggggtggagctgtttaggggcaacggcggtgaaatgcatgcccattttcaccgctccgatcatcaggctgttccccatgttgttccgggcgtcccccacgaacacaaacttcacctggttcaggggcttttcgcaatgctcctggatggtgagaagatccgccagcacctgagtcggatgatacatatcagtaagaccgttccacaccggtactcccgcatatcgggccagttcatccacggtttcctgtttgaagccccggaattctatgccgtcatagtatcttccaagaactctggcggtatcttcaatggattcctttttccccatctggctgttgctgagaaaggttacccgtcccccttcatcgaaggcggcggtttcaaaggccgctctggtgcgggtggatgttttttcaaaaaggaggacgatgttctttccatccagcagattcccccggatacctgagcgttttttattcttcaggtcccggctgagcataagcaggtattctatttcggctgggctgaaatccttgagggtgaggaaatgtcttccttttacattgatcggcatgctgtctccttcgggctgtttcaattgatatctgagcattgcatctgatatctgtattttcatccgggactcccggtcccggttccatattctatcggaactttatgaatgtatcatcacagactgctttaaaaacggccgtctttaccctggtggacagggagaaaacgggctattccgtttcccggtacaggggcatgctcatgcagcggggaccgccccgccctctcaccagttccgagcctggaatttccaccacctcgatgttgtgtttcctgaggatgtcgttggacacggtattccggcggtaggtgaccacacagcccggggaaatcgccagggtgttggttccgtcgttccactgttcccgttcggcggtgagcaggtccccgccgccggtctcgatgagctgtatgcccctgagccccaggctttcactcagggtttttttcaggttttcccgggggatgatgctgagcccgcccttggaaccgggtttaatggagaacaccttgatgtgttcggcgatccccggaaatatgctgaatttatcccggtcaaccatggtgaacaccgtatccagatgcatgtatgcccgggcgaaggggatttgaagaaccagaacttcccggaaccctgtatctttttcaaagatccgctctgccagttcttctattccctcgggacttgtccgggcgctgcagccgatggctattacttccgggctgagaatgagaatatccccgccctctatgctgtctttttcattataatgatgccagagatccaccccggcagaggtgaagcggcgatgatatctggcgatctgctcaaggagcatactttcccgtttccgggcccgggccttcatggtgttcaccgaaagccggtttccgatcaccgtgccgtaatcccgggagaaatagaggttcggcagagggtccaggtagaagggaaatccttccttaatataaaacgataggcgtttttcatcggcggaatggggaacttcattcttgctcagacctgcgagcagggtttgggccaattccccggaggagcgggagagcaggagctggcggatatcttcttttaatgatgcggagttcacgtgcagctcatcaattaccgtattgacgatctgtacccgggcatcctgctgggccagggtttctttcagcagattctcgaagtagagcacttcgatgcctctgcttgtgagctgcagggcgaattcatcgtgttccttctgcatttgctccaggtagggaatatcctcaaaaagcatttcatccagatacttggggatcagctgctccagctccctgctgggacggtgaagcagaatggtcttcagaggatcaatttccgaccggatttgaagcaggggatgtgatctgttactcataccgttctccaatggagattatattaccactgaaatagtaacagtgaaaagcgctttacctgcaaatttgttttattactatcgaagtagttatgatagaatacaggtgagatcccaagggaaaaggagaaatatgatgacagttaaggccggaaccctggttgatatccatatggttcttcttccccgggggcagcgagctccacgggtgccggaagatacggcagcggttgacctggaaatgaaggtgaagggcgaacttctccatgatggcgagaagggctccattgtccggatccgtacggcggccgggagaactatggagggaaccctgacggcggtaaaccccgaatacagtcacggtttcggtgcacccgttcccgaactcggtcatgtaggtccccagctgagagagcggcttgcccaactccgaaaggaggagaaatgaacagctaccaggaagtgatggcccggaagagtgaaatcatgcgcagctcggtgggcatcgattacgggaagtacgcccggggacgtctggccttcgactacgaagggatgctggctgatacggggtatgcaattgatgatatccgcagaattcagcgccaggtggctgtgggaaatactcccttggtggaattgaagaacctgagtgcaatcgcccgctccctggcccggccgggaatgggcgcacggatctttgtgaaggatgaagcggccaacccctctgggtcatacaaggaccgacgagcatccatgtccgcctatgaggcctgccgcctgggctaccccgggattgcggcggcttccagcggcaattacggcgccgcagtggcaagccaggcctgcaagtacggtctgggaagcattattgtccaggagagtttcgactcccggggaattgagcagccggaaattgcagagaagacccgggcctgcgagtcctacggggcggaagtgct

SEQ ID NO: 3652 - DNA, 14744 bp, synthetic construct
  misc_feature 1..14744: note = Synthetic
  source 1..14744: mol_type = other DNA
aataagagcctgccgaaccatctccagagctttcgaaatattcacattattttcaaggtacatgtaagcgagattattgagggcaagcgggtcctccggtaacatttcaagtattttaataagtaccttttcagcattttcgaattgtccggttaaatcatatataaggctgagactcaaaaaatatcccctgttttcaggatcagcagcattcaaccattcatagatcgacagcgcatcatcgtattgtttgagttccatatatatgcttgcctcaagttccttgagtgcgatatcgtcctttatattctttttagcgtcttcatggataatattgagcgcctcattgcttctgtccagttttatcatcgcacgggcaataccgacataggctttgaaaatcgactcctcagaaagtgtcctgatatctttgtcaaaccccatcttgtagtaatcgactgcttcttcaaagcgttccatgtaattcattgcctttccgagggaaaaatacagatttgcgttattttcccccatttgcttaagcaaatcatgcatgtcatgcgcatcactgtccctgccggcataaaaatatactgcagtcaatgtcctcatgatatccgtgtagacgattccttcatcttcgatcttttctctaccgatagaatatgccttttcatagtactttgtggaacaatcccagttgttttcatcaagacaatgattgccgattgttagaattacaaacaggttgtcgggatttttctcgtatgcaccgagataggtttgcattgcatcctcatcacgaccactgtccgaatatagtttgcctaaataaatccacgcctgaacatcaagcggatcacgttctataagattcttgtaaattgaaatagcttcccgtttcaggccgtttaaagctattcgattagcaatttcatatatttccgatgcgggtgtatggatatctccggctctcttcataagaattttttttgcctcattctttttacccagggcaaaatagtactgggaaagctttatcagatcggtgaatgcatactccggattgagtttcatgtacattttaagcgcttcggcagcttcgccgtatctgccttcctgttgctcaataagctgcaaaaaccgccagtaatcgggctccttcggttttagtcgaattgccatcttagtgtaatagtgagccgatcgaatttttttatccatgaaaaaaactttcgcaagggcagcagcaatttcatccgaccgggggtcatactgcagcgcttcggtatatgccccaatagactccgcccagttttctttcgcttccgccattttgccttctaaaaaaaggtctccggcaattttctcgacagcttcctgctctttctctgtcagcttagcctttgtggcagttgcggcacaaccggaaagcacggcggcaatgactgatattgttaagagaaaaataagaaaccttttattctgcatttgaattttcataaaacccccgaatataattgactcctctattatttattaaatgtctgtaaagttaactcaactccagagtattacaattgccttcccccatttatgggcaaagggtcagagatgagaacaatataatgattttagtccccactacctacccatctcccattcgttcctctcgggagatggaataaaaactctcttaaacttttttatgccctattattcctcaactaatataaattcaccatccacttcatcctttttcctgtatgacatgtctaaaagctcaaccggatgaatagtttttatatcaattccttcatggttaaggatgtcatcaatttgaatcttacaagcggggcagggcgttgcgacatattgtgcccctgtatttctaatattttcagccttacgactgccaatttttcttgaaagctcatgatgagtaaatgaaaatgtgccagccccgccgcagcatacatcagcgtctttcatctctataaaatcaactttcggaatcattgttaaaagctcgcggggctcacggtaaatatcctgtccccgtttcagatggcatgggtcatgatatgttatctttattggtaactcggcgaaatcacggtaaatgtcaatgacattgacaagaaactcgttcaggtcgtaaaccggaacatcaaagggctcaacatcaagcagttcctttacatcatgcttgagcgcatccgaacaggaagcgcaatcggtaacaatacaatcgatgtcaagcccgctgaatacccggagatttttttccgcaagctgttttgcattggtgaaatcacccgatgaataaacaggcataccgcagcagacctgtcccctgggaataataacctcgattctattcgtggtaagaacccggattgtagcatcggcaatatctgtaaataaaagatttgtagcacacccgataaagtaaccgaccctcatgatctttttaccgtaaagcgcaggattaatctcaggccagcggctcaccgccggtctcgatgcaaaaaccgggaatttcttatcttccatgccgataagttttggtaacaattcctcgagcattccatcgggttcgtaaaaccatttctgtcccagagatcctgccagagcggataatctcataaaaaatggttttttgattacactgttgaacaccgcttttttaattagatcaagtttccctctttttaccagttcggctctcgccgcaaggacaattctatcagtcctcacaccggaaggacaaatttcaccacacttcatgcagttcaggcagtcaagaatcttttcctgaaatacacggtctaacgtgatacggccctcaagagccgccctggcaaactgcaccctgccccggggtgatgagtattcaagccccgattcctcaaaagatgggcacacgcttctgcagagtccgcatcgaaaacagcggtttatgtcctcaatctgccgttccagtatttcaagtttgtccttaccagccatgttttgtgaacttctccaagagtgcctgagtgaatatttctctggttttttcatctctttccataaaaatcacatgttcaaatgaatgttttttattaaccagataatttaccgtttcatcaacaatagcatgcacatcgacatgcacttcaacatcgtggattcccgtggtaagtaccggaattgccagggagttacatccgatctcattcgcttttaccaggcatgtatacatcgccatacgaatcttttcttcactcgttatcagatcctgaccagaaatgacagcatgaagtatccaccgtgccttcaaactaccggcaccggtcacaataacttcgccaatttccgagggcgcttttccgagagcttcctgctctatggattcaccgcccgattttcgaatttcagatgatattccgccgcccatccagagcatgttattagcaggatttacaatacccatgacatccaattgtgaaaaaggtgcgccccttacttccagccgggtttttccgattttcattgatcttaatccctgtcattctctgtcagactgtattaaatccgaacctctttccggttttttcaaaaatcattgccgctaccagtcccacaaaagcgccggtaataacaccggcacccataaacaccggaattaatataaaaatttcgatgcttttaacaaagagtaaatatgcgactaaaagctgaaccatattatgggcaacggctccgagaacactgataccgacaggaccgaatacccctttggtatatcgcatcactaatgtcatgatgattaacgatgccaggcctccggacagagcgaaaataaaaatcggagtaaagagtcttcccatgatcaatgccccgaggacaattctcaacatggtaacggtaaatgcatcgcgaaacccgaatatcataagagcaagaagtgtggcaacattccccagtcccggcctgaaccacggcaacagcggcaaaaacgactcaaatacaaatattacaagtccgcacgccgagagcatcgagatcagtacaagacgtcttgtagatgaaatgcccggggtcattgtgtaactccatcgaacacgtcctcttcatttcctccgctaatactcacaaaaacccggtttgggacacatacggcaatttcccctctataactgatacgtcccattcgaatacagtagtgatggggacagggagactgaatgattcttgctgttccgttttctattctaatcatcgtttcaccaagggggccgttcacggtttttgtaacgtctgtatcgagcgaaagttccataacacgtcgtccatcaacttccacaaccacatgcttccccctggggtaaagggttcttacacccgctatgcttgccacggacaaaacggaaaaaacaacaataagcagtatatcgccttttgtaacatatttcaacaaactcataccccgacaaaatcaaccggcgagccgcatgacctgcatgcaccgttttgtataccgctcgccttgaccagataaaaggagcgattgacaagtgtatttccgcatttcgggcaaacggtatcggaggtgccttctaaattaatattgccaacatagacataggtaagttttgacttcgcgatctcgtatgctttccggagagtttcaacaggagtctgtggttcagtaaaccggtaatgcggaaaataccgcgaaaaatgcagcggaattgacggattgatcgagcatatccagtcgacgagtttctcaaaatcttcttcggtatcattataatttgtgattatcagattggtgagctcgatatgacaagaatcagcggcaatctcgattgttcgcaaaacatcctccagtttgcctccgcagacttttgaataaaattccggcctcatggacttgagatcgatattcatggcatccaccagcggcagcagttcacgtagcggctcttcgttcacatacccgttggtcaccagaacattaaccagcccacgttcacggacaagatatccggcatcacgtacaaactcaaaccaggtaaacggctccgtatacgtataagccactccgatcaaaccatccttcgatgcaagcccagcaaggtcttccggtgaaacatgacgcgtggatgctttatcctgcgagattccgctgttctggcagaatctgcatctgaaattacaaccgttcgaaccggttgaaagaatgggctttgtcggataaaaatgatagagcggttttttctcgatcgggtctattgaaagcgatataacttcaccgtacgcatcggcatacaatgtgccgtttctgttggaccgcaccctgcatgcccctgtcttcccatcagataaaacacagaaattagggcataaaacgcatttgatttttccattatcaagagtctcataatatgatgcttccatgacaaccttcttttgttttttcaagctttcggcagtcagctaccagcggtcagtgaaaagaatcaaaaggctgaaatctaagagccgaaagctgtgtatttatcgataatttctattacacgctcagcggtgatgttcctcatacaggcgtgtgttccgatgggacagcttgcatgaccatgcactccgcagggacggcattccatgtcttccttgatcaccacgccgcgatcggtataaggccaaaatccaaaattacgaaccgtgggaccgaacagtgaaaaaacccgcacgccgacagctgccgcaagatgttgcggagcggtatccccggtgagtaaaaattccgacctcctgtacagctctgccgactgcctgagtgtcagttttccgcaggtattgactgaaccgggcacactgtctgcaactttccggcagatgtccacatcgggctcaccgccgctgattgcaacggttatcccacgttccgcaaacaaagacccgacttttgtatatgattctgcaggccacatctttgtcgcccagaccgaacccggcgcaaatacacaaaacctgtcaacaccctcaagaaaagtatcaactaccgctctgtcattactgtccggaaaaatatcaggtctgaacccgaccgattcccagcctgccgcaccggcaagcatgaggttacgttcaacctcgtggatcccatattggtaaggcacacgccttgtatgtaacagagcgcctccaccttttgcaaagccgattctggtctttgcaccggataaaaggagcgccagtgctgttctcattgaacgatgcggtatgagcgccgtatgtatttcatgcttacgaagtgctttagcgatccgtataataccgccgatgcctctgtcacagccgcgcttgtcccatacgatgatctcatctataaatggattattctcgagtagattctcgcatccctttctgaccactccgattatgacatcatccgggtttgatgttcgcgcggcttcaaagagaggcgtggcaagaatcacatccccgatgaatgctgtctgtactatggcgatagcgggcattttgaatatcctttgacaaaataaagtttccctaattcagaaccctctatcaaatacgtatttcctgtttgttaataaagtaagtaaagccatcacgccttcttctcatactccctccccttccaaaccatagttttgcttccgaaaaaattgcgcccgccaaggaagaatccctccgcaatctggaaaataagcaccaaaggtatataccagaaatcacctttttcttttccctgtgatgcctgcagtataatgtaataactgaaaatccacgccaggaaggtcgctaccagcggtaaagggttccagggtgcagtaaccagcgagatgagaaacgccgcaaccatcagagtttccactgttatcatgaccttgccgatcaatgaaaggtctgtcacctcgtaaatccagcgaaaccgctggttaataaacgtacctaaatccttctccggagtagaaacaaccactcccctcttttcggtaacccatcccagcgtgtatttcgtgcgcctgacaatgaaattcatcagtgccatgtcctcgacaacgctgtggttcatcttcataaaaccgccgaccagatcataggcttcgcgccggaacgagatgttgttgcccatcagcgacagcggaaaaccgagccctgcgcagcccatggcaaccgcatgcttggtaatgagttcgcagcattgcaggcgatcgaacagtctgcctgaggaaacatccaccctcgtggtactgcctgcaatcccgatattatcgtgatatgccgacaaatgccccttgacccaccccggtctgactacaatatccgcatcggtcgcaagcacgaactcgccggtggattcacggattccgaggttcagtgcccgctgcttgccgggaaggtcatgcggctcatcgactgtagacagaaccctgaacatgctgtcccttgctgtatattccttaaggatgtcaccggtactgtcctccgactcgtcattgacaacaatgatctcaagcctgtcgcggggataatcaagtttcatcaggttctcaagacaccgtcctatatcggtttcctcgttccgtgcacagataacgaccgatacattcggtagctcagagggtagttcacgtggtttcaaacgtttttccccgatggcgataataacggaaacgatcacgtaaatgaatgcataacaacctatggctattgcaagaatatcgagtatcatgtttttcttttccactcccgcccggaaacgttcagcattcagctgtcagctttcagtttgaagacagaagacaggaggataatagctccatttatgagttattttccggcgtttcggttatttctataccattcgagacagaaagttcttcgatacctgcgagccggatgcccttcccggctgaaattactccgatttcccttaaaatatccggcaatgcggcgccccctccgtttacagtgtcatgaaatacctggatggctccgggacgtatgaacggcttgacagttttcattatgtgttcagaagaaacatcgtcataatcgccggaaagcacagtccagagaacaattttcagccccctgtcctttatcacatcggcacaggtaaaatcgaatatcccatagggtggcctgaaccataacggcgtgcaaccggttgcatcaccgattgctttctgggcttcatctatctcatgttcaactgttttccgtttcattaaaatcatcttacagtgcgacgtggaatgattgccaacagtatgaccccgttcggcaacgtccctggctgtatggggatgctttttcaccatatcgccccgcatgaaaaaagtcccacgggcgccgagttcatccaggacatcgagcacagcaggagtaaaatccggatcgggaccgtcatcgaacgttacagccagagcgttcgaattcacaatgccctcccaaaggcagccattaagtatatttttaagaaagttcggaggcacatgttcaagagaatctataatatttttaatcatttacatttcctctgtattcggggctcaccgctgttgtccgcctgccgcgccattcgaacgagccgaaaactccatgcagggttacaaatatgatatacggtatatgtaaaacctcggcaaccggaaatactagcataagccgcacctgtccccgttttatcgctcctaaaaatgtcaacagtatatcgcccgagaccttcaagacaaatcctgccactaacggcccgtaaccgaccacgccaaacagcgccaaaaccagccaaaccggcactgaaataaaaaaagcaaaaaagaatgtcagaagcgcgatcgcacctgctgaaggataccgcaaaatctttgatgcccaccttgccctgcgggcgaaatattctcccggcgattttaccgcattattgtatacagccgtttccttccctgatatgaaagcaacgcaggatgacttttcctttgcgattttctgcatgagcagatcatcatcgccggacaccatgtgtcctatgccctcaaaaccgttaacacgttcgaaagccgaccggcggtatgccagattggcgccgttgcaggtaatcggaaaccgtgagttcatcagtcctgccgccatcgcatgaataccggtcgcctcaagcgcttcaagccagccgagaaagccaccaccttcgacgataacatcgcctgtaacaagatcgatctcaggaacaaaatagctaaccgttctggacacccagctcttcggaatgcggcaatccgcatctgtggtcattatgatctctccgctcgaggaaagaatgccttggtgaaccgcccgtttcttgtgagtgtatggtgactgcgagttccgtgtgtcagtgaagcgaattcttttgtcgtttgcgatcatgtcctcgacaatattcctggtgttgtcatccgaacagtcatcgacaacaacaatctctagcctttcaggcgggtaatcctggttaaggagatcttcaagcagagcgccgatgttcttttcctcgttacgggcgggaatgataaccgataccgggggcgtataattgttttgctttttatgagatctgaaatgccctgaaaccgcagctatgcaggaggaaagataaaccaaaccgccgcagataagaacaaatgacaatataattttcagaatatccataacttcccctttaataaagaaatatccttatttgagtaactgctgtcaaggagaaaggggagattgttgcgggaaaaatatattgcaatcgatatctgataagcaggtcttaagaatcacaagactatttacaacaatatgttatgttttttatagaagacaaaaaataatacttaagataagaaaagttctttaactgtaaactctggcataaagcaatgatattatattaataattgtttacgcatattattaatattgcacaaataaatatagtgaatttttgttgacatatataatatcaagaagtattatattattatatataataattattacatgggaggataaaatgtctaaaaaagtttttgcattcgatttgggaacaggttctctcggtgtcactgttcgtaaaggtattgaatttaaggagatacactcgtacatacttcctccggaatttgcttcgttaaaagaccagcgggaaagacgcaggcaatatcgcacgaggctctctcataaagcacgcgaagattggcttaaaaaaaactgccgtgaagccggaatagaaattcttgaaggtcagaaaccgcgaaataaaaaagaaggaacagaaccaaaaccaggagacccgcgacttgaaagagaatttgctgaaaagggtgatgatacagtttatacctcctgtcttttacggattttgcttttacggggagaaaaacttgaagaatggcagatatataaagcccttcattctgcaatacagcggagaggttatgatcctgaaataccatggaaacacagagctgaacagaaaaaagatgatgattctaaaacagaaaaacaagcaacagaatatgaaaaaaaacttataaatataaccggcggacgtgaagaccgaatatacccatgctattttgatgcgtggaagatgggcttatggaacccggaaacagacaagttggaatttaaacagaagaatactgcagaccgtgcaaggaaaaacgtagcgccgagaaaacttgtcgaaaaagaaatccgcgctcttgtccgcgctgcatccaaagaatatcatttttttaaggataaagaagattacattctttatggcaaaccaaaggaggcatacgcttcatttttccacgaactgcgtttgaagtatggactcagagaaggaagcgatgaagatcagaaagctttactcggacagaaaatcccgcgttttgataaccgtgtagtcaataagtgcgtgctgattccgagaaacaatgtatgcagagcggatgattatgcggttatacagttcacattcctgatgaagctgatgaacctcagattttatgacacaacaaaccatgaacggcgtttattacccgaagacatccgtaaaatattagaagaaaagaaagagaaagccgataaagaacgtgagcttatgaaatcagaaaaagaacaaaaaagagaaattgcaattaaaaccgccaaaatattttcttttacaataaccgatttaaaaaagtggctaaaaaagaatgggaaaaactggacaccgcaggtgttcaataaaaaagaaaaaccagttgaaccgccaaaaacaggcgggcgttcgagattttgcagacctgctataaaacaaatgcgggaacttattctatcagggaagtctcccggaaaattttacaccgaacaattggaactaataacaaacaatgaccctcaaaagggcattgtttggaaagatattgaatttctgctaaaacttccggacagctggggaaaaatttacatacctcagaggacaatcgcagagcagtactcagaaaatgcggaaactcccgatgaggcaattaaaaacctgatttctgccgagattaatccggtaatccgtcaccgtctcggtgtatttgataaaaccctgagccggcttgcagaaactcacggaacccctgaccgtgtggtgctggaatttgtccgcgaggattttttaggcaaggatgcaaaatctgcacttttaaaatcacagcagaaaaacagaaaagcccgcgaggaagctcgtcaacgtgcaaaagaaatcaatgccaccgggaaagatgcttttacaaagttgagacttctaaaggaacagaaatgtcattgcatttataccgatgaagcgttgagcgagagtgaccttgaccttctcgttattgaccacatagtcccgcggtccagtaaatatgatggtgcggacgcactatggaataaggtggtaaccacgtatataacgaacgatgaaaagaaagaccgtacaccctacgaattcctgtctaacaccgggggatggcaggcatactgcgaaagagttaaaaagagcggacttagcaaccgcaaaaagcgacttctttcttctgaaaacccggaagaattcaacgaaaaatacacaaacttagcagaaacagcatggatagcccgtctggcacgaaagattgtctgccttaaatttggctggcagtatggtgaaaaagatgtgaaggaaaaggtcccagtcgtccatggtggattaacatgggcaataagggggaaatatgatctcaattcactacttttcgatgtgaaagacaaaacgcctgatgtaatagaaaaaaagaaccgcgatgataaacgccaccatgcacttgatgcgatggttgtaagtttcttaacaggtcacgaacatgagaaaaaactgcctgatggtgtggcaagacccctgtttgaaaaacatatcaaagacgttctccccgaaccaatcgcgacagaaaagcccgttctcgaagaaacaatatacggaaagagggaattcgggggaaaaaccgttgctgtaaagcgtattgagttagttagtataggaatgagcggaaaaacattcaatgtcagaaaagcaagaaatgatgctgaaaatatccttgatgacagtattagaaaacatattcttcagttccttgagacggtgccagataaagatacatttctggaattctgcaaaactgtccgtcagtcaggaaacaaaggtagtattgtaagaaaagtgactgtatcaaaaggggatattgccgaatataaagaccttggtaaaaatgtcggtaagggacagtacagaagaggagcaaaacacagagggcaatttatttaccggaacacacaaggaaaagtaaaagttcgtcctgtttatgtttttgaatcaaaaaaggatattgaagatgaattaagagaatcaggatacgagacacttgcatttgttcaggcaggatgccgctttgaaattaataaaggggtaactgtgggggagcgtttaattccgccaggaaaatatatttttaatacaataaagacaaaatcaggacaggttgttattgatggggattttccttcaccaagaataggtaaacttattgaggcgggtttccgcaggctaaagtgatacagcaatgagccatcatatagttcatgttttttcccacggcgcacatctgcataaacagcgtggaatgcttatatgtcaggagccggatgaggataaaacacacgaaatcgcaatagaggatgtaaaagcggttgtgattgcggcacgaggagtcagcataacgctcgatgcaacctcggcacttcttgaaacaggagcggttatacttcactgcaatgattcatataaaccggttgggataacgagcggtcttgagcgtacaattcgtcctgacattataagaaatcaagcaaatatatctctaaaacttcatgaccgtctctggacaaaaataataaatgcaaaagcagcaaatcaggcactggttcttgaaaaatgtaacctcaattctctttatctcaggaagagcataataagaaaagatgtggatgaggcgtcatgtgcgaggtattactggtatcattttctcagcatttttaaagaaccttctctacgtcgcagacaagagaacaccggaaacataaattcccggcttaactatgggtatgctgtacttggagcactcattcacaggagtataataattcacggattgagcccgctctttggtatgcatcatatagcacggtataaaacacatccttttgtttatgatcttatggagccatggaggccatttgttgacagtatgctcgcctccttcgagttggacaagaggaatgaggacaggagtatgaacgcctgggcccgccatgttgcaacggggcttcgtgatataaaaatcaaaacaccgcgttttaaattaaaaactgttgatgcaattgatgatttcacatccgccattgcgaaatgttatgggggaaaaactgtaaaacatgcatggatgccggagctttttgaatcatgaaatggagcagttataaaatgggatggatactgacaatgtttgaccttccggttataacaaaagaggaaagaaaggttgcagcggctttccgcaaatttctccttaatgacgggtacatgatgataaatttctctgtgtacgctcgtccctgtgtgaactgggaaaaaatgcgtaaacacgctcaacgtttacagacagtggtaccttccggcggaaatataagggtactatttataaccgataaacagtggttaaattcaatgactgtgataggaagggactacaaggaaacgcatacgcagaaaaagccgaaaatgccccagcagttggagttctggtaaaaaaattcggatgtcatgggttagccattgaaggcggaagagccaggcatccgaatatatcagttaagacttgattgtttgaattttcatcaaacatagaagaattaatactacttaaaagcccttttgtcaagcataaaatttagaacggcacatacttacgaagctattaatataaatagccttaaaaaacaatcaagtcaaaacacaaagcagaaaaagaacgcctttctccacaatataaatagccttaaaaaacaatcaagtcaaaactatagacagtattaccaccgaccggatttgaaatataaatagccttaaaaaacaatcaagtcaaaac

SEQ ID NO: 3653 - DNA, 11886 bp, synthetic construct
  misc_feature 1..11886: note = Synthetic
  source 1..11886: mol_type = other DNA
tggacttccctatgcctgtggaattccttatggtggacttggattttttctctcaagattcatgggtgttgaaaaaaccgtttatgccctttatgatcaacctgaagaaatggtggaaatcatcaatctgataaacaatgtgaatttaaaaggaattgaacttttatgtaactcaccagcggaattgataatgttaggtgaaaacttttcaagtgatatccagccaccctcattatttaatcaatttagttctggatatgttaagagagttgcagagatgctgcataattcggggaaatatcttgttgtgcattgtgatggcagagcgaagggtctccttaaatgtttcgttgactgcaaggtcgatgtaatcgatgcgcttactcccaaacctacaggcgatatgacccccagtgaaatgagggctgaagcaggcaatgaaataatcttttcaggtggagtatctccttttatctggttgcccgaaacaaatgaaaaggattttataaaacatatcagagaatggcttaatttgagatatataagtccacgacttataatgtctgatggtgaccaggtaccgcccgggactgacttgaaaagaattaagttaatgacggaacttgtggcggaatatggaaaatattgagagaaaaatatcctatcatctggtcatctggtaatattaatgagcaacatctttcgtgtttttttaaaccagccagctactattgcgttgaaataaattccgcttgacatatctacggcatcccatataacactttacctgtcagctttctctttattatctttcagtaccatcatttgttggccagaaacattgtataccgtttaaaattggtagttgactaatttaaaacttgacttatatattttaaaattgattattgttattctgacataactgcaaagaaacgctacattaaggagtgaaaccatgaaacgaaggaattttataggaacagctattgccgccggtttgacaggaacaaacccctcgtctgcccttgcagcagctacgttatcgaaattcaaatcaacagggtttaaagttttgccggacaagatagccggaatgagccttgaagaactgcgggatgagtatcacgatctcattttcaaccagtatcttcccttctgggaaaaaggtggttacgataaggaaaacggcggatttatgtgtgagctttatgatgatggttcggtgcagaacgatggaaaagatatctggtatcagggacgcggcatctgggtgtatgcttttttatacaataatttcggtaaggatcagcgatttctggatattgcgaagaaaagccgtgatttcatggtaaaaaatatgtataccggcgatggcatgtggcgtgacacggttaatcgccagggaaaggtcaccgagagtgttggccagggaagcggaaaggctatttacggggcaatgtttgccgctgtaggccttatcgaattatacaaagcaacgggcaacaaagaagatatggaacttgcaaaagcctctatctggaaatcatcgaacagatatgaaaatcccgactatgaaggtgttacggttagggatttcccgaaaaagggattgaggacccaggggcattctttcatgatggtgtgggcgatcacacagcttctgtcgtttcatcaagataacgaactggatggacttgtccgcgagcatgccaatcatatcatgaacgatttctggaatccggaatatgggatagcaaatgagcatttacaacatgattattcacgaatacccggtattgaaactcatatgaatcccggacattctcttgaaacaatgtggatggttatgtttgaggctctacgagtgagaaatggaaccactttttacatagctgcaagccgtatccgccgtatcatcgaaatgagctgggattacatttttgatggcttttgtgatactggatatgatgtttttggtacgaaagatcatcctccgggtcccgtttatgatataaaaaccatgtgggctcacaccgaggttttgatttcctgtttaaccacgctggaatacaccggcaatgtgtgggcaaaagaatggtttgaacgagcatgggcatatacaatgaagactatgattaccgatcatggtgtatggcggcaggcggtggatcgattgggaaaaaataaaaaaagagcgggaataaccatataccgcaaggggaattttcaccagccgcgcgctttaatgtataatcttttgacccttaatcgtatgataaagaacaacggaaagctaactccgtttccgttataatcgttaaaaatacaagtttaaaaaaagcctttctaacatgagcatgggggaatatgccttgcatttctcccattgattttctcttgaaaagtatagaagggagtatagagtggattgtccatttcgcagaactataacccgcaggaaattactgagtaataccgccggcagtctgatcggaataggtgccgcaggactatcggcgcccttaatggtaaaacggcttcatgcatcagctgatattgaatatcgcactctgggaaaaacaggccttaaagtaactgcagttggtatggggtgtcctcgaacgaatgagccgagtatgatcaagagggcggtggatatgggagtaaattttctggatacaggacgtatgtatgcgggcggtagaaatgaggaaatgatcggaagagtaataaaagatatacgcaaagacatagttattcaatcaaagatagaccagaaaatacaaaatgacagaatagccatagaaaaatctattgatgaaagccttaaagccctccagacagattatgttgatattatgataattcgcggcgcatcaactgttgaggctgttaaaaacgcggaggtcatggaagcattcggcaaagcaaaaaaggcaggtaagattcgtttttgtggtttttcttcacatactgctgaggcgtacgagatactcaaggtgggtgttcaaacaaaattctatgatgtcgctatggtaccatacaaccatgccggaaacttccatcacactatttatggaatatacagtgaatgggatcagaatgcccttgagagggaatttgaaaatgcagttaagagtggaatgggtatccttgttatgaaaacctgttccgccgggccgttaaaaaaagaaggagaaacgagaggaacttatcaggccggtcttaagtggattctccgcaataagaatgtaagtaccatggcggtcggtatggctagtttccgtgaggttgccgaagatatcggggcaatggggtaaatggttatataagcataattgattctgaacaaggtaaacgaactacattgcgcaggaatgtagaaggtcaggaatattttactgtaccgaaatcatgagagggtattttcttaatcccctctaaatgttagaattagaaatgcgaaaaagattaacctgtatttataattttggacaacaataggggatgaagtgaatacaataagccgtaaaaaattcttgcttcgctccacattgagttttgtcggtgcaggtattgtaggattgtcacggttcccactaataaaagatgctcatactactgaacatcaggaataccgtacactcggcaggaccggcctcagggttgccgcggtgggattcggaaccactctgaccgatgtacctaatgtggtgaagaaggttatcgacatggggataaatttcattgataccgggcggatgtatgcaggcggcaagaatgaagagatgatcggtaaggttgtgaaggatgtgcgtaaaaatattattatccagtcaaagttctccggaagctacaaaaatgatgagaaagcaatcgagaaatccataaatgacagcctgcgggcacttcggacagattacattgacatcatgctccttcacagtgcaggatcggaagacgacatcacatcctctgctgttatggagggtatggtaaaagccagaaagagcggaaagatacgattctgcggattttcttctcacagctcgagagccggtgagttactgagggctgcagcgaaagataagttctacgatgttgtgatggtgccctataatcatgccggtcattttcatcatactgtatataagggattttacagtgaatgggatcagggaacccttgaaaaagaaatagaacatgctgttaaaaatggtataggtattgtcgccatgaagacatgttctgctggtacactggcagaaaaagagggtggtaagggatcgtatcaagcgggcttgaaatggatactgcgtaacaggaacatcagcaccatggctgtcagcatgggaaatatcagcgaagttctggaaaatatcaaagcgatgggttaaaatagaaaaatagaaaattgaaaacagataaaatatttatcactaaagaataaccggataatcgaaatgtgaggttgcattatgagtttacttgaaaaatgcccagtgagaatagtttgttacagtattgttctattgagttttttccatgtatatgctcaaagtgaaacagctcaaactctgagtcgctttgttatatctgctgatgaaatggatggttttaccattatccgtgagccgagctattacggtcctcagaatctctggaactatataaacggcggcgcgcttccttatctggactataatgtttctgatgtggtaacctacatgatgctatgggttcctgacagtcttgaaatagtggtggatgtttatgatatgagcgatagtctcggtgcattcggcatctactctaatgaacgttttcccgagtacaactatattgatatcggagtggaaggatatctcactgaaaatactctctgtttttggaaagatcactattatatcaaggttttttccaatgtaaattcaccgccgacactcgaacctgttgagaaaatagcccgtactattgatgagcttattccggtgggtggtggtatgtcagtgtatttttcgctgtttcctgccgagaataaactggaaaaaactgaatcgtacattgcaaaaaatgttcttggtcaggactttcttaaaaatgcctttataataaactataaaagaggagaagaagaataccagctttgtttaataaaagctccgacagagggtgatgccagcaggaactttcaggcataccatgattttcttggagaatatggagaactggttaagaagaaggtgtcggtcggtgatgaagcctttcttggtaaagaaggctggtatggttcgatattgtttgtcaggaaaggaactatcatccttacatctgttggactgtcggatatcgatcttgcacaaagatacatacagaatatgatttcggaattaccttgagaatcggaacatagaatcgaataacagtaaattaaaagaagatattgaccacacatcctttcccgaactcatcccttggcccctcttgcctcaagagaaggggaaacgggcgtttgtgtacatccccctctattatttataagagagggggaacgagggggtgagtttcaaaccattgataccccgatccttgggtcgtggtagttcattgcagtaaaacagtgagggggggaacctatactttatgcagtaccaatttccttacgatcatttgagaccacttgacattcccgacagtaatctcatcggagtatttgaggccggtcaggaaaagcctgctgcatctcccggagagatagtaaaaagggctctgaagaatcccattggagcgccgcttctttcggatatggcaggtgaatgcggggatgttctcttactgtgcgatgacaatacacgttatacaccggcatatctcattttacctcacatcattgatgagctgcatgcaggtggaatcagcgacgatcatatacagattcttatcgcctcgggttcccatgctctaatgtccgaagaaatgcttgctgccaagctgggaaaacacattgttgaaacctatactgttgaacagcatcaccacgatcgggaggaagaactggtttctaccggtatggaggtagaaggtgaagaattttttatcaaccggcgactatctgaagcggatctcattatcggggtgggcaacattgtaccccatatgatcaagggattttcaggaggcggcagtatcattttacccggtgtatccggaaagctggaagctatcggaaaaatgcactggcagacattggaaagtcctgttgaagatgttctcggtgtcagggataataagtcacggaaacttattgaaaaggtgacccgtgcagtgggactgcactatatagtcaataccattgtcaataatgatacagagatcctggatgtggttgccggtgatccgatttacgcccatgaaaaggggtgcgagattgcagagcgtgtttttgatgtatccataccgcagcgggccgatattgttatttttgatgcttttgggaatgacctggacttctggcaggctaacaagggtctcaattcatcgtacatttgtatgaaacaggatgcgctggtgatacttattgctgattgtaaacatggcgtttgtcacaatatccccgagatccagcattatggatttaaagacaagaccatgcttctggaattacacgacaggggcgttctcaccccgattgtttcccattttcttctttccattaaccgtatgataatagaacggggacgatgtatcagtgtaacacttggcatttcaaaagaatctgccgagcatgtgggacttctgtatgcggaatctccacaaaaagccctcgataaagcgctctcaatgcaaggtcaggatgcttcggtaatcgtgctccgtcatgccggaaatattatcccacggattcaggataagacttattaacaaaaatgtgtggccttaaatatcaaaataattgatatattagaattattttccctattttttaaatataaaaatagaatacaacaatacttcactatttataattcaatttgtataataaaaaaatcattgacaaattatgatgttttattgtatatacaaatgtattcccaataaattaaaagtatgcaaaaggagtaggattttattataggagtttaacatgtcaaagggtaaaattttcgcattcgatataggaaccggttcacttggtattgcagtgcgtgatggagatgaaataattgaagcacgttcattgcttattccacctgattttgcatccaccaaagaacaacgggaacggcgcagacaatggaggaccagaatagcacataaaaaacgtgaggaatggttacaacaaatatgcaaaaaagcaggaattgaggtacttgaaggaagaaagccaggatataaaaagaagggaataagttcacaaaaaggcgatccacgcttggagcgtgaatttgcatctcctggagatgacacggtttacacttcatgtcttcttagaataaaactattgcgaggtgaaaaacttgaaggatggcaaatatataaagctctccattccgctattcaacggaggggattcgatccgagcattccatggaaacgtaaagctataaaaaagggaataacaaataaagaagacgtaaagaataatgatatgagtgatgataataaagatgaaaaagaaaacctgaaaaaagcacgtgaatatgaaaaaacgctcatggaaataactcatggaaaagaggactggaattatccctgttatttcgatgcttactgcatgaaactctggaatcctgaaactgatgaattaagatttattcaaacacatgaagctgaaagagcacgatcaaatgaattttcaccatcgagacggctggttgaaaaggaattacgagatcttattaatgccgctgctaaacaatgtccttctcttgttggaaaaacagattatataatgtatggaccaacagaaacctcatatgcatcctactatccaaaacttcgcaaacaatacggcattaaagaaggaggagaaaacgactggcaaggtgctataagccagaagattccccgcttcgacaaccgtatgcccgacaaatgcgcactgattcctcgatataatgtatgtcgtgcacgcgaccatcttaccatgaagttcacatttttgatgaaactgaaaaatatgcgatacaaggacagttttcaccaggaacatatgttgactgctgaagatatacgggtaattttcgatgaaaaaacagagaaagtagctaagaaaaaaaaggagttaataactaaaggaactgggaaaaatattgattatgaaaaaatgagtaaaatctatcaatacacatcaaatcagtggacaaattggctaaagaagtataaaaatggttactcatgtgtcaatcatgaaaaggttgatccaccaaaaatatcaggaagagcacggtactgccgtcctgcaatgaggattatgtgtgaccttatactgtcaggaaaaagtccatgggaattttataaccagttattagaaaaaatggataatgagaacccgaaaaaaggattagtaaatgaagatatagaattccttcttaagttgccggacaattgggaaggaatatacattccgcagtatacacttgccgagaggtttatggaaggagaaataaatagagattcggctataaaaaaagtgatcaacaagcagcgggatcccatcatccggcatcgtatggaaatattcaaaaactatattgacagacttacaaatgaatacggtattcccgagaaagttgtaattgaactggtacgtcaggattttttaggtccaaaagcaaaaagagcatttgaaaagtggcagcgagagaatagaaaacgtaatgaagaagctcgaaatagggctaaagaattaggtatatcaggacatgaaggaaggacaaaactacggttattcaagcagcaaaatggttattgcctttacactggtgaaaatcttagtgagaacgaacttgagcaatatgaaatagaccatattgttccacgaggcggaggttataatggttcagatagttttattaataaagttgtgacgaaagcaaaaacaaaccatgacaaaggggatagaacaccatatgaatttctttctcaatctggcaaatgggatgcctatttagagcgagtaaaaaaagtcacatcatcactaggcaagaaaaaatcagcgcttcttacatctgaacatcccgaagagcttgacgaaaaatacacccagttagctgagactgcctggatagcccgtatagcccgggatattgtatgtctattctatggctggcagtacggtgaaaaaggagagcttgaaaaagcattagttgttgacggcaaactaacttcgaatgtaagggctaagtatggtttgaacacgctactagctggtggaaatgaaacagatccggagaaacgtaaggaaaaaaatcgtgatgataaacgtcaccatgctctcgatgcaatggttcttagttttataacaaggaataaaccagatctaccagaaggtgtccacaaggagttattcaggaagtggatcaataaggttgtaccagagcagattgcgtttgaaaaaccgcaactcgaggaaacaatatatggaaaaagaactatctatgaacgaaacaaagaaaaagaaatcattgtaaaacgtgttgatttaaaggatatggcatatagaaatggtaaatatgataaaataaaagcacaaaaagagatacagggtatactcgatgtaacgctgcgtaaacgtcttgaaagatttttagaaacaaatccggaaaaagaaacatggaactcgtttatagataatctccgtcagcaggatcggtggggaagcagagtgaaaaaagttagaatatatgagggtgagccggatgaatacgccaatctcagcaaaactgatgacaaaggacagtttcgcaggggagacaaacatcgcgggcaatttgtctatttaagcgaaaagaaaataccaaaagttagacctgtttatgtttttgaatctgtcaagtcagtaaaaaacgaacttcttaaagaaggatatgaaattattgattttttcaaatcgggatttttaatagagataggaaaatcatttgattataatggacgctttattccttccggcaagtatcttctgtcctcattgagatcaaatggacaagtgcaattgaatagtacacatccaaatctaaaaaatccaattggtatctccgcacttttgaaagccggatttataaggattaaataaagatgagtcaccatatagtacatatttttaatcacggaagtaaattgaaaaaagtccgcggaatgatgatttgccgtaatgatggtgaagatgaagtacacgaaattccacttgaagatattttagctgtcattattgcagcaaaaggtgtttatctttcccttgagcttgtaagggcactcatagaaacaggcgcaattatccttcattgcgaccataaatattgtcctttaggaatcactgccggaattgagcgtattataaaaggagatgccttatacaatcaggcaaacagtaaactgaaacttcatgaccgtctttggaataaaattgttgattcgaaagttaataatcagacatgtctacttgaaatatataaactaaattccgcatttctcagaagggaactaaaacgaacttcagttaatgagtcagcatgctcacgtttttattggaatttatatttctcactcttcagtaatgaaacgatatatcgtcataaaagcgacagcgaaggacttaatgcacgcctcgattatggatatgcagttcttagagcgctccttcatagaagcattatagtacatggactcagtcctgtatttggtattcatcatattccgagatatcattcacatgcatttgtatacgatcttatggaaccatggcgaccatatgttgacaaaatgcttgttgattactggaaaattagcggaaataaagaagatatgaatctatgggctcggtatgtatcgggcaaactcatcgaagagaaaatatttatatcaggccgtaattttaaattgctcgatgcagtagatatatttgtttccggtatagctaaatgttatcacggaaaaactgtacgatatgcatggatgccagcgctatgaaaaggagtagttttaaaatgggctggattcttaccatgtttgatctgccggtcatgacagatacggaacgaagacaggcaactaaattacgaaaattcctgctcgatgatgggtattttatggttaattactctgtttatgcgagaccatgcataaattgggaaaagatgcgcaagcatgcacgaagactaaaagaggcagttccatgtgcaggaaatgtacgtgcactgtttataactgacaaacaatggaaagatgcacttgttataatcggtaaggattacaaagatagtcacactcagaaaaagccccaaatgtcagagcaattagcgttctggtaaaaaaaagaccggacgatgcaggtgaaccatctactaaggttcagagctgtatgtccggtccagtcagttaagacttgactatttacattataacttttttaatccgcacaatcaagtaaaatatcacccccctatttccccgtagttcactgttattcagagtgttataaatatagtattataacattcaataaaaaacagtcaagtcaaaacagctcaggacgtacccttcaacagacgtttattataacattcaataaaaaacagtcaagtcaaaacaagacggcgtcaatggatccggatcaccggattataacattcaataaaaaacagtcaagtcaaaacactgtta

SEQ ID NO: 3654 - DNA, 24701 bp, synthetic construct
  variation 23265..23585: note = note, n is a, c, g, or t
  source 1..24701: mol_type = other DNA
  misc_feature 1..24701: note = Synthetic
gccttctcgtactcgatgccctgtgccttggcctgtgtttcggtgagacccatccaggcaatttccgggtcggtgtaggccaccgacggaatggtcagcggctcgaaaaatgatttgtgtccggcgatgacttccgccgcgaccttgccttcatgcaccgccttatgcgccagcatcggttcgccgacgatatcgccgatcgcaaaaatatgcggtacattggtgcgcatctgtttattgaccgggatgaaaccgcgctcgttgaccgtcactcccgccgcttccgcgccgatgtcgcgcccgttggggcggcggcctaccgccataagcacgcggtcgtacagttgcggttcgggtgcctgttcgccttcgaaagttactttcaggccgccctgttgcgcttcgatgttgccgactttggtcttgagataaatcgcttcatagcgtttttcaatgcgcttgtgcagcggtcgcaccaggtcgcgatccgcgccggggatcaggccgtcggccaattccaccacgctgatcttgctgccaagcgcgtcgtacaccgtggccatctccagcccgatgatgccgccgccaacgatcagcatgcgctgcggcacatcctggagtttcaatgcgccggtggagtcgatgaggcgcgggtcgtcgtaggggaaaccgggaatgcgcgctgtgctggagcccgccgcgatgatggcgtgatcgaagctgatggtcttactgccttctgcggtcgcgacgacgaggctgttgggagaaacgaatttcgcttcgccttgcaccacctgtaccttgcgctgcctggcgagctgcttcaggccaccggtgagttttacgacgacactgtctttccatgcgcgaatttggtcgatgtcgatttgcggttctccgaaaatcacgccgtgctgcgcgacctcttccgcttcgttgatggccttggcgacatgcagcaacgccttggacgggatgcagccgacgttcaggcacacgccgccgaggctggcatggcgttccaccagcatcacctgcttgcccatatcggcggcgcgaaacgcggcagtataaccgccggggcctgcgccgagcaccagcacttcgacgtgcatatcgcctgcttcaactttggcttcgatggtctggctcatggcttcccttccaaaattattttgtggtgcgttccacgcaccatttttggtgcgtaaaacgcaccctacgtccgtatctgcccgctgcccagcacgatgaatttctgcgaggtcagcccttccagcccgaccgggccgcgcgcgtggatcttgtcggtggaaatgccgatctccgcgccgaggccgtattcgaagccgtcggcgaagcgcgtcgaggcgttcaccatcaccgaactggaatccacctcgcgcaggaagcgcatcgccctggtgtaattttcggtgacgatgctgtcggtatgcagcgagccgtaggtgttgatgtgttcgatcgcttcgtccagcccggcaaccacacgcaccgcgaggatcggcgcgagatattcggtgcgccagtcttcctcggtggcggttttcatttgcgcaatgatcgcgcgcgccgccacgtcgccgcgcagttcgacgttcttgtcgagatagattttgcacagcggcggcagcactttcgcggctacgccttgcgcgaccagcagcgtctccatcgcgttgcacacgccatagcggtgtgtcttggcgttgtcggcgatacggatcgccttgtcgagatcggcttcgtcatcgatgtacacatggcagatgccgtccagatgtttgatcaccgggatacgcgcctcctcggagatgcgcgcgatcagactcttgccgccgcgcggcacgattacatcgacgtaatccttcatggtaatcagttcgccgactgcggcgcggtcggtggtggcaatcacctgcactgctgtttccggcaacccggcggcgcgcagcccggcatgcacgcaagccgctatcgcctggttggaatggagcgcttccgagccgccgcgcaggatcgccgcattgccggatttcaggcacagcccggcggcatccgccgtgacgttggggcgcgactcgtaaatgatgccgatcacgccgagcggcacgcgcatcctgccgacctggatgctggaaggacggtaactcaggtcgctgattgcaccgatcaaatcgggcagttgcgcgatttgcagcagtccttcggccatggagcgcacggtcttttcggtcagtgtcagacgatccaccgaggcgctatccaacccgttggcttgcgcggcagccacatctttggcgttctcggcgatgagttgcgcggactggttctgcagcgcggcggcgatttccgccagcgcacggttcttggtggcggtgtcggcctgcgccatgatgcgcgaagccgcgcgtgccgcctggccaacgtttttcatgtattgcttgatgtcttccatgacgtttccctgaagctgatggggcgcattttatcacctcggtatgcagttgtaggggcgcgattcatcgcgccctggtttatttatgcgccagaaaaagggcgcgataaatcgcgcccctacgctaaaatgcacaccgttaaattaaattgcggaaacatcaatgtccgacatcctcaacaaaattcttgcggtcaagacgcaggaagtggcaaaggctcttgccgccaagccacttgccgcaatgtgtgccgaggcgaagcagactacagcggcgcgtgatttcgccggtgcgatccgggccaaaatttctgcggggcaggccgccgtgatcgcggaaatcaagaaggccagcccgagtaagggcgtgttgcgcaccgattttcgccctgccgaaatcgccgccagctacgcacaacatggcgcggcgtgtttgtcggtgctaaccgacgagcaattctttcagggcagcgcggaatacctgaagcaggcgcgcgccgcctgtgcgctgccggtgctgcgcaaggatttcatcgtggacgaataccagatttacgaggcgcgcgcgatgggcgcggatgcggtcctgctgatcgccgccgcgctggatgtggtgcaaatgcaggcattcgaagcgctggcacacagcctcggcatggcggtgctggtggaagtgcatgacgccgtggaactggatgccgcgctgcaactgtccacgccgctgatcggcataaacaaccgcaacttgcgcacctttgaagtgagcctgcaaaccacgctggatttattgccgcgaatcccacccgagcgcattgtcgtcacggaaagtggcatcctcaaggcaaaggacgtagagctgatgcgcggcaacctggtgaacgcatttctggtcggcgaggcgttcatgcgcgcggacaatccaggttcggagctggccaaaatctttggataataaagaattcgctgggaaatttgatgatttctgattttgttttcatatgcgtaaatgattgggcgaatagatggacatcctgacccacggcctgctgggcggcaccctcgcgcaatcgtgcagtaataaaagcgaaacgcgcgatgccgccacagtgggctttattgccgcgctgctggcggatgccgatgccctgatccagtcttccaccgacccgctgctgacgctggagtatcatcgccagttcacccattccctgattttcattcccgttggggcgctgctggtcgcgctggtgctctggcttgcgttcaagatactcaagcgtccgctcggtttccggcgcatctatctgtacgcttttctgggctgcgccacgagcggttttctcgatgcctgcaccagctacggcacgcacctgctgtggccgtttaccggcgagcgcatcgcctggagcatcgtcccgattttcgatccgctattctcgctggccctcggtgcggcgatgctggtcggcctgcgctggcgcaagacgctgccagcacgcatcggcctgttgctggcggcggcgtatctgtccctcggctggttccagcaccagcgcgccgaagatgcgatccgcgcaaccgccctgctgcgcggccacgcgaccgaaaaattgaccgtcaagccaaccatgggcaacctgctgctgtggcgttcgatttaccgttccggcgacatctattacgtggatgcggtacgggtcggcatgggtgaagccgggcggatttatccgggaactacggtgcgcgccttcgatccgctccgtgacctgccgaccctttccacctcctcggtgctgtatcgggacatccggcggttcgactttttttcgagcggctatctggcattgcatccggaagatccgggcctgctcggcgatgtgcgttacgccatgctacccaccagcatccgcccgctgtggggcatccgcctcgatctgcaacgcgcggaaatccatgctccatttgaagcttcgcggcgcatgtcgcgccaagaaatcgagcagttcatcggcatgttaagaggcgcggattgagccgggtaaaaacgatggaacatgtggactacagccatgaggtgcgcaaacaccggctgccgtgggtacggttcgcctttgccgcgctgggcactctttttcttctgctcggcatcgccggtgtattcctgccgatcctgccgaccacgccattcctgttgctggctaccgcgtgctatgcccgctcgtcgcgccgtttctacaactggctgatgaaccacccggttttcggatcgctgatcgtcgaatggcgcgcctaccggagcatcccctggcggattaaactcgtggcggtggtcacgatgatcgtaaccttcggcagctcgatcctgtttttcatcaaggatggccggttacaactggccatggccgttttcggcctgacaatggcaatctggctttaccggatcccatcgcgcaattgaccaaaccggttggcataccggtgtagtattgaaataaccgtgaatcgcccatgttgtgctcgctacatactgcccgacaacgcttatgacgactttccaatttgcgcaaaaccgggccagacgttattccattttcagctcaaacgtgaacccggaatataaaaatataaaaggcttctacgaacaacaagaaacatagtttttttgatgcagtttgtgaagatgtaaaaaactggtatatttagcgcgcttggggtatcaggggatgcccccgcacacagtacgccatgcgtagacactggcgtagacactggtggaaaggttggcttgcgatgcttctcgcaacgacaagcccatagggttaaagacattaaaatggcttcacctgatataacaaacgaaactaccgataatctgcaggatagcctggtgatccccggctatgtttccaatcggtcggagggagtgtttgttaacttgccgaatttgtatttggccggtggtttcgatattttcgtaaaccgcatgtttaccggggattcgcgatttttgaggctggattatgacgcttttttaaagctgatttatgatgctgaatggctggcgaaaatgcagagcaagtgtgtcgagataaaaattgctgatggcatcgtccgttttttgccgcaacgccgggcgctctacaagtcggtgaagttgcttgatggcggaaagcacgccgagtatgtttttgaaccggtcagtatcgagatagcttacgaagagccggtttacggcgaaccgggtgaagacggtgtcgcgccgatcatccggcaggaaagcaagatcaggaaggagccggccaagctggacttcgatgaattcgtcgccgatatgtggacaaaggaagtgaaatacggcatcgatgcggaagcagtgcgcaaggtcatcgcggatggcacaaccagccgcatgacaattgccaattatcttgagcccacgaatgggcgcgatgcagaaattcaggaggtgtgccccggcctgcaccgcgataattcgcctaaaatcctgtggaacggtaaggccgatttgcgtgccttcaagaatcgcttcccccagatagccaggggcggacgcttgctcaagaaaattccgagggtgttgggcaaacaggggtacaaggtaacaggcgagatcatcgaaccaaccattccgagagacctggatcttcccgcgcttgcatcgcttggaactgcggtagtgcaggaaaaagatggcgaatatatcgtcgcgacgatggatggtttcctgactatcgacaccaaatcgaaccttatttcggtcgccgaaaaaatcgagactgatgccggcatcagcatgagaactaccggcgatttgacattgggcgtagatgaattcgtcgagcatggcgaagtgcaggaaggccgtgtggtggaaggcaaacacatgactttcacaaccgatgtttttggcgacctgatttcgttgggtggcaatatccgcgttgagggatgcctggctatcgggcgcgcagaatcgctgggggggaatatcaccgtggggcgcgcctcccgcgccgtaattcgtgcgcgtgatggcgaagtgacagttaaattctgtgaaagcagcacaattatcggcaagataatccgcatcgagcgtgcggtgaattgcgaaattatcggtgaagaggtatatattgacgctgcggagggatgcataattgcggcgatgtccgctaagataatatccgctggcgagagcaaaaacagggagaccttgataaccatattgattcccgatttatcggaattcgaccagtgcattacaaatttgcaaaagaaaattgccgattatcatgcaagtattgcaaccaagatgcgggaaatcgagacggtaaagtctgaaccggaatttgcaaaatatctgtccttggccgagaaaatcaaaagcggtgcaatcaagctgacacaagagcaagccgtaaattggcagaaattggtaacaaaaaatgccaaaatgaccgatcacataaacagattgaacggccaaacaacagtgtttgagcgctcgctcagggaaacagaggaagagcttgcttatgtcacccgcgaccgcgacgcaacaggagaaggcattgcctgcgcgatagataatgtcgtcggcctaaccaccgggcaaacattgaaatccgctaacggggtggaaattttcagcggtatgtcgggtaacgacatcaggatgtttttgcaaaaagtagacagccagaaagcgcggatttttgcgaaagatgacggctcgatcgaatggaaatataaggaaccgaaagatacctgatttgcaaacagcggagacttccgtgtttagtcaaataaagagctgagatggacttgaaggaaacctgtttggatacggccgtggtgtatgaaggcaacttcatcaaggtgcgcaaggatcatgtgcgcgtgccggacggtcgggtgcacacccgggaatacatcgtccatcctggagctgtagcagtgctggcgctgctggataatggcaggctggtgatggagcgccagttccgctatgcaccacagcgcgagttcatcgaattgcctgcaggcaaaatcgaccccgatgaagatatcctgctcaccgcacagcgcgaactgctggaagaaaccggctatgcagccggcgagtggacccaccttgccaccacttggccttgcatcggctatgccgacgaacacatcgagtatttcctggcgcgcggccttacttatcaaggccatcgactcgacgacggcgaatttctcgaagtgttcgagctatcacttgccgaagggatagagtggatcaggcaaggcaaaattaacgacagtaaaaccatcgtcggcctgttctggctggaaaaacacctcaacaactggcgctaacccctgaagcttatgcactgaactggtgcaaaacagcaatgcactggcaataatacgcaccaatttttcttgcacaaaatggcttatggttaataccatattatttttattaataataatcaatacattacaattatggaacacatattgcatacacccctgtgaatcacaccaaaggagatatgcatggaaaacttgaaattcagcaatgacgttctatttgtactgctcggcgcgatcatggtattggcaatgcacgcgggctttgcttttctggaattgggcacggtacgcaaaaaaaaccaagtcaacgcactggtcaaaatcctgaccgattttgcggtttccaccctggcgtatttcttcatcggctatagtcttgcttatggtgtgcattttttcaccggtgcggaacagcttgcgcaaaagagcggctacgacctggtgaagtttttctttctgcttacctttgccgccgccatccccgccatcgtttccggcggcatcgccgagcgcgcccgcttcaacccgcaactggccgccaccttcctgctggtcggctttatctacccgatttttgagggcatcgcctggaatggccgcttcggcgtgcaagaatggctgactgcgacattcggctcaccgtttcacgacttcgccggttcggtggtggtgcatgcggtgggcggctggatcgggttggcggcggtactgttgctcggcgcgcggcgcgggcgttacaacaaagaagggcgcatcgccgcgcaccctccttccagcatcccgttcctcgccttgggcgcgtggatactcacggttgggtggttcggctttaacgtgatgtctgcgcaggaaatcggcaagatcagcggcctggtcgcagtcaattctctgatggcgatggtgggcggcacactggctgcgctatgggcaggcaagaatgatcccggcttcgtgcataacggcccgctggccgggctggtggcgatctgtgccggttccgacttgatgcacccgatcggcgcattgctggttggcggtgtggcaggcgtattgttcgtggtgatgttcaccctgacacagaaccgctggaagatcgacgacgtgctcggcgtgtggccgctgcatggcctgtgcggcgcatggggaggaatcgccgccggtatctttggcctcaaggcattcggcggcatcggcggcgtcagcttcatggcgcaactatgcggcacgatgctgggcgtggctatcgccttcgcgggaggctatctggtgtatggtgcattaaagaaactaaccggcatccgcctcgatgcggaagaagaattcaatggtgcagatttgagcatccacaagatcactgccacgccggaacgcgaatcgggctggtaaattccctgatcggaaacaataaagtctgtcggataactaataaaccaccccgccgcaagcagcggggtattgggtagggtggataaaacgccaaaggcgtgtatccaccgcctgtttcggtgggttcgcgctacgcacttaatccaccctacaaaaaacattgcgccgcaagcggctattgccactccccttgacacctcatcacccatcccctagagttcacgccacttgcgcaaccgccgcaacaaaactgcgccgcaaagcacggcgcggacacggcggataatcagcataggaggctggcgtaaaccccttaccaatcccctctcccgcttgcgggagataaccagcgacttggtcgcggttgttggcgacctagtcgaatggctagtagttccatcagggttagggagagggcgtttttccgcgcacagcgggtttgttattaagggaataacaactgcaagcctccatccttctcgtaattgtgatactcgcgcagcgagcccacatccccctctcccgcttgcgggagagggctggggtgagggaaaacgggtatgcccgttcgtgacgcatgggcgactgcccataacagcccacatgcgatgtttggcttctactgttcgaattcctgaaaatactttcgtaaaagagaaaacccagcagattgctccactgggttttcggatacagactcaacctttcggttgatctttattgtagcaacggctctcaccccggatgatctactacaacggcttcattatcgcggagaacacaatgacaagcaagcaagaaaatctcggtgcactgactttcggattggacatcggtattgcttcagttggctgggcggtgctgggtgaaaaccgcattatcgaccttggggtgcgatgcttcgatgcagccgaagataaagatggcaaaccgaacaatcaaacccgaagaggcgcgcgagtatcacgcaatcgctttcacatgcgcacttggcggctgaagcggctaactcgtttatttcgagatgttggcttgctttcaaaagaagaaatcaagcagttattctctgccacacgccagaaaaatcagcctcagctagtcagcccatggtcattgcgcgcagaaggcttaacacgaaagctcactcagcaagaatgggcgcaagttatttactacttcgtcaaacatcgcggcttcaagtttttcagcaaaaccgaagacccacgaagttcatctgctgacaacgaagccacttccgttgagcaaaaagagcgtgatggactgcgcgatggcttggaatacaccgggaaaattctcaaaaaatatccgcagtttgaaaccatcggtaacgccgcccaccacctcgccaacgcacagcaaggaagcgacggcatttaccgagacaaagatggcaaacttctcgaagccacagactgcgaggaattccaagaatcatttcgcaacaagagcaagagttatcgccacgcattccatcgggatgacttgatggacgagctgaacaagctgtttgaggcacaacaacagccacaattttccaacccctttgccaacctcgttcttcgcgaagatatagaccgattacgcgaagtgcaaatcagctcggaaacaaggactgttggccctacgttccacgatcaagtattcgccctgctcgaattgcaacatccgccgatttacacgtcacaaatggatgcgctaatcggaaaatgcgaactggaaaaaaacgaactgcgcgccgcaaaaaacaccttctcgaatgagcgcgcaacttggttacaaaccatcaacaacctgcgcatcaaacgcaacggcaaggaagatactctctcaccagacgaacgcgcccttctcatcaacctcccatacacacaagccaaattaaccttcaaacaagcaagagacgcactgagagcgagtttgggattcccagcacattggcgtgaagcaagcttcaccaaagttacatatcgcaataagcgcaaagacgatggaagctggatcaatgtcgtagctgccgacggatcaaatatttcattaggcaagtacgggcaagacgatgttcgtaaaaaagcaaataaggaactcaagaagcgacttgaaacaggcacgatgactttcgcagaactgcgccaattattcgagttgaaagaaggcgaggctttcgagcacatatgtaacgaagctgaaattgttcccgcttcgttggaaaccacctacaccattcctgatggcaaaaagacattcatcaaattactacccgccaaaagcaagaagcctatcacccttaaaggcagagcgatgaaggcactcgcggatttaagcagtgaaaatctgaatgccacgcttgccgatctcaggctggcaatcgaacaagcagatcgtttggaagcgggctggcaatttgaatacagccgcaaggattcaacgcccatcaaactagaaaatgaggcgacaactcaagttccaattgaatacgaagacgcacagaaggcagaagaagaaactctcattgaactcaagggatggcacacctttaagcgcgctctggaaactgagtgttctgactggtgggcaaacctgcaagtcgcatatctcgatccgcagtccgatgccgggcaagctgcggccatacaactagatgcaatcgccgaattgctgaccaaagcgcagaccgatgccgatgtagaaaaagggtttgccgcgttggctcttaccgcaagccagattcaggcattggagcgagtgcgcttcaagcaatatcgcaacctcagcctcatagcattgcgcaaaattctacctagtcttgaagctgggaagagccgcacagaggcttgcaaagatgcaggctacaaaactgaaactcaccagcgcagcaaacatttaccgccgctggaaacttatctttacgagcgcgtccgccacggcaaaaaaaccaaatacacggaactgcgctacaaggatttaaccaatcctgtggtggctcgcgcattcaatcaagcgcggctgatactcaatgcgctgatagaccgatacgaccagtcacctgcctacgtgcatgtagaactcgcacgtgacctcgcaaagtcaaaagaaaagcgcatagaagacaaaaaacggcaggacgaaaatcgcagcaaacgagaatccattcggggaaattttatagcgacctacaagatcgacgagccgacttcaacgcaaatactcaaggaacggctttaccatgagcagggttgcaagtgcatttacacgctagaagaacttgatttaaaccgcgtagttgacgaccctaactatgcgcagattgaccacatctggcctcgctcactcacctttgacagcagcatggaaaatcttgtgctcgttcatgctcacgccaatcaagacaaaggtaatcgcattccatacgatttcatcaatcagaaatatggtaaagagcattggcgcagagtgatggcgtatattttgggctgcaaaggcataggcggtaacaaacaaaatcgcttgattaccaaagaactggatgccgacgaattcagtgcgcgcaacttggtggatacccgctacgccactcggttgttcgcgcgcatggtgcgcgatcatttgctattcgatggtcaggttgaagacaaaattgaagacattgacccatcggaaagtggaaaatctaggcttgagaaatttcacaaaactcgcgtccgcacaccgcaaggtggcctaactgcttttttacggcgcggctggctaaacgacattaaagaccgcgaatcaagcgacaaacaccatgcgctggatgcatgcatcgttgcgacatgcacaccaaaagtcatcaacgaagtcaacagttatttcgccaatgaagagcaagtaccaagccgattcaaaagactcgctgatgggaagtatgcagataaaggtaatggtggcgaaatcatcagcaaacaggaagctcgcgagcgcggcctctacctgccgccgccatgggatcacttcagagcagatttttttgaaaaatatgaagccattatggtttcgcgggtcgtgcgcaagaaacgaagcggggagttacacgatgccaatccattagccttccgaaaactctccattccacttgttgatcttagcgaagatatgctgacttcgttatccatacccaaagaatttcgaattaagcaccaggagattttggatgatctcgcgaaaaaattgatccaccacggcggcgatgccaaaatagcgttcgatcaaccgcacgagatcattgatcgcaagggaaacatccaacatatacgctcaatttcgttacctatagtcggactaccagcgccatatcttgaagcacggctaaaaccacttaccaagaaacaaaagcagtccgccctgctggaagataatcgtcgcaatcaccagcgcgtactgctgtgcaatctcacccttgagatgctggacgatgcacggcttggcagtggctaccttaaccgtaataagaaagttattgatgcgcttaaagcctgtctaaaacacttcgacggcgacagccgtaaagcattctcagatggttttgttattgatggcggagatgggaaagcgattcgatccattcggttgccgttgtggtctgatgaagtttccgtccaagcccacaaatcagcccctctaacgagcttgagcttggataaacttgatccgaagaaattgggggcaacttactatcaccgcaacaaaaaagtcattgacgcactcagagagcggttaaatgaattcggcggaaatgcaaagaaggcattctctactgagagacgcaaggatggcgaagccaatgtcgaaaacaaaccgaaaacacgcaaagatcgcccgttcgatccaagcgactatggaaagcctggtccgattattcgttctatccgtttgccggaatcatgcggattgggcacagacatcaggaacgggattgcaaagcttggtgcaagccagaaaacagaagtgtattggactggcaccaactattttttccgaaaccgatacggtctggatgatgaacaagttcgcgggatttcagaaccaccctcggatagcaagatacttttcatcctgaccaagaacgattatgtgcgtatcgtcttaaaggacggcgggattaaagaaggatattttgtcttctaccccgaagatggtcgtatgcaagttcgtcggcacgacttgccgaagatcattgactatgtagcacatgaaactgaggagccatcagaaggtgaggaagaatctggggaaaccatcgagccgacgaatggaaataagaaaaagaaagtggttctcgcatggcgcattcctgaaagccagatcgtaaaaatcagtaaattcaaagtcggtgtgctgggcgacttgactctaatcgctgactcaatgcctcatggtctggcgtagcgtagtcatttcgcgccccgccaagctgcggcgcgaacaattccggcttgccgtcgaacaggagcaaactgccttcgtgccgttcgaggacattgcggtgattgtgctcaatcatcgcgagatcacgctgacccatccggtgctatctgcctgcggcgaatacggcatcagcctgttcgccacaggcgacacgcatcatcccagcggagtatttctacctttcctgccgcactcacgcgccacgcgctggctacgcttgcaactggatttgccgcgccctgttgccaagcaggcttgggcatccatcatccgcaagaagatcggcaatcaagccgcctgcctgcggctggttgggcgcgatggggcggatcggctggactcttacgcacggcgggtgcgctccggcgatgcaggcaatctggaaggacaagccgccgctttttatttcgtccaacttttcggcaagggatttcaccgtgaacaggcacgcttcgccaatgccgcgctggattacggctatgcgattttgcgcggaaccatcgcgcgcggcctagtggcgcacgggctgctgcctacgctggggctgtttcatgccagcgaacaaaatgccttcaatctggccgatgatgtaatcgagccgttccgcccgctggtggatttattcgtaaccaaaatgatgccgcaacccgacgacgaattgcacccggaaaacaaggtagctctggtcggtttgctcaacacggatattggcatgccacgcggaaagatgtctgtgctttccgctatcgaacacaccatagaaagccttgcccgtgtgtatgacggcggcagcgatacgctgctggaattgcccacactcattgggctggaacagcaccgcttagagtgctgaaccatgagaagacagccgcccatcccggttttgtcattcccgcgaaagcgggaatccagtctgaataaaagcgctggattccgggtcaagcccggaatgacggggtaaaaatgagcgaggagacacgacggttcatgcgcctgcttgttctcttcgacctgcccgttgtcaccaaggccgaacgccgtgcctatacggtattccgccgctttctcatcaacgatggctacgacatgatccagttctcggtgtatggccgcatcctgaatggcaatgacgcgctggaaaaacacatgaaacggctggtgaacagcctgccgccagaaggctcggtaagatgcctaaccgtgaccgagaaacaatacgccagcatgaaactattggttggcctgccgctttttcaggaaaaagcactcaaagttaatcaaatgctgctgttttagacagtgatttttcaagcagaacgcccgcccagattaagctgggcgggcgtttgcgtaaaagctattgtagagcatccggggtgagagagggagctacaacagaaattgcagaagaatgtctgaaagttggattgtagagcatccggggtgagagagggagctacaactaccgctgcggccttcttctcgttccatgaattgtagagcatccggggtgagagagggagctacaaccctgcttctggtgtggcatggtaaacgccgattgtagagcatccggggtgagagagggagctacaacaaaagactggctgggatagagaggattttgattgtagagcatccggggtgagagagggagctacaaccagaatgcgctgctcaagtcggcgggtcatattgtagagcatccggggtgagagagggagctacaacttccgcatcggtagaggcttcggcttcaggattgtagagcatccggggtgagagagggagctacaacactcgtggaaacgtaaaggccaaactcattattgtagagcatccggggtgagagagggagctacaacgacaggtgcgggttgtcagcggcggattccattgtagagcatccggggtgagagagggagctacaacagaacgacgagggacggattaccacggtatattgtagagcatccggggtgagagagggagctacaacgtgtgggagcgacgctatgacaaccaaagaattgtagagcatccggggtgagagagggagctacaacaggttgccgatactgccagttcgatagcgaattgtagagcatccggggtgagagagggagctacaacgcgcagacctacttgcaggaagggcgtagcattgtagagcatccggggtgagagagggagctacaacgggtagcgagcgacggcggcggatgaatggattgtagagcatccggggtgagagagggagctacaacgttgaaattggcatccatccagatgaaacgattgtagagcatccggggtgagagagggagctacaacctagtcattaacggccagcgtgtaactcaaattgtagagcatccggggtgagagagggagctacaactatgccccaaccaaccctgctggtggcggcattgtagagcatccggggtgagagagggagctacaacgctggattcgagaagctgtacggaaccgagattgtagagcatccggggtgagagagggagctacaacgctaacgttgtattctccgtcattgtgtgaattgtagagcatccggggtgagagagggagctacaacatcgcctgatggaacctgtcaccttggcatattgtagagcatccggggtgagagagggagctacaactgatcgcatcgcccatcacctgagcaaagcattgtagagcatccggggtgagagagggagctacaacgcaagaaccagagcaacctctggctcttgaattgtagagcatccggggtgagagagggagctacaacttgattgtagttgatgaggcacagcgtcatattgtagagcatccggggtgagagagggagctacaactttttcggcacgggtgcgcagctcttcttcattgtagagcatccggggtgagagagggagctacaactcgacgagctgccatcgcgcgcgctcggggattgtagagcatccggggtgagagagggagctacaactgaccacgcggtacaggttcactagttcgcattgtagagcatccggggtgagagagggagctacaacgcgcagtatgatggagtcaaccatcccggtattgtagagcatccggggtgagagagggagctacaacagttcaggtggtggaagtggtaccggcgcaattgtagagcatccggggtgagagagggagctacaacgatcatcccgatctcttcgccgacctgtagattgtagagcatccggggtgagagagggagctacaacgtcaaaacaatgaatcgttatatctaacttattgtagagcatccggggtgagagagggagctacaacggtttaaattgaagctcgatggcttgcgctattgtagagcatccggggtgagagagggagctacaacgctcgccgacatctttgctgtgatgccggaattgtagagcatccggggtgagagagggagctacaactcgcagcgttggggcgaagtgctgctattaattgtagagcatccggggtgagagagggagctacaacaccaaactctggtgtcagcgtgttctcgacattgtagagcatccggggtgagagagggagctacaactcgggaagatcgccgggttggtggacatgcattgtagagcatccggggtgagagagggagctacaacacattattagtatacctcaaggtaggcaagattgtagagcatccggggtgagagagggagctacaactgggaaatcaccaagccgggcaagcgcgatattgtagagcatccggggtgagagagggagctacaaccgaaaactgtagttccaaactgccaaagcgattgtagagcatccggggtgagagagggagctacaacggcgatcaacgccagcccggcaccggtcggattgtagagcatccggggtgagagagggagctacaacgcatcttggaatgggcggactggcgcttggattgtagagcatccggggtgagagagggagctacaacgtgcgcgccggccgcttcgtgcctgatttcattgtagagcatccggggtgagagagggagctacaacggacggattcgcatcagaggtcgaagtgatattgtagagcatccggggtgagagagggagctacaacggccaaaacgaatacccgctctctgcgatgattgtagagcatccggggtgagagagggagctacaactggcctgccggaacaagtctggtcggccctattgtagagcatccggggtgagagagggagctacaaccggcgacgtcgatgtactgcggcgacagttattgtagagcatccggggtgagagagggagctacaacgcattcggcggggtatcgagtgctattgcaattgtagagcatccggggtgagagagggagctacaacggcaaaaatgaagcaagacatcaacattgtattgtagagcatccggggtgagagagggagctacaacctgaccaacatcgccgacggcacgctggcgattgtagagcatccggggtgagagagggagctacaaccacaacgacaccgtatgtaccgtggaactgattgtagagcatccggggtgagagagggagctacaacgctgggacagccgaccccgtaaaggggtcatctgcccagcgttctcgcttcgcgaggttttgcaggaaagggcaaatacctgttgtacataatgagttatatctgtgatcgggaaataccgatttctgatacgtcgtagatagcgagcagccaagcagctggttaaccctagcccccccttgaaaggtagggagcaaaacagaagcgaccgcagtccatatattcttcagtttaagaatgtataatggactggtcgaaacttttgcaagagggcatgatggaaacagcatggacaaagcaactgagtgtcgggaatgcggttatcgattccgaacaccagaatttgatagtcatgatcgaccgcatagaatccatgattaaagcgaatgaagcctccgccctttcacaagaacttgagcgtttggaacatggcttatgtgtccattttataaatgaggaaaggcttgcgaaggcggttaatttcccttttgacaaaaataaacaggaacacaaatttgtgctgaaggaattccagcgcatgaaaggcgagttgctggcccaaaatggcaaatggactgacagcgcggcaacacattattccaatttcctgagcgactggttaactggccacatcatgagggaagatatgctgatgaaaccagtgctgcaaacatacgactataaattctggcccggcgggaacgagggcgataccaactacacagccggatctatggcaagcctttatctggagcttttcggtacgcctgtgccctgatttacttataagtcgtctgccgcaccttgcggatcgcaggcctggttacagttttatgataagccaacaaaaaacccgcctgagcgggttttttgtttgagcggttttttgccgaccagcgaaacccggctaaattacttcagcttggtttccttgtatgcaacatgcttgcgtgccaccggatcgaacttcttcatttcgatcttttccggcgtagtgcgcttgttcttggtcgtggtgtaaaaatgccccgtaccggcactggattcgagtttgatcttttcgcgcattgccggctccttaaacgtttacgccacgggcgcgaatttcaaacaacaccgcatcgatgccattcttgtcgatggtgcgaagcgccgcattggtcaagcgcaagctgacccagcgattttcactttcaacccagaagcggcgacgttgcaggttcggcaaaaaacgccgcttggttttgttattggcatgggaaacattgtttccgaccatcgggccttttcccgtcacttgacagacacgtgccatagttctactccaaccagttttcaaaagagcgcggattctaccgaaagaatcgggaatgttcaacctgaattttacgtactcttggctgctgggcagcattgaacggaatgttgcgttactcgcaatttgcaatatcaagtaccaacaagccgaaatatatagatatttcgacctatacacatttatcggctaaacgtgtagagtcacttttccctctcgacaaaaaatatctccgccccgccattaaacaaggacagaaagtatgcatgccgagtcagatataaaagctgccgaacaagtgttaaatggaatccatttaccgccctgcccggcttcattgctggcggcgatgaaagaagcgcgatcgcccgacgcggatatggggcggatagtgcgcctgatcgggcaggatgtcggcttgtccgcaccgatgctcaaactcgccaattcgccgtatttcggcctgcgcaacaaagcgtcttcggtgcagcaggcggtcgcggtgctggggctcaggaatacggtcaacctgctcagtaatgttgcgttacgcgccaatgtagtacccaaactggctggcatggatgaattctgggatcgctccagcatgaccgctttggccgcatcccgtatcgctgcacaggttcccggcgtatcttgcgacgatgcttataccgtaggcctgttccacgattgcggcgttccggtgctcatgcagaaatatcccgattacctcaagaatgtcgatgacatgtcgcgcatcagcggcaatatttgtgaaaccgaaaacgcctgttattcgaccactcacgcggtggtaggcaatctgctggcgcgtaattggctgttacccccgaacatgtgccgcgcgatcctgtgccaccacgaccttacggttttttcctcagctaccgaccagaattcgattgagatttgcaattggacaagcattgtccaggcggcgggatatattgtggattcgcatttggacttgcgtaacgatgggtgggcgacatggcaaccgctagtgttgaaacacctgcaattttccgaacaggaattcggcgaattgcgtagcgatatagtcagtgcgttgagcgaagattagcggcaggaaaagcaggcagcttcctgcgctgttaatcctcccgccggtgacatggcgcgaaatccatacctgccaatttaatttccgaccggacgggcttgcccgatatgtattccctactgtttcttcgaatgggtggctttaacctttcccagccccgccattgcaccctttaattgcgcctcattcatttcacccaaagctttcaaaccggcacgcagcacctcgcttttcttgacttgcagcccggccttaaggcatgtttccttgatttcagcaatcttctgatactcggctttaggcatggagaaactatcgtgcaccactttcactttagatgccttttcagtttttttcgccgccggtttcggcatcaccacagcttttttggctgttggctttgcggcaggttttgccactttttttgccgtagcgggagccttatcgattgcagttttttttgcttcagtcttatcggtagtcatttttccctctcaattatgtaaagtggcgcgaacagtatatgcaatacccgccaggaataaaactgtaatatttgcagcctggttttgcggctgcatatcgaggcgcgcttaacgccggaaaggttgctacggcttatgtaatagcatagggttcagtttgattgccttgctgttcgcccgtaccaaccctgcgtggcattggcgatctttaccaccagcaacatcaccggtacttcgatcaatacgccgactaccgtggccagtgccgcgccggactggaagccgaacaggctgatggctgtggccacggccagttcgaagaagttgctcgcaccgatcagtgccgacggtgcggcgacgcagtgcgccacgcccaggcggcggttcagccaataggccaggccggagttgaacaacacctgaatcagaatcggcacggcgagcatggcgatcaccagcggttgcgcgacgatggcattgccctgcaatgcgaacagtagcaccagtgtcaccagcagcgcacccatcgagaacggtgcgatgcgctccatcgtgtgcccgaacccgctttcgccttttgccaacaagtggcgacgtaacaactgcgcgatgatgaccgggatcacgatgtaaaacaccaccgagataaacagcgtattccacggcacggcaatgctggcgacgccgagcaataacgccaccagcggcgcgaaggcgaagatcatgatggcgtcgttgagcgccacttgcgacagcgtgaagtagggatcgcctttcaccagattgctccatacgaacaccatcgcggtacagggtgctgcagccagcagaatcaaacctgcgacatagctgtcgagctgctcctgcggcagatagtcggcaaacacatggcggatgaacaaccagccgagaaaagccatcgaaaaaggcttcaccgcccaattgacgaacaacgtgacgccaataccgcggctatgcgccttcacctggtgcagcgcgccgaannnnnnnnnnnnnnnnnnnnnnnnnnnnnnnnnnnnnnnnnnnnnnnnnnnnnnnnnnnnnnnnnnnnnnnnnnnnnnnnnnnnnnnnnnnnnnnnnnnnnnnnnnnnnnnnnnnnnnnnnnnnnnnnnnnnnnnnnnnnnnnnnnnnnnnnnnnnnnnnnnnnnnnnnnnnnnnnnnnnnnnnnnnnnnnnnnnnnnnnnnnnnnnnnnnnnnnnnnnnnnnnnnnnnnnnnnnnnnnnnnnnnnnnnnnnnnnnnnnnnnnnnnnnnnnnnnnnnnnnnnnnnnnnnnnnnnnnnnnnnnnnnnnnnnnnnnnnnnnnncagtgcgcggtggcgggcttacccggccaaactgggcaggtttctccggcggcgttatcgcaaacggtgaagatgaaatcgaactgcggtgcgccggatgctacaaactcatcccagcttttgctgcgcagcccttcgatgccgtgcccctgctgttgcagccattccagcgcatacggattgacccgcccgaccggtttgctgcccgcgctatatgccttgaatctgcctttacccaggctattgaacagcacctcgcccaggatactgcgcgcggaattaccggtgcataacaccagcacgttataagttttattttgcaaggtatgctccttataaagaatgacgaaatcagaattatttgaggcaacctaatccgggtgaaccggaattaaaaattgagcgcagtcttctcgtaggttgggcaaagcgcagcgtgcccaacaagcgaagatattattaatgttgggcacgctgcgctttgcccaacctacgtgctacgcactgattatttatttcccggtttgcaggcatccgggtttccaccgcagcagttttccgtcagatacgccaccatgccgttcatcaccgtaaaattcgccgcgtaataaataaagcgtccgtcctgcctgctgtccagcagcccggcatgactcagcgtcttgaaatggaacgacagtgtggccggagacactttcagcttttcggccacctgccccgccgccaggccatccggcccgcgcgccaccagcaggcggtaaatcgccaaccgggtgggttgcgccagcgccgccaatgccattaccacttgagccggtttcatcattttatatttccattgttaaacaattattaaaatgtcaggtaagattaaagcaaatgttttcggaaaatgcaaaactactttttctcagcgggcgtgatgcaacaaatctgcaacagtgctttaactcaattgaaacattctgcaactatgctgccgcgtattccatccatagaatatttacgatgaaaacgctccaggacatattgaaccaacgcaacctctccgcactgtttcagccgatcatggatatttccagcggtacgtttctgggcttcgaggggctgatacgc

SEQ ID NO: 3655 - DNA, 7870 bp, synthetic construct
  source 1..7870: mol_type = other DNA
  misc_feature 1..7870: note = Synthetic
tcagcaaaaacaaagaactgggcgacttattaaaagagctgcacgaaggattgaatacgggactcttggtgctggtcgcgctgcacattgccgccgcactcaaacaccatttgattgataaagacagtaccttacggcgcatgttgccgttttaagcgaggaggaatgccatgcaaaaaatgatctacaccatcgcccacagtaggtgcgaatttattcgcacgtttttggggcagtgcgtgcgaataaattcgcacctacaactcacgtgttgcacagtgttattactggggatttcaccgctaggacacgccacggaatttacccaaatcgtccccgccaaaagcgcgctcacctttggctacaaacaaatgggcgtgccgatggacggcaagtttgggcaatttaccgcacaaatgcgttttgaccccgcccagctcaccaccgcgcaagcccgaattgacgtgaaccttgccagcatcgacacggggtcagcagaagccaacgacgaagtcagcggcaaattatggtttaacacccgcgcctatcccaacggacaattcgtgtcatccagcgttaaagccttaggcggcaatcgttatcaaaccttaggcacgctgaccttaaaaggcaaagccgtccccgtgtccgccgtgttcaccttcaaacccgatggtgcgaccgccagctttgacggcacctttgtgctaaaacgcttggattacggcatcggcgaaggcatctggacagaccttggcaccgtggcaaacgaaatacaaattggctttcatctgattgtcaatgcggcagccactaaaaagtaactaacgcttcggcggctctttatacccccgcaaatttacctgcaaggcttgatttacgtcgtcaacgcgttgcgaaagctatattcagcacaggtattggaggtgtttgatgcgtaaaattctgccagagaggtaaatcatggacgcgagttgtcccatgagtggcattacttttcatttttaaagccccttagcggaatatcacgtcatcacgacgttatgcacctacttaattgtaactattgacaaaattcaatcgcatcttatcaggcactggcgggaatcaagttgaacggcgttctacacctgtatttacaatcgcgcaagtaattagcagataagccttatgtttacatgggttttatgcaacaaatttaagcattcgcgctgattacctgcactctcacattctcagtgtttgttcacttagggcatgaacttgttatgccaagccaaataatccctatttcaccattggataatatcccctttggtatcataatcgccacgttccagatttatccaaaacttcaatcacataaaaggaaagcccgacggggttaccatcgggctttggatacagtcatcataatgatttctcaatatgacttctttattgtagcaacggctctcaccccagataaactacaacgggtgggattatcagggagaacagcatgacaagcaagcaaaagaatttagggcaactcactttcgggctggacattggcatagcctcggtgggatgggcggtgttaggcgaggatcggattgtggatatgggcgtgcgcgcctttgatgccgccgaagacaaagacggcaagccgaataatcaaacccgtcgcggggcgcgtgtctcgcgcaaccgttacgacatgcgaacatggcggcttaaaaaattagttcggctgtttcgtgatgtggggatgttgagcaagctagagatcaagcatttgttttctgcccagcacgacaaaaatgtgctgcatgttagcccttggcaattgcgcgatgagggactttcacgaccgctcactaaccaagaatgggcgcaagttatttttcaccttgttaaacatcgcggattcaagtttttcagcaaatccgaagacccattgcagtcggttgcagaagatggaaacacggaggataccgctgccaaggcagagcgtgacggtttgaaggatgggctgtcctatactgctaaattgctgaaaaaatatcgacaattccaaacgctggggcaagcggcttatcagcttgccaatgcccaaaaagaccgcctcaatacttatcgagattcattcgggaatgccttagatactgaagattgcgaggggcaaaaagaaaaattcgatggcttccaaaatgcctaccgcaacaaaggaaaaagctatcgtcacgcatttcaacgcgatgatttgcaagctgaactgaatgcgctgtttgatgcacaacacaaacacggcaatccctattcggagcttactctccctgatagtgtgtcgcatttgactgaaattgctgtgagttcagaaaatcggcaggttgcacccacttttcgcgctcaagtatttgccttattggagttgcaacatccgcccattggcattgaacaaatgaacgccatgattggtgattgcgagttggaaaacgaagcgcgcaacggcaaggctgaaaagcgcgctgcaaaacatactttttccaacgagcgggcaacttggttgcaaacgctcaacaacctgcgcattaaacgcgatggaaaagaaacgccgcttaccgagcaagaacgaagcattttgctgaacctgccctatacacaggggaaattgactttcaaacaggcacgggaattgttgcgcgaacaaacgggctttcctgcacactggcgtgaagcgggcttcaccaaagtttcctaccgcaacaaacgaaaaaataacggtgactggctcaatgtcgtctcagcggacgggacaaaaacaacgctgaacaaatacatcaaaaacgaaaagacgcgcaaagaaattaacaaaaatctcaaagcacgccttgaggttggcacaatgacttttgcagagctgcgccaactgtaccagttggtagaaagcgaggcttttgaatatcaaagtaaaagtgatgaaattattcctgtcgcactggaagatcaatatctcattgcgttcgacaaactggacagtaaaaaaatctttatcgaactgatgcccgcgaaaggcaaaagcacgaaaaaattctctcccaaggcgatgaatgcacttgaaagtttgcgtacccaccttaacccaacctttgcagatttgcgcattgcgatagagcaagcggaacaacaggaatctggctggcaatttaaaacaaggcaaaaagacacacgccttattctgcttgaaggcgaagccagtgaaaatgtccctattgaatacgaagatgcacaagaagttgaagacaccaccttgattgaactaaaaggctggcacgcattgcggcgcgcactggaggataaccatcccgcatggtgggcaagtctgcaagttgcatggcttgaaccccaatccgaggcaggcatggcagcggcaaggcagatggatgaaattgccgaagtgctgaccaaagcacaaaccgacgcggatgtcagaaaaggctttgaaccattgcaactggacgacaaccaacgtgccgcattggaaggcattcgtttcaagcaatatcgcaacctgagtttgaaagccttgcgcaatatcctgccctttcttgagcaaggaaaaagctacaaagaatcttgcgatttggcaggataccaacccgttacgcctcccgcccgcacacggcatttgccaccactggaaacctatttgtacgaacgtgtgcgccacgacagggcaacaggattcaaaaaaacgggatataccgaacaacgctacaaagacttaaacaatccagttgtggcgcgggctttcaatcaagcgcgcttggtactcaatgccctgattgatcgctatgaccagtcccccgcgtatgtgcatattgaactggcacgcgacattgccaagccattgaaaggcaaatggagcaacggcaaatacatcgaagggcggcaggatatttccaaaaagcaggaagaaaattccaaaaaacgtcaatcggcacgtaacaactttgtcacaacctacaacatcagcgatccaaatagccagcagattctcaaagaacggctgtatcaagagcaacaatgccattgcgtttattgcttaaaagaactgttcattggtgatgtggttcgggatcgggattatgcccaagttgaccatgtttttccgcgctcactgacatttgataacagcatggaaaacttggtacttgtacatactgggtgcaatcaaaacaagggcaatcgcatcccttacgattacatccgtagcgatgccatgtttggcggtacggatgcccaacgtgccgagcattggcgcagggtagcgttttacgtcatgtcctgcaaaggtatgagcgataacaagcaaaaacgcctacttgccacagaactggatgccgacgaatttcgggcacgcaaccttgtggatacccgctacgccactcgtttgtttgctcgcatggtgcgtgatcggttgctgtttgacggacaaaccgccgaccaaacggatgacattgacccagatgaaagcgggaaaatacgccttgaaaagttccaaaaaacccgcgtgcgtaccccgcagggcggtgtggtttcatttttgcgcggcaagtggctgggcaatatcaaagaccgtgaagcaggggatacgcatcatgcaatggatgcctgcatcattgccgcctgcacgtccacaatgattcttcgcgtgaataactggttctctaatcaagagaaagtccccaatcgctttaaaaaattggacgatggtaaatatgctgacaaaggcacgggggaaattattagcaaagatgaagcacgcgaacgcggcttgtatttgccgccaccgtgggaggggttcaggaatgaattcctcgaaaaatatccgtccgtttttgtatcgcgtgcgattcggaaaaaacggaatgttgagctccacagcgcaaaccccatggcgttgcggtattaccccgtgaatttgtgcgacttgacgttggaaatgttggatgaaaagcagcttccacccaatctcccagtgtcacgattgtctttgattgaggctgttcgtcgtcatttgtcggtttgtgagggtgatgctgttgaagcatttaaagatggttttacaatggacaacaaggatattatccacaccgttcaaattccgcttgtttctttgccacaggattatttgaagcaagtaggtaagcaactcggtaaatccaacaataccgctacgagaaaattaccgcttaatcagctcacacttaaacaattgagtgtggaggctttgggggagactttctatcatcgcaatagccgaatgattgatgcacttgtggggcagctcaagaaatttgacgataaagcagacgaagcttttgcaacctcgttttacccatttggcaaagacaaatcacccatgaaatctgttcggctgcctgctgataaaccccataaagaaaattttgaagataccgctcaaaaaaatgtttcgctcactcaacttacactcaaaaaattgactatagcggaactgggcgcaactttttatcatcgcaatagccgtatgatcgaggcaatcaaggcgcagcttactaaatttaacgataaagccgatgcagcatttgccgagactttttatccattcggcaaagacaagccctctattaaatctattcggctacctgcgccttgtggctctggcattcatgtccgtggcggggttgcaggtttgggggatgcgctgtacacggaaatgtacaagctcgaaggcgcattttggtttcgcgcacgctataaagtaccaagcggtcaagcttttggcttgccagaagtgccagaaggtgccgaacacacttgcaacctctcaaaaaatgactatgtacgcatcaaacatcctaatttcacctattgctaccgtgaactgagtcgccataaaagcgtcagcggcgaaaccttgattagtgtcgaagctatttttgaaaatgggatttttgaagggtactggaactattttgagcctagcaatgatcgccccgttgttcagttgcacgacggcagcccgttttttctgctcgctgacgggaaaatgctaagtaaaaaatcgttggttttgattgaaagagcaaaggcaaagaaaaaagacaatgcacccgatgagatggaatatgtcgaattttgtgaagcaccgcaaaagtcaccgctcaaattttccttggtgacagatattaaaaggaaagttaatgatgctgtttttatcgaaaaggtaaaaatagatattctcggctcaattcaattggaaaatcgcaagcatgacttggcgtagcgtggtgatttccaatcccgccgcacttaggcgggagcattattcgctggcgatagggcaagcgcagacggcgtttgtgccgtttgaagatattgcggtgatcgtgttaaatcatcgcgaaattaccctgacgcattcggtgttgtctgcctgtggtgaatatggcatcagcctatttgccacgggcgacacccaccaccccagcggggtatttttgccgtttttaacccattcacgggcaacgcgttggttgcgtttgcaattggatttgccgcgccccgtggcgaaacaaacgtgggcaagtattattcggcaaaaaatcagcaaccaagcccactgtttacgtttatccaattgcgagggcgtggcgcgtttggaatcctacgcccgacgggtgcgctctggcgacacgggtaatttagaagggcaagccgccgcgttttatttcacgcaattgtttggacgtggtttttaccgtggacaaaatacctacgccaatgccgcgctggattatggttatgcggtgctgcgtggcacgattgcacgcgggctggtggcgcatggtttgttgccgtccattggcttgtttcatgccagtgaacaaaatgcctttaaccttgccgatgatgtgattgagcctttccgcccgctggtggatttgtttgtgatgcagcgcaacaatccgcacgccaatgaactcacccccgccgacaaagcggctttggtcagtctgttaaatgtggatatatccatgcctcgcggcaaaatgtcggtgttatccgctattgaacagatgatcgaaagtttggcgcgaatatatgacggcggcagtgaaagcctgttggaactgcctgtactcatcggcattgcccagcatcaatttgaatgttaatccatgagtacggagacccgacgatttatgcgcttattggtgtttttcgacttgcctgtggtcagcaaagcggatcgtcaggcatataccgtttttcgtcgttttttgattaacgacggctacgatatgattcaattttccatctatgggcgcatcctgaatggcaatgatgcgttggaaaaacattaccgccgtttaatcgaacatctgccgcccgaaggctcagtgcgctgtttaagtgtcaccgaaaagcagtttgcaggcatgaaaatgctggtgggtttgcctgcttttcaagaaaaaaaggtcaaaatcaaccaaatgttgctgttctaaatgccattttttacacgcaaaaagcccgtctagcctaagctagacgggctttttgcgtggaactattgtagcgcatctggggtgagagagggagctacagcggtaagcgttgataatagtccaatgcagcgattgtagcgcatctggggtgagagagggagctacagcgcgagggcttgcacctcgcgcatggtctcgattgtagcgcatctggggtgagagagggagctacagcctaaccgttccgctgctaatgcttcgcttcattgtagcgcatctggggtgagagagggagctacagcaacaaagacacgctcttcaccgccgcg

SEQ ID NO: 3656 - DNA, 23246 bp, synthetic construct
  misc_feature 1..23246: note = Synthetic
  source 1..23246: mol_type = other DNA
ttgcatcagtggataagacaatgtaaaagaaatgatgtgctgatatgtagtatctgtagtggtgcttttgcattggcacaaagtggtgtgttgaatggactgaggtgtacaacgcattggaagcggacaaaagaattgcaggaattatacccttcgataaaggtggaagagaatatactttttactgaagatgacggagtgtatactagtgctggtgttgctgcaggtatagaccttgccttatatatattagagaaaataagtgatagctatacatcccacaaagtagccagagaactggttgtgtatacgcgtagaagtggtaatgaacaacagtataatgagttgtatagtttcagaaaccatattcatgcaggtatacataacgtacaagactggctgaatgaaaatctgcataagaaaactactatacgggatcttgccgctatcgcacatatgagtgagcgtaattttaccagaacatttaaaaaagaaacttcggtaactgtaaacaagtatatcacaaccttacgcatacagcgcatacagcaattgctgaataatcctgatgtctctaataaagaaattgcccgtttatgcgggctcaagagtgaaagacaattagccagactaatagctgcaaacaagtagaaaaagctttggcaatttatatgtgcatttgtcaaggtgcccattcataataattatgctcttcatcaagcaagaatgatgtagacttataaaggctgttagctgcaatattattctttgcagtttcaagtatcaatgcacaactggagacttcaacgcagtgtttttttacagcctctatcagtagttttgatatgcctgtgcccctatagtcaggagatacaaacaaatcgttcaacaataacagcggtttcatccttgtagatgagtatagaggataaagttgtacaaatccagtaataatattactgctattgactgctatgaatattgtagaagcattatataaaattagcgtgcgcaaaaaaaacgtagcaccttctatgtcagagttctttttatagaataccctgtactggtcgaataaaagagatagttgcacaatatcttcttctatgcacttacggattatcatacacgttattttataagcggataatacttttcttcgagaatattcagatgccatctttgatggcctggcatacaaaaaccaattgatgctacagagtattctcctttgaagcccataccttttctttccagcatttctggggtaaaagattccatcattgctttgaaagaaagacgtgtttgcattagctctgttataagactattaagtgatctcttatttgcattagacatcatttcgtaagcgtcttcatcaaaagataacatgcgttgtttttctcccctggcaaaagccaatgcccggtacgtgaaaattctttctgtgtctataaggtgttgcagaatgttttttacagtccacttaccaggggcatataccgtgtcccccaatttttcccaaatgtcaacagggaacttgtagatttcatcaatacttgtctggatggcttctgtaatatgtacatcgtcgcattgcagaatatacctgtcaaaatattcgggtagttgttttagttcagatcgtttcatgtgtaaattttagcaagaatacatactactcacgtacgattacagacaaaataaagcattatatagccactagtttagctttcttcataatatataatggctgtatgagtcttgattatgactatatcggtcaaacttacagttatagttttgtgtatatcaaagtattgctattatgtatacgttatgtacaagcctcaaacttattatttgctcgattttatcagtcctgtgcagtatatcttatgcgcaagcgcaaaaaaaaacagaacagctcgtgattataaaggataaagaactaatagtaaaaccgtctgcttcatcttctgaagcagattttgattttttgcaaggcaaatggaaggtccaaaataagatgctgaaaaaaagactggataataataatgaatggatcgagttcgaatctacactgcatctgaccaaagtattgacagggttgggtaatattgaaaatttttattcaagctttaatggtaatgattttgaaggaatggcgataagattattcaattctcagaccaaactttggaaggtctactgggtagatataaatggctgtactatggatgaacatccggttaccggctctttccaggatggagtaggtaagttttacactaaagacagttttaatggaaaggagataattgtattgtatcagtgggacgctactgatattttacatccgaagtggtcgcaggcctactctgaagactatggacagacttgggaattcaattggtatatggtgttaactaaaaactcctagcttttagaaattaccacatctagctatagatattaattctaaaaaactagataaaactaatgtccattaattttacagttgcttatattaccggcgttttcagcatctaatatcactctgaattgagcgctccaagtaggtatttataagtattgttctagcgagtgaaatattgacgaaatatatgattttctgaaaagctaatttctcattctgtttgttgctaagctatttcaataattcttagttacatagatacctgtgtatattttttgccctcattcacataataagtacacaatagcggtttagtttgtaaagtgcaattaaatagcatagtgcttaaaaagcaactatgctacccaaaatatttattagaatctataccctagatgaaacgtgaatctaaacgcaaaatcaggacttattgtatttttatatcccaccatattacctcctatagctaaatcactgcctataaacacatgttttgaaaacattatggtaatagagttgttaaataccaaacccgcctcatatcttgatgtgaattgtgtttcagtcttttcggattggctttctgctaatcgcgtgtttgtttcgctagaagcattttctaagaggcagctacaattactgttaccaacaccagttgaagcactaacacccataccatataccatccgatgatttttgcctgcaggatagaatttaatgcccgggtatacgcggagcattcttgtcttttctttagaatcacaagggttgctattgccaaaggagtatgaaataggtagtgtaatactccatttgttgtctataaacttttcatactgaacgctaaagcctcttcgcgttgtttgtgttactacaaaaggagcaacagagatatagtttgtagcgttgtaactatcctgtgcacttgcttcatagcacatcatggaaagcatcaataaagctattctttgcatagtatcagattttatgttgtaaacgattagcagcaaatcatattgtagtaaggcaaagtaatctaaacttattggccttgaatgtctattaaatgaccaactatggcacataattacatcactcatcaagctgcagttttgccaaagttatatagactaaaaatgtcctacttttgtctgcttctttcttatctaaagcataataattgcagtcttagataattatgaaagtgaatgctattctgatactgctaataattttgctctttgatgcatcagcacagaacttagtgcctaaccctagctttgaaatgtataataattgtccaatagggttgggagatatctcttattcaccggcacacagtagttttccaggaattaaagattggacaaatccacacaagatagctacaccagactacttcaatacctgtgcttctatagtatcaggtgttaatcttcctaataattatgttgccacaaagaacgccagaacaggaagcggagctgtagggttatatgtattagctaataatctggcaactgaatctaagtactcggaaaatattcaatgtaaattatcacaaaaacttaaagcaggggttaagtatgaagtttcattttacgtttgttatgcaaattctactggccttaacatgcttcatgatttggttgcagttgataatataggtgcatctatagacaatttcgcaattgccgatactagttcgtcaaagttatacttaactgaaagttacgaggtagtcaataaaagtggaaattttcttaccgacagtattaattggacaaaaataacaggatattatatagcaaaaggtggcgaacaatatcttactataggctatttcgatgacggatctcctcaaaactataccttagtttcaagtggaccaggactatctccaacgatacgtgcttattattttgttgatgatgtttcattaacagaagctatagtttgtgacacaatatttaaaacaaaagacactataatctgcaattttgaaccatacagtctacagctatcatccacaaaaaatagtgctgtttacaattggagtaacggtagcacggctcagcatataaacgtcgactctgctggtatcttttggtgtgaggcaaaaaccggttgtaatcttactgttgatactttcaaaataaaacctgcattgaaccattcagggaacataaaggatacattagtatgtgaaggcgtcccattcgtattggaaacagataaatcggataaatacaaatggaacacaggagattcaacccagataataacaaagggtaaaactggtctttatatctgccagaggttgaaaaattgccatatagaaatcgatagctaccgtgttgcctttcattctttcagcataccagagttgggaaatgatactataatttgtaaaggagatttatatacactaggcaagcagttaccttttgtaaagtataagtggaatactggcgacacaacttgctgcataaatatattacgcgatggaaactataagcttacaacttataatacatgcttgagctattccgactctgtaagcattggttttacacagtgtgataattgcttttttattccagatgcctttactcccaatggagacggtaaaaacgatttatttggctgtatatcacaatgcgagtttggcagtttttccatttccatatttaatcgctggggagaacaagtatttgtagctaacaatatatacgacaaatgggcaggagattataaggggacatatgctgaaatgggcacctactattatattattaagtacagggtatttaaaaggcagaaaatagaaattgctaaaggctcttttattttgattaggtagtaaaatagaaggttatatttctttataacggtatgataggggcttacagataacttgagatagtgattcattgttcttcaattttaatgtcattaaacaaaactatagttcaacaaattcagtacttaaacctgaacctagttataaaaattttcaggtaagaccattttagcattcacgaagatatacctgaagtatgttgagattgtgtgctgacggtaaatgaatataaataatagctcttatacccctagtctatcttttgttctattattgggaggaagttgtacaattggaagtgagtgcgcaacggtattgtaaagctaattattaatccaagctacaaaaagtaattcaaaattttatagtgttgattgcatactgagcctgtgctccaattgttgaataatcaatattaatttctgtagccctactatagttcttgtttattaagctgtatgttttagtgcttttttcagacgttgatttgtaaaatgattagcacaaaatctctctgattattttgggttaatccctgagtatattaatgataatcatttgtacactggatttgaattcctgaaaaacatgcccttatttgactgtttattggcttaaatcaaccctttaattttcttttttaaacacgtctttgtaataagaaatcataaagacatgaaatttccttccaaaggataatacatgtttaaatgtttctacttcaaatgcgactatgagataggaatatagctttaatactgggttagaaataaatatgtggccgctaattattgatataaggccaagcttaatttcatgctcagctgtgatttagaattattttctcacaatcataataaaatgaaatctaaaatgaacaaaattttcgctttcgctgcaatgctaatgctgactaaaatcagttcggcgcaaactacatctttaccttatagcacagggtttgaaaacaataatccaccgtcatggcaagtttttcgaaaaggtgcacaagatccggccagcatctggacttttaattcagttggtgcatacgctggaacaaagtgtctgtatcatggttacccgacaagtggatcaactgccacagatgattggtatgtatccccaccgtttgcttttactgctggtggaaatcttgattcattcagggcttcatttacaggtttagggatgccagacatcggtgatactgtggctatatacctattaaaaggttcagccgaccccgcccttgcaactagcaagacgcttcttcttgattttcgtggaagtaattatcaaactggtataggatggaggaagtttaccggtattactatccccaacactctaggcaccagttacattgcatttaggtatcggacagttaacaactggatggacgttagcttcgacaatttaagtgtcagtggcaaaggaggcgcatcaggggtctttgacaattcacttggcggtaggctttttaaagtttcaactagccctacatgtgcatcgctaacgattgaaaatgctataggagcaaatgcttcattgctcaacagtaatggacaacaaatgttacagatagttttgaatacagaaaatgtcactacagacattagctctttacctgtaggcatttacttccttcaactcaaggataagctcggcaatcacagtatagtcaaggtcttaaagaatcaatagtttgaaacatttatttcttgggaagcctgcaagtagcgggctttttatttcaactcatacttaatattaatcaatgcgctttaatcttgtttgcattggccttattatgttctgctctacatacgcgcttattagctttgctagacaacgttcaagcacatctggtgcgacaaagagtatagttataccatttacacttacaccgcataaaagtattgtagtccgggcattacttaataaaagagatacaattcggctaatgttcagtactgcgtctgacggagtttacctcatcaaagatgtgaccggtaaattaaaatcgctgcgcttcaatagcgtacaggacactatcagcagttggggtaaatctgtaaatctttctagaagcagtgaaaataatacgctacaaattggcgacaaagtctggaagaatctaccaatcactgaagacataaactccagttttgagacagatggcaaattcggcatggctctgtttgctggtaaggttgtagaaattgattttgataggcttctaattatagtttcaacaaaattaccatttaaggtcaaacagtacaaaagactgaagttatccaatcttcaaggtctatcacttgttgaggcaacttgcaaaacaatacgatccagtaccagacgtctctttctcttgcattcgggatatgatggcggtcttttacttgccgattcttgtgaacaggaaccatgccttcaagatgaattaccgagtttaggtgaacaaaatttggaaaatgcttatggtgaaaaaatccgaagtaggcaatctgtaatgcctacatttattcttggtgattatgtattaaacaatatacaaattggttttattgaagggctattaaacaatcgtcgaatcaatgttgcagggagtgaaattatcatacgtttcaatattattatagatgcaaaaagacgaaacatattcgtacgccctagtcatttcatgaatttgtaagattagttgttaacatgctatgtcagaacttcagattatcgaccgttgtaaacgacttattgtaacaacaaattagccccaaagcgcatttaataacttacaacattccgaaataggtagacaaaacgatttattaataccgtccttgtgtatcaaataagaagatacatcggaacaatattatcctaaagggatacctagtatgttcttggcatatatgtatcagcgtttatcctagaaaatagctcgtgtaaaaccgtcaaagtagcgggaacaataactatagtagcatctgcatacggtttgatgataaccatattaaagataatagaccagcagcattaaacgcaaaggacagtttatctcttgctataatttttcgaaatatgcatttaaatttgataacaaagatatttagaggaaacacaaacaagatcaattagtatataattagcacatgttcagacaaaactcttattggattcattagaagtataatgacacagtataaaatctatacaatgtcagtttgtatcaattatagttgctatacacttatagtatcaaattgtgccacactcactactataagctatcaaaatcgtgtgcagttttcgctataataaatctgtattaaggtacattctgtggtatagcaattatgactccattaaaactgtatctgttgtgagtgcaaatggtgtacaactgaaaaaagggctccaaagtatatactttgaaactcttatcaattatgtgaagtctacagggatcgaaccaaacgatattaaaaatcagatatttacaaatagcaaaaaaataattcaaaaaacgtcaaacccctgaaaaaacgctacagtagcgactttcaggggctttaaattttagaaagtggagtctacggaacgagtgtcgaaccaactgaaggactttttctggcgtatttatcccctgaaagacaatgtaggcttaactttaagcagttttcactgagtctatttttcaaactcgttcaaaatataatattttagaaaactggtaattattgataatatgagcccgttagagtcaataataaaggagccaataaggctcctttattatttaatgtatatgcaagtgatattccaactcctaacaagtgtaaactttatacaggatagacacaaatttcttgctcattttcaggtagcatttgtagcattttacataagtcattgataataagtaagataattgcaaatccagcatttttcattgtagcagatttcgagcaacattgtagcaaaatctgaatacaaattaccatggagcaattacatttgtcaacctcatcgtacaaggtgatagcattaacaataatcataggctgatagctagctcacagggtaaacagattcattaagtatgtactggaattttccatcctataccacacttcattcgtttctattgcactccgcttcacacttctctcattcagtctggcatagtccatccgctgtttgatggcttgctcgcctgcgctaccaacggctgcgtaatggatttttgcttgcacaaactttagctgaatagcatacagcgcaaaaatccttcactgagactcacaccgcattgcatgcttatgtgctcacaccagcctttggagctcgcaactacattctctcaatgcttcgttcatttcgttttgaaagcgagcagtgaaatataaattgtgtaaaaaaaatgctccagaagaactggagcagaggcttgtcgcctgcggaataatcacttattgtgataagctttcaaatcaaagataagaaatatcataaactataaaacagattttcaaatgagtagtttgaaagttcaaacatcaattttaaaacacaaacttgtttgtaagagaataattcattaatttttgacttaatatttccttacataaaaccttatatgtaagctataacctatcaagaattagatttttactttaaaagtaataaccatgaaaaagattcttggtcttgatatcggcattaacagcattggttgggcgttaattgaagaagataaaaaaataattgattgcggtgtacggatatttcctgtcggagtaaaagaagacgattataataaatctggaagtgaaatttcaaagaatgcttctagaagattagcccgtagtatacgtaggggatatttcagatataaattaaggcgaaagacattaattgcaatattaggagagctaaatatgcttcctgaaaataatctcatacaactgccatcaaaagaactgtatgcccttagaagaaaagggttagatgaaaaattatctttagaagaatttggcagaataatattgttgctaaatcaaaggaggggttttaaaagcagcaaaaaaggaaagacggatgaaaaagaaagaagtgttctaaagctcgaaatgaaagagttagagcgaacaatagttgataataactgtaggactattggggaatatttttatttacttttccttaaaaatactgataatgaaaatacttataacactcaagagccaacagaacgaatacgaactaaacacgtagacagaaaactgtatagccaggaatttgacctattatgggggaaacaaaaagactattatcccgatgtactaacagagaataataaaaaacgaatcaaagacgattgcctgtactatcaacgaaagctaaaatcacaaaagcatttagttggtaaatgttggtttgaaccatctaaaaaatgctgtccggtaagcaaaatagagtttcaagaatttcgaatctggcagttaattaataatatcagaataactaccggagatcgttatagagaatcgcttactgtagaggaaagaaataaactattttacttactgaatgtaaatgaaagctgttctgttacacaaataaaaaaagtactggaacttacacacgtaacgttcaatgaaatacctgaaaagattaaaggtaacactactcatgcaagaatcgctatagcaatcggcagcgattattggacatttagtgctgaaaagcagcatcaattatggcatatattattttttgctgatgatgaagattggctataccactatgctatagataaactagattttacagatattcaggctgaaaaatttgctgcagtattgttagaggatggctatgccaatattagcaccaaagcgttactcaaaggtagagaaggagatgttattgagaatggaattttgtttcatttgaaaaatggcatgagctattctgaggcggcaacagcagctgggtatcatcattcctataatgctgaagacaattatcctgacagagttttgcaagataaaatagtaatagactccaaagatttaattaaaaaccccttagtacaacaatgtatcagcgaaagtgcccggctcgttaatgcaataattcaaaaatatggccatcctgacagtattaaagtggagatggcacgttcattgaagaagcctaaaaatgaacgtgaacaaatgaaaagaagaaatgacgatacaaataggcgcagagacgagtatagagattttttaaagaaacgacttggaaaagagtacataagcaaatcagaattaataaaatttgaattatttctagaaatgcagtttgcagaggatgagcttaaaaaaataaatggacatattgatactgacgagttcaaaaaatttgctcgtaatataaaaacaaatgataaagaaaaatatgagttgtggcttgagtgtggacgaatctctccatataccggcaatgttattaatctaacaaagctatttagttctgaaatagaaatagagcatatcatcccatacagtaagtgtatgaatgactcattcgctaataaaactttatgtgaaaaggacataaacgaggataaaggtaatcgcacaccttttgaatatttagggcacaagccggaacaatggaaggcttttaaagagcgtataaaacattttaatgataataaacagcagcaatttactagaacagagctaccagatgactttttaaacagccaacttaataacactgcgtatgtcgctagagaagtggtaactcattttaagaaagtatgtactagcgtaaaggttacaaatgggcaagctactagctggcttaggaaattttggggattaaatgaactactaaaccttgaaggggttaacgaaaaatcaagacatgaccatcggcatcatattattgatgctgttgtcattgcgttcacaagtgaaagatatatacaaatacttagcaaagaaagccaattcgatggattaggtaaaatgcgtgttgaaggaataaaatttccttacccttcgtttaaattagaagtaaatgaacgtttacagaatgtccttgtttcgtacagggataagaaaaggctcttgaacacaaaaacgaataagtatattcattctgcttctcataaaaagtataaacaaaaaacattccaagtcagagggtcattacatgaagatacccattatggacttattaataatccgcatacaggcgaacaaaattatgtgtatcgaaagccaaccaataaaatcgaaactgaaaaacatattgacaaaatagtagaccctaagattcgagaaataattaaagaccacatctcaaataatggcggaaaaataaaacaagcgttggctctaccggtatttatgaaaacaaaaactggtaagaaagtgcctattaactccgtgagaataattgataatgctgaaaaccttattcaattaagacctaaagaaaatccaaaattatttgtttcctcgggaaataattattgcatagcgatttatcaaggttctgatggtaaaagggattttgaaacagtatccttttacgaagccgttaaaaacaagcgggaacacaagccattaatccccatatcaaaaaataataaaaaactattatactctttgaagcaaaaagaaatggttgttgtttacagcgaccacccagatgaaattgattgggagaatagacgagaattatttaatcgtttatatcaagttgtgaaatttaatgttaatgggcaaatagcactttctaaacatcattattctaatgttaatactgataaaccaaaagaatatgcatctggagttgtaattaatgttcgccattcaacgattaaagctgtaaaagttaaaattgatacacttggtaatattctaaaaatataggcatgattaagcgtaccctttactttggaaaccctgcatacttgaaaaccaccaatgagcaaatggttatagagatgcatgacagcggtgagataaaacaagcaccaatagaagacatcgggcttgtcatacttgaccaccaacaaataacaattacgcaagccctaatggctaagttgcttgcgaataacaccgcattaattacctgtgataccacccatcatccggtgggtttgtttttaaacttagacggcaatacgcttcaaagtgagaagtttcaagcacaggtagaagctactgtacccctaaaaaagcaattatggcaacagacagttattgctaaaataactaatcaggcagcagtactgcaaaaagaaaaaacggataataagttattattaaacttcgcaaaagaagtaaaaagtggcgacagtgataatcatgaagctagagcagcggtatattattggaagaaccttttccctccttttctgaattttacccgtgaacggtatggcgctccacccaataacctattaaattatggatatgcaatattaagagcacttgtagcccgtagcttggtaggatccggcttgttaccaacgctcggaatttttcataagaaccagtataatgcttactgtttagctgatgatattatggaaccttataggccatttgtagatcaaatcgtgtgtgagatagtaagtaataatgggcaatttctggaattgaccccgaacatgaagaagcagttattgacaatacctgcaatggatgttgtgataggtgagcaaaaaagccctttaatgaatgctgtccagcgaactaccgcaagccttgctaaatgttttgaaggaaaaacccgaaaaatattatatcctatcctttcttaggaagtttatacaaatcaataatgtattcacgcctaaacgcatatcgtattatgtgggtacttgtcttttttgacctgccaacggaaacaaaaaaagatcgaaaaagctatactctttttcggaaaaatatgatggcagatgggtttcaaatgttccagtttagtatttacctacggcattgcagcagtaaggaaaatgctgatgtacatatgaaaagggtaaaatccatattaccacccaaaggacacgttgggattatgtatgttactgataaacagttcggtatgatggagatttttcagggtagagatcccgtgacagcaccggatactacacagcaactggaattattttaagtaaataggattgaaaaaacgagttgaaaactcattttttcaatcctaaaaaacaacctaaagtcaataccataaggcatttcagcgaatcgtgttgtttgtaagagctaagctacttaaaattgaaagcaaatcacaacctcttcttttgcttgcctcatccattcgttgttgtttgtaagagctaagctacttaaaattgaaagcaaatcacaactagcgtgtccatatacaaacaagctgccagttgtttgtaagagctaagctacttaaaattgaaagcaaatcacaactattgctctagcacttccatccattgggtgttgtttgtaagagctaagctacttaaaattgaaagcaaatcacaaccgaatagcatactcaccattatattgacatgttgtttgtaagagctaagctacttaaaattgaaagcaaatcacaacttaccttcaataccacctgctaagcgtaaagttgtttgtaagagctaagctacttaaaattgaaagcaaatcacaaccgttgatatggtagctctcatcgcttagggttgtttgtaagagctaagctacttaaaattgaaagcaaatcacaactatatgcctggtgccgaactcgataagtgtgttgtttgtaagagctaagctacttaaaattgaaagcaaatcacaacaagttgccagtgttgcaggttggtgtactggttgtttgtaagagctaagctacttaaaattgaaagcaaatcacaactacgacgatgtggttgaacaaacggacgagttgtttgtaagagctaagctacttaaaattgaaagcaaatcacaacgtaaaggggtacagcgtattgcaaacacaggttgtttgtaagagctaagctacttaaaattgaaagcaaatcacaacaggtgcgtgtacctgaagatgtgcaactgagttgtttgtaagagctaagctacttaaaattgaaagcaaatcacaacaggctgccatatctaactcaaaaacacgctgttgtttgtaagagctaagctacttaaaattgaaagcaaatcacaactgtattagctaattgatatgaaacctatacgttgtttgtaagagctaagctacttaaaattgaaagcaaatcacaactatatgcctggtgccgaactcgataagtgtgttgtttgtaagagctaagctacttaaaattgaaagcaaatcacaactagtctataccagccctgtcaaggttcattgttgtttgtaagagctaagctacttaaaattgaaagcaaatcacaactatatcgcatgtgtggtgcttgcatacggtgttgtttgtaagagctaagctacttaaaattgaaagcaaatcacaacaaggagagcttgcgcccgaaatcccgccgtgttgtttgtaagagctaagctacttaaaattgaaagcaaatcacaacccatgttaccagagcttgcagctttcaaaagttgtttgtaagagctaagctacttaaaattgaaagcaaatcacaacagtgctgcaatagcttcggacagctccccggttgtttgtaagagctaagctacttaaaattgaaagcaaatcacaactgcacaagcatatgactcagacgagacgtgttgtttgtaagagctaagctacttaaaattgaaagcaaatcacaacccagcgggttctctatacccatttctttacgttgtttgtaagagctaagctacttaaaattgaaagcaaatcacaaccggacagtctggtagtaacatcagccccaagttgtttgtaagagctaagctacttaaaattgaaagcaaatcacaacccattgaactgataacatcatctgtagatagttgtttgtaagagctaagctacttaaaattgaaagcaaatcacaactgtggggtggttagtaccctgttatttatgttgtttgtaagagctaagctacttaaaattgaaagcaaatcacaactatcctgcctacgttcaaagtattggctcagttgtttgtaagagctaagctacttaaaattgaaagcaaatcacaacttgctagccaggtctgccactaaccctgttgttgtttgtaagagctaagctacttaaaattgaaagcaaatcacaacagtgatatcatgcggttgtattctttcagggttgtttgtaagagctaagctacttaaaattgaaagcaaatcacaacttataatggctgatgtaaaaatcaagcaaggttgtttgtaagagctaagctacttaaaattgaaagcaaatcacaacacagacttgtgatagtcctttgactttttagttgtttgtaagagctaagctacttaaaattgaaagcaaatcacaactctacctgggtataaacgataagtttcacggttgtttgtaagagctaagctacttaaaattgaaagcaaatcacaactcacggtgtcctcatcgcatcctaccaagtgttgtttgtaagagctaagctacctaaaattgcaagcaatcacaacctttttctagttaaagcattgtttctaatgccacatgctgactgttctgctttgtccagtccttaggtggacattatcaactaattgagcaccaaattacgtttttcattgaccaccttaagtgttgattatcaaagtaagaggtggtcagcttcgaggataatttagtggccaaactcagtgatattttccatactgacagtatagagaattgccaataccataatatccctaatacaagaaaggagtatagcatttttagggcaaatgataaagggattggcattctactctatacaatcaggggagaagtacattggttcaggagtcttgaaggaaagcagaaaaccaaggagtattatcagactcgtttattgcatcctaaaaaaaggaaagatagctcagtacagaagtatgacattcccaaaggacaaaagacgctaccttttttccctccgctattactcaggcattttgaatctagcgaaactattgaaacactgtacctgacagaaggacattttaaggcttttaaagctacaatgcatggcattctttgcgtagggttaccttccatcacttgcttacgtgacaaggatggactcatgtacgatgacattattgcattgattaaaaaatgccaagtgcaaagggtggtgtggctacatgacggagactgtcgtaatataacatccaatgaaataacagaccaaactgaccttagtacaaggccgtacattttttataagagtgtagaggctttttatgacctgatgagtaaggagggtgttcgcctgtacttcgcccatatcaactcccaggaagtgacgggaaatccaaaaggacttgacgacttactttgctcactaaatgaatctgaacaacatgaagcagctaaagagtttaatgacttcagggtacagaaatcggggacatatacaggtgtttacctgacacgaatagaagtgacacgttctacccgctctgtatttcaatatttcatgttggataatgtggatgatttctatcattttcatctcgagcaacgaccagaattgaaggagttacaattcaaattcttcgggaccacctataggtatgatcatggttctaataaatgtgtgattgtaacacctagaagtgcagcaaattacttccgggtaggcgatacctattatcaatatgttgaaatacccgatcaatggaacaccctcataaaaacttttgaacgtagggaacgtaaaactatactggaagataacggcaaagaaatatttgagcacatacacaagtacacatccttttgtaatgtaccgagccatacagactatcagcaggtgatacataattgttataacctatatcatccttttgattggcaagcctccgaagaagatagttcttgtccttacacgctaggcttcatcaaacatatatttggctcggaaagcatattacttaatgttgacgatgctagtagtgctatcgaaagatgggagttaggtctggactatttacaattgctgtttcaaaaaccacaacaggtgttaccaatactctgtttaattagtaaagaacgacaaaccggtaaaaccacttttggcgactggctgaaagagctatacaaagagaatatggctattgtaggtaatgcagacttaaaaagtgaatttaatgcccactggattagtaagctgattgttatggttgatgaaacaaaggttgaccaggaagtggtagttgaaaggctcaaagctttatctacagcgaaatcagctatttggaacagtaaaggtaaagaccagaagagcataccaacttttgccaagttcatcctaatctctaacagggaagaagattttattcgcattgataaacatgagatacgcttttgggtaatacgagtacctaaactatctgaagaaacgctagacgttaagctgcttagaaaaatggtggatgaaatacccagttttttgaattacttgtgtaccagaaaagtcaaggcaccggaaaaagaacgccattggtttgaaagccgtttactagtaactgaggcactgcagtcaatagttgctcatagcaagattacagttgagaagcaaattgagatagcactaacggaactatttgaatccagcggcgagcaggtcattacaatgccattaactgacttggctacgcttgtaaaacaacaaaacaaaagctacgtgagtgaagtactgaatcgaatgggatataaatcttcagaatatccgtcctcaaagtattttccacgaatcagcgagagacgtgagtcaactggtgaaatacatctttgctgtgaatacgtgaaattcaaaggaaggttctatacttttaatcgtaaagatttcacagcatctccggaaggcattattgaaggctaaacaacgagactgagaagcctagtctaatttcaaccaagctagtcgtgctcgtttatcgtctccattaactacaatagtagcccatgtatgtgtggtctcatcaaaggctgatacacctaccatagcataatggtcatcatttcttttctgaggtgctccccatgcgtaactcttttcaattttgccgtttatcattttacatactatcgtattagcatctgatatagttagcaatgcatgaggctttgccttctccggtttatctacattttcttcaagatcattgaatatgagataatctgcacttggggtgcttaaatactggtagtcatagtaagcctcaggagcgtgcatacggtataggttagcagatatttcacgtatacgcattacataaccactcgttgctttagaatctgtcccaagtttagtaactcctatcttgctaaccatagtagcagttacacctgaaccatacccggaacgtgtcactacatgttgttcctcctgaacaataacaggagatttgtctgcatacaaatagtatgatggcatcactccgttaaatccatccttttcgcccagtttttcttttgcatacacatcaactaatgaaccatctatccctcccatgtgtttggtttccatcgtagccgcatccaatttaatgataccactcgtcaaatactgtgttgattctgaaccatcagaaaagaaaccacctgtatttttcttactcgtctcagttgtaatcagcaaatcaagtgtctttgtagcaggattatatgtcattttacaatcactgttaattgcaaaaggcttaatgtttaatacagttgtggtaaaagcatctgcaccgtcccttaatgcactgatacacaatggcacttcctgtcctttttctttggcattgcgcatgttagttcctagataaactgtcttatcatacatacatataccagcaaaatgcacggccctatcctttgtcgaaagtgcatctaagactactgttttaaccatttgatgattaccatcaaatgtcattagctttactcgatctggcatatcctctgtatatccattaaacactagcacagcatacatatcagatacagggtcttttgttacatatatatcattgtaggtcatagttgacaaattatacccccaactacgaactttctctgtttcgcaaatcttatctcctttagttatcttaccggttgcagggtctaaaacaaaacgatagagattttgtacgcaattgacgtatccgcccattccacaacctgtattacaggacatcaaaatgacaatattatccttcacctcatatactgctttcaatacagggtctgtaccctgcatcccgccttgcactgcactgcgataaggaatattttggttgttaattgatttatgatctttatcataaatcataattcggaaattggatgcattaccgttgatataaaccgtattcccgtttttaagtatgataattttgttccaaccgttaaccggttcattgaaactattctcactgtagacagcatttgattgtgcaaaagctgatatacatataattgtgctagcaaagaatgtaagtatctttttcatcagatttatgttgggttatttacggataggtaaaccttaatttcatacttgaagtacagctacgaaacagatcatcataataattcatgctgcaaacagtgatctctatagttttgttatcaatctccgttacgtaaagtttggctccgtttgttacataagtgcgatccattaatattgttacattatcattattgcttgtattttcccatatcttatacactccgcttacaggcttgatcttgaactccagatcaattgtatgattgtcagtagtagctctgaaccgtgtagaactatatacatatttgtttctaattttttcgctttttgttgttaccgtattattctcagtgaaagtatcaagaggcaatgtacaaggtgttgttggtggttttatatacactgaatcaatggtgacttcaccctcaccaatagaataaccatagctatttgcagcaaaagctttgaaatagtatttattcgatttactcaatgacttgtaggttgctgtaaaactcgcttctggatcattgatgaccatctgattactagtcattttaggattagaaacaacatccatacagaatcctctgtacattattttgtcagcaccttcgctgataactgtaccggtaactacaacagaaccgtcatcttgaagtgaggcacttgttactttgaccttcggataatagtcctgtacattctttttgtatttagagcatccgttgaaaagcaatattgatgctaaaagaataagtgtaattaattgtttcattagttagcttttatacgataattgagccccagcccgaaaaaatgatgtgaaaaattgtaagaccaatctgttgctactaaagcattatgaccaataaacgcacatacctgcgcatgtgaacttattgtgtaaacaccttgtatactagctcctaaaccaccgtagtaattatcatttgcgcctgcattcacatatgtcgggttatatttatcataggtatcataagaagatttagataagcccatagtaaggcgtacaccggcataaaaactaaactgttgaacactgaatatcctaaaactattatctatatagaaagcatagttcttcatcggcttataaacccttagctccggcataacagaattaccatttccggaatttccggcaccatcctgataggtaggaaaactatctgctctgggagctaaagaagtaaatgataatccgagtgtagaacgtatacgccccttgcgccgatccagcatataacacaaatcgtaagaaagaccgtttttaaatacagctcccatatctccacgaggtgttacaaggctgatcctggctcctatctgagaatacgcggaactcatgcccccagccaataacagggttaataatagtagttttttcaaggatataaattttagtggcagtaaaactaataggattaattaagaaatcaattatagtatatggtttctattcacttttacctggtgtttcaatttggaattgcctgaacaaatactctgcaaatagattacaagtataggcaactgcattaatcaactcagggttaagttcaatggtactacctaaggggaaactaaccattttgcaaacattttgcatgcccaaagcagtagtttgaatttgtttttccttcacttctttggtcaacaatacccattcgttgccaacttgaatttttgcaacattttctacatagtgaagttccaaaccaacacctccatttttaccatacttttgcagtaccaatgcgtcattgtgaacaatgcagtttctcacactgttgatactaagtatctctttctcaaaagaaagtatttctaaacctagacctttttttacctcttcgaataaatcaggaatagatagctttctggattttacttcaaccttgtcaagtttttcgtctaaatgagccttatcatgaataacattattactttccttagctagtgtctgaatttccagtaataatcttgaagcaattaatgactctgcagcacctgccaaaaagttagaaaaacagtttctatatacccattgccgaactttggtttgcggtatcttatctccttcaacaggatcggtataggtgattgggataaaatcaatcaacattggcacaaacacatcttgtggataagcatctattgcatgaaacaa

SEQ ID NO: 3657 - DNA, 7355 bp, synthetic construct
  source 1..7355: mol_type = other DNA
  misc_feature 1..7355: note = Synthetic
agcccttaatgaacttttctccctggaaatgaatgacgcaacgcttgatgccttcgcagcaaaacttggttcagatgtaaatatgttcctcaaacatttttcatcctacgctacggggcggggcgaagttgtccggcagataaacatcgacatgccttatactattctgcttattaatcccggcattcatgtctccactccatgggcatataaaaactgtgtgccctcagtacctgaagttcccctggaatattttattataaacaatactatttcgattaagtcggtacttccatttctgaaaaatgattttgagaataatgtctttgccgcgtttcccgaaatacggaacataaagaactcactgctggaacagggtgcagttttcgcacagatgagcggcagcggttcttctgttttcggattattcgacagttccgtggatgctgaacgcacgatggaatcattccctgaagaatatttttcctatattgaatttcctgaataaatactaaacacataaactttaactgcacctgtaactgcaaagatatttgaatgagaaaaaacaaacctgctgctaagaataaatcgtcacaaaaaacaacctctgtttcagctaatgctaatggcactgacatcaaacgcaaatatccgttttggttttactctattccaattttagttattgttcttttttttcttctgctcgaaggcggactaagactcttcggctacggcgagaacactcccaaaacttttgtacagcttacaggttcatatcccaatcatcttttctttaatcccgaaataactaagaaatattttactaaccttaaaaaaactcccgcggttattcccgacccgtttcttaaggaaaaatctcccaacactttccgcgtatttgttttgggtgaaagcagtgcggcaggatggccttacgaacctaatgtttccttcccccgattcatgaaacggaaacttgaggagttctatccccaaaaaaacattgaagtagttaaccttggcgtttcagctatctgtacttatacgcttagagatatcatccacgatgtgcttgaacagaaacccgatttagtctgcatctacacggggcacaatgaatactatggtgcgctaggtgccgcatcaacgcaatcattgggcaaatcaagagcaatgataaattttgttatgtcgattcagaacatacgagtggttcaactgattcagaatattattaaatctgtgttggcaactgtttctcccgaggaatttacttccaacgaaacgcttatgtcaaaagtcatcggcgaaagttcaataccttataacagcgatttatacaaagcaggtatctcacagtttgaaggcaacatgcgggacattctttctgcatgccaaaaagcaaatgttaaagtgatgattggaaatgttgcatccaaccttaaggaccagaagcctttcgtttcaaccgatactcttggtttggaaaaagctgaaaacatttttgctcaggctaatgcagaatacggcaaaggcaacttcagcaaggcgaaagaactatacatcaagtcaagagacctcgatgcgctccgtttccgtgcaccatcggaaataaattcgctcattaaaaatctttcaggcgaattcggaacagttatggttgatgttgaaagcggcttaaattcattttcgcccaacggcatcaccggcaaagaacttatggttgaccatcttcatcccaacatcaaaggatatgaactgattgcaaatcttttccttgatgccgcgctgaagaacagtctgcttcccgatgctgcaaacttcaaaattgaaacaggaaaacttacttctattgaatcagtattctccccgcttgattcaatcgttgctgaccttaagctcagaaccttgctgggcgcacatccctttgtgcctaaaggctcgccaaacctgttaagacttagctttaagccgactgctcacatagacacacttgcgatgatgactgccgacaggatgattacgcttgaagaggcacactatgaaatggcagacatctactggaaaaacaaaaatgtacaggcattcgaaaacgaaatgaatgtgcttataaatgagcggccgataaatcaggttcatcacatgaagttaatcacaacgctgctttccgatacgcttattgataaggcaatagtttatctatacagaatggaaaaatactgcccgtcagaattcagcaccaaacgcttaggagcgcttcttctcagcaagaacagattcgccgaagccctgccgtaccttgagaaagatatcacccttaactcaaacgatgcaagagcatggtacaacctcgcaggcgcatactacggcaccaagaacataagcaaagcaataacggcagtcaaccgctcgctggaaatcagtccccgtaatgctttggcgcagacattcaaaaaacagttggaagttttggcagggcagaaataaaaacgccccgggaagaaccaggggcaaggctttcgcctgtagaaaaatctttattgtgataagctttcagttgaaacttaagtaaatatattataacttgcaagtaaatatttatcaatctaaaataaaggggaaaccccatgagttatatacttggtcttgatatcggttctaattcaattggttgggctttaacaaaggaagaaagcattcttgaccttggtgtcagaatatttcctgttggagttaaagaagattcatacaataaatcagggactgaagaatccaaaaattcctcacgcagaagtgcaagaggaatcaggagactttatgatagatataaaatccgcagacggcagctaaaaaaacttctcctcactctcgatatgcttccacccgaaacaatgcaatttacatccttcagattatatgaattaagaaaaagagcactcgatgaaaaaatttccctccaggaattcggacgggttattttattgcttaatcagcgcagaggttttaagagcaacaagaaaggcgaatcaaaatctgcgtctgaaactgcaaaggaattagagggcataaaacttcaaatggcagaacttgaatctgaaataaaagattctaattgccgcacaatcggtgaatacttctattccctattcttgaaacaagtggaacatgaaaattggagaaacccagacgaaccaatcgaaagaatccggaaaagatttgtattcagaaaaacttatgagcatgagtttgatgaactttggaaagcacagaagcagtactaccccggaattttaactgatgaaaattatacaaaaataaaagacaactgtctttactatcagcgccctcttaaatctcaaaaacaccttgtttccaaatgcagatttgaacctaaaaaacgagtagcgcctaaaagttcttttgagtttcaggaattcagaatttggcagttcattaataacctgagaatcacgggtcccggcagaaatcttgacctcctcacaaaagatgagagaaacacattattcaatgagttcaacagaaacgaggacttatcccccgctaagatgattaaagcacttggcatgagcaaacacttttcatttcaaaacggaattgcaccaaaggtaaaaggcaacactaccaattcccgattaagcaaagtgcttggagaggatgcatattttgcactttcacacgaagaaaaatttaagctttggcatgtactttattttgctgaggatgaagattggcttcttgattatgcagtcaataaattaaattttaatcatgagactgcgggtaaatatgccaaaacaaatttagaagcagattacggcagcataagtacaaaagcaatccacaaaattattccgttcatgcaggacggttatgattatgccgaagcatgcgaattagccgggtatcaccattcattcgatgaagacaaagacggtaaagaacgggaactgctagataagattatcagggaaaaagatgacgacagaagaaaccccctcgtagagcaggcaatatcagaaaccgtcagacttgttaatgaaattattgcagagaatggcaaaccctccaaaataagagttgaatttgcacggcagctgaagatgcccaaagacaaaagggaaaaactaaagagcagaaatgatgaaaaagaaaaatcaagagacagttacagggattttcttgttaaatctgccggtctttcaaacccttcacgggcagacataataaaatttgaactatggcttgaaatggaattcgaccttaaggactttgacaagaaaaaaggcagtatagatatttcggaattcagaaagtttactaaaaatgttaagacaggcgacgcatccaagtacaaactatggcttgaatgcgggcgcatctcaccttataccggcaaagtaataggactaagcgaattattttctcccgaaattgaagttgaacatatcatcccttacagcaggtctttagatgattccttctccaacaaaaccttatgtgagcgtttagtgaatgcggataaaggaaaccggactccttttgaatatttatccggtcatcctcaaaaatgggaagcatttttagacagggtaaaattatttcctttcggtaagcagttgaagtttcagatgaaggaaattccatctgactttataagtcagcagttgaacaataccgcatacatcgcaaaacatgccaggaaaaaactgaaactcgtgtgcagggatgtgcaggtaacaaacggtcaggcaacaagtcacttgcgcaggatgtggggacttaacaaagtccttaatccaacaggtgcaaacgacaagagcaggcatgaccacaggcaccatgctattgatgcacttgttattgcatcaacaacacctgactttatcaatacgcttagcagatatgcttcttttgatgcattgggtaaactaagaatctcaaacttcccaatgcccttccctgaatttttcagtcagacggaagaattgttttcaacaattttaatttcttaccgaaataaacaacggttgatatcttcgaaacttaataaatacaaacactcaaagaatactgctgctcaaacaacagtatctatccgcggtccgcttcatgaagaaactttctttggaaggattcttaatcctgaaacaaataaacagtcttatgtaatcaggaaacctttaagttctttcaaagatgcaaaacagctaagtaaaatagttgaccctgccataagaaaacttgtattggaacatgttgaaaaatgcggttcggtagcctcggcaatgtcaacccctctgttcatgataagcaaagacggtaagaaaaaaattccggtaaataaagtaagagttattgacagcgcggaagaacttgttcaactgcgccctaaagaaaatccaaaactttttgttgctccgggtgataactactgcatcgcaatctatgaaaaagacgggaagcgggcatataacacaatcagtttttataatgctgtacacaagaaaataaataagcaaccactattcccattaactgagggcgacaaacctttcctgatgtctctttcaaaaaaagatttagtagtggtttataatcagcatccggatgaaattaattggaatgataaatccagtctttttaagaatttatatttagtgcgtaagtttgataaaaacgggagaattgctttagccaaacataatttatcaaatattgatgtcaataatccaagtgcctatcctttggggtcagctttactgaagggtttcagcacattaaaagcagttaaagtgcatatttccctaacagggaagatagttaaagcgtaacatgattaaaaggacgctctattttggcaaccctgcgtatttaagtaaaaaagacaatcagttaaaaatcgaacttcttgaaggaaacgaagcaaataaaattataactgttccaattgaagacattggaattattatacttgacaatcctcaaatcacagtcacgcaggcggttatgagcgggttgattgaaaataattccgcattggtgacatgtgcgcccaatcatattccaaacggacttttactgcctttggaaggtaaccatattcagtccgaacggtttgcagaacaaattaatgcttcagcacctctaaaaaagcagttatggaggcaaaccgttaaagcaaagatattcaatcaggcacttctgttggattctatcggcaaggaatcaaaaaacatgaagacctggtcttctaaagtttcatcaggtgacaaaaacaatttagaaagcagggcggcagtatattattggaaaaatatttttgatactattcctgattttatccgtcagagggatggggatataccaaacagttttctgaattacggatatgctgttctaagggcaataacagcaagaagtcttgtaggttcgggtctgcttcccactctcggcattcaccatcataataaatataatgcgtactgcctggcagatgatatcatggaaccttacagaccttatgtagatgcaattgttcttgatatattgaataagtttccccgagaagaagaaatcacaaaggatattaagaaaatgattttggaacttccggtaaaggatgtcaaaatggaaaaagaggaaagcccgctgatgattgcaatgcagagaacaaccgcatcgctggcaaaatgttttgcaggcgatgaaagaaatttgctttatcctttattctcttagaaaagcatcatggggtttaatcaataccgcattatgtgggtattagtattttttgacctccctaccgaaactcagcgggaaaagaaagactatgttaagttccggaaaaaacttctgaacgacgggttttccatgtttcagttttctatttatataaggcactgtgccagtaaggaaaaccgcgatgtccatgtaaaaagagttaagaagtgcctcccccctcatggacatatcggaattctgtccataacagataaacaattcggcgacatggaaatattcatgggacatgaaccggattcaggcagttttactgaacctcagcagttagaactattttgatgcccggaactaaaaataaaaagccggttaaataaccggcatataattaaaacaatcaacatattttaattcctaaaaaactctataagtctctattattcaatgacatacaaacatcgtattgttttaaatatcgtcaaagaacaaactgaaagcaaaccacaactacgatatgggtcttgagatttaccataaaattgttttaaatatcgtcaaagaacaaactgaaagcaaaccacaactattgt

SEQ ID NO: 3658 - DNA, 5879 bp, synthetic construct
  source 1..5879: mol_type = other DNA
  misc_feature 1..5879: note = Synthetic
tttatattgcttgttaaaatcgattaatccgaatttaattttgtcgttaaagccctccataacatctttgatatccgaggtgttaatgccggtaaagtcgaatttcatcgtataatagctgttacgggtattggttggatttttaccggcatacagctctccgaacaacgaatcgaattcagctttgtattgaatgccgtaataataattaagcgttgaaattaataatgatttcccgaacctgcgcggacgaagaaaaaagagaaacttgttattagaactttccattttttcaatataatttgttctatcgacatagtacattttttgcagaatcaaacttctgaaatcggaagtgccgtaaggaatatctttttgtgttttcatagtcgtaccaaaaatttattttgaatatatgaaatataatgaattgggggggtatgcaagtacgcgaatgtattgtaccaaacctgaatggcagatgttttttaatctattgtttctatcgggtaaagaaaagttaaaatggttttgtgagaaaatcacttccaagggaatgaagtgatgaacgaaagcggaattatttttgtggacagtgtaaataaaaaaagccccggaggaaccagggcgtaggctttcgcctgcagaataatctttattatgataagctttcggtttaaaaaactttattacttgcaaaataaaacaatattacataaattacaagcatattttaacaatatattaataaatcataatagaaggggtcttctatgggttatgttttaggtcttgatattgggtctaattcaataggttgggcaattatcagcaattataaaattattgatcttggaatcagaattttccctgttggtgttaaagaggatagttatagcaaaagcgggactgaagaatcaaaaaattcctctcgacgttcggctcgcggtattaggcgactctatgcccgttacaaattgcgcagaaaacaattaaagaaattccttttttccattgaaatgattcctcctgaatcttctcaacttacatcacgccaactttaccaatttcggaaaaaagcattggacgaacagatccctcttcaagagatcgggcgcatttttttattactgaatcaacgtcgcggattcaagagcaacaaaaaaggagatgggaaaggcgagcagaaaaaagagcttgacggaataaaacaagaaatggctgaacttgaacaaaaagtagctgatgccgattgtagaactattggagaatatttcgcgcttctttttgaaaaacaatctgaaaaagaaaattggcacaatcctgatgaaccagttgaacgaattagaaagcggtttgtttttagaaaagcctatgaaaaagagtttgacctaatttgggcaaagcagaaaacttattacccggctgtcttaactgatgaaaattacaaaaaaataaaagataactgcattttttatcaacgaccgctaaaatcacagaaacaccttgttgcaaagtgtcgatttgaaccgtcaaaacgtgttgctcctaaaagttcatttgaatttcaagaattcagaatctggcaattcataggcaacctaagaattagcggaggtaatcgttttagagaatccttatctttggatgaaaaaacaaaattaggtttactttttcaggagaatgaattaatcactcatcagatgatgaaaaatgctctgaacctccccaagtcatatacctttcaaaaggacattccgctaaaaataaaggggaataccaccaatgcaaaattaatgaatgctttgggcgaaaagcatttcaactttttatcaaacgaggaaaaatataaactttggcacacgctgtattttgctaatgacgaagaatggctcataaaatatgctgaaaccgcgcttaaattgaatagtgaacaaaccaagaaatacgcgagtatcgctcttgaagaagaatatggaaatgtaagcataaaagctattaggaaaattttaccactaatgaagattggctttgactacgcgcaggcttgcgaagaagcaggatatcatcattcttatgacgaggaaacagacagcgcaaaaagagaactttctgacctgattgtacgagataaaaaggatgatcttaggaatcctttagtacaacaagcggtttctgaaactattcgtttggtaaatgagattttaaaggaacgcggaaaacctcaatccatacgtgttgaatttgcccgtatgttaaaaatgcccaaagataaaagggaaaatataaagcgcgcaaatgacgagaaagaagcgagaagagaaagctaccgcgggtttctatcacaaaaacttggtatgaatttcatttcaagatctgatattctaaaatttgaattgtggcttgaaatggaatttaacgaaaccgacctaaaaaatttatcccaaactattgatgcagcagagtttcgcaaattttccaaaaatgtaaaaccgggcgataaaactaaatatgctctttggcttgaatgcgggaggatatctccatatagtggcaaaattattagtttgggaaaacttttttcttctgaaattgaagtagagcatataataccatatagccgctgcctgaatgattcctttggaaataaaacattgtgtgaaaaagaaataaacgcggataaagcgaataaaacaccttatgaatattttgcgggaagacctaatgaatgggcttcatttttgaatcgggttaaacatttctcggaaggcaaacaaataaaattcactataaaggaaattccatccgatttcatcagccagcagctaaacaataccgcttatatagcgaaagaggctcgaaaaaaactgaaaaccgtctgccgcgatgtaactgtgacaaatggtcaggcaacaagtaaattgcggcatctttggggattaaatacaattctaaatcagaaaggcgagaataagaaaagcaggcacgatcatcgacatcatgcggttgatgctttagttattgcagccactactcctgcatttattaaactgctaagcgataaagcacaatttgacaactttggaaacctgactctgaaagacgctcccccgccattccctgaattccgcgatgaagctgtcgctttgctttcgactgttttaatttcatatagaaataaaaaaagattgctgacaacaaaaacaaataagtatattcactcacgctcaaaaatagacacaactcaaaaaagtatttcagttcgcgggacattacataacgagacatttttcggaaaaatatttaatccggaaacgaaagagcataattatgtgattcgtactccgatcaccaacattaaaactcaaaaaaatatagaagatattgttgaccccgctatcagacatttaattattgagcacatcgcgaagcacaatggaaatatcacagaagctatggcttccgaattatttatggttagcaaagacggcaagaagaaaatacctgtaaaaaaagttcgtatgattcaaaaagccggcggtctcattcaattaagaccaacggagaatgaaaaactctttgtcgctccggggagcaattatttgatcgcgctatacgagaaggatggaaaacgcgcctacgagactgtttcattttttgaggcagcgcagctaaaactgaaaggacagattatctaccctgccgaaaagaatggcaaaccatttctgttctccttagttcaaaaggatttagtattagtatatgacaagcatccggacgagattgactgggatgacaagaagaaattatttgagtcgctgtaccttgtcagaaaatttgacacgaatggaaatatcgcgtttgttcttcataatctgactaatgttgaccctaataaaccaaaagaatatcctaaagaatgggtaatgagaaaaacatttaattctcttaaagccgttaaagtgcgaatatcattaacaggcaagattattcgattatgattaagaaaacattgtatttcgggaatccttgttatctttctcagaaggatatgcaattgaaaattcaaataccctcaaacgaggaaaataaagctgacaaagtcagctctattccgattgaagatattggaatcgttatattggacaatcctcagataacaataacgcaaaccgttatgagctcattgctggagaataatagcacgataatcacttgcgcgacaaatcatttgcctgcgggaatgatgcttcctctatcgggaaatactattcaaacagaacgattcacggctcaaatcaaggcttcgattccattaaaaaaacaattatggaagcaaactgttacctgcaagatagaaaaccaggcagctgtcttagagcaagaaaagaagtctgcagcaaatatgcgggtatgggcggaacaagtaacttccggagacacaaaaaaccttgaggctcgcgctgccatctattattggaaaaatgtatttcggcaatatccagattttattcggtcaagggagggtattttcccaaataatttccttaactatggatattctattttgcgcgcgatcgccgcgcggagtctggttggctccggacttttgccaacacttggcattcatcaccataatcgctacaacgcgtactgtttggcagatgatataatggaaccttaccgtccgtttgttgattcgctggttttgggaatacttcaagacgaacccggctctgagttacttactccattattgaaaaaaagatttttaggtattcccgtaattgatgtaatggtagataaagaagaaagtccgctaatgattgctatgcaaagaaccacatcatcgctcgcgaaatgtttcgccggcgagcaaagaaccattatttatccgagttattcataagaaaaaatagcgtgtttaaatgggatttaacgcgtaccgcattatgtggatacttgtatttttcgatcttcctactgaaactaagacagaaaagaaagcatatacccgatttcgcaatgacctattgaaagacgggttttcaatgtttcagttttcaatatatttgcggcattgcgcgagcaaagaaaacagggatgtacacattaaaagagttaaagcttgcttaccgcaatacgggcatatcggtataatgtcaattacagataaacaatttggcgatatcgagatatttagagggactaagcgcgaagaaggcaaatttgaggaaccgcaacaattagaactgttttagaaataaaaacccgatgacaaaccagatctttccttaaaattacaacaaaatacctaatcctataaactatcataagtcattatatttcaatgaagtatatacaacgaattgtaataaatatcttcaaagaacaaaccgaaagcaaaccacaacacataaactacgatgtaaggtacatgtattattgtaataaatatcttcaaagaacaaaccgaaagcaaaccacaactatggaaattgcttctaagtttagttatgaattgtaataaatatcttcaaagaacaaaccgaaagcaaaccacaaccctgtaattgaagcaaaattaaaagtaaaattgtaataaatatcttcaaagaacaaaccgaaagcaaaccacaacgggtgaaccgcgttggtatggacttcttcgattgtaataaatatcttcaaagaacaaaccgaaagaaaaccacaacttagccgccgtgaaacacgtgaaacaggaattgtaataaatatcttcaaagaacaaaccgaaagcaaaccacaactccgtcctgcgccactaatgttgacgcgtaattgtaataaatatcttcaaagaacaaaccgaaagcaaaccacaacgtgcagtcgga

SEQ ID NO: 3659 - DNA, 19267 bp, synthetic construct
  misc_feature 1..19267: note = Synthetic
  source 1..19267: mol_type = other DNA
ccccataccacttaaggtatggagatctttgaagaggctgtcttaacttaatgacattgctcaaaacaatgaggcaaccctttttctatcatcatttaagcgtttgcgcttccttggtctgaaggtgcgtcagaaatcgatgggtaaatctgacccaacttaagaccaatctgagcgtagaagctcacacaaaaacagaccgttccattgatttgagactgctccgtctcttgctgtgttgtttattatttcaccattatggtaagataatgacatcaactcaaggagaaaaagtatgctgttgaagaaagaagtgttctgcggaaagagggaagattcctttcctgtgatatcggctttgaaagaagagaatatccgagcctgggtccaaagcatggaatccgaccatcttgtaaatgtgaaccgcggagcgggagtaggtagatacggagaatcgacggatcgatcgagtgagatggtttctatctatgtgaagaagaatgacttcgaggtagcgcagacaatacttgcccggattaacaaaacgtgatctggcttctgaaaaaacaattctgatgagaaagaagaaggcgggaacactttatttccgccttcttttcttatacaataaaggtctcagatgaaaatagttggagggcgttttcatgttgtattcgcaggcgggattccgttatctgctggctgcatccagctggtgggataaatggaaagaccggttattcaagaatttcattaaagacgatcgatacaaatatcttctgaagggtctgtggatgaccttgcggatcactttctttgcagtgcttcttggtattgcattgggcgtgattgtggccattatccgctcgacccatgacaagaccatcaaggacatgcgtcccggtgtcggtaaggctatcctgaaggtactgaacgctatcgtgaagttatacctgacggtgatccgaggcaccccggtagttgttcaactcatgatcacctactacattatttttgcatcatcgacaaataccatgctggtggctgtcctggccttcggtatcaactctggtgcttatgtggcggaaatcatccgctcgggtatcatgagcattgacaacggtcagtttgaagccggccgttccctgggtttcaactatgtccagaccatgatttacatcatcattcctcaggctatcaagaacgtgcttcccgcattggccaacgagttcatcgtgttgatcaaggagacatccgtttccggttatgtcggcatcatggacctgactcgtggcggcgatgttatccgaagccgtacctacgacgcattcccgccgctgattgcggtggcgctggtttatctgatcatcgtcgtgatcttcagtaagctggtatcgatcctggaaaggaggctgagaaacagtgagcgctgataagaataatcaagttgtaactcagaatgttgagaccggcgaagtcctgatctcagtcaaagatctggcgaagcattataagagcaagggcggcatgatccgtgctcttgacggcatcacgaccgacattaagaagggtgaagtactggttatcatcggaccatccggttccggtaaatccacttttcttcgttccctcaatcttcttgaacgcccgacaggcggcaccattacattcgaaggtgtggacatcacttctccgcagaccaacatcaacaagcttcgtcagaagatgggtatggtgttccagcacttcaatcttttcccgcatctgacgatcatcgataacatgacgctggcgccacggaaacttctgaagatgagtaagccggacgcagaagcgaaagccaaagaacttctgaagaaggtggctctggaagaccgtgccctggcttatccgagtcagctttccggtggtcagaaacagcgtatcgctatcgtgcgtgcactctgcatgtctccggatgtgttgcttttcgacgagccgacttccgcattggatccggaaatggttggtgaagttctggatgttatgaaggatcttgccaagtccggcatgaccatggccgtggttactcacgagatgggattcgcccgagaagtgggttcccgcgtgatcttcatggatgaaggaaagatcatcgaagaaggcacaccggatgagatcttcaatgcgccgaagaacgagcgtctgaagtctttcctggcaaaagtgctgtaatcaggagtgaattatgcctactatatatagaatcgtttcgtatagaattagccttcagttggaaaatgaacttcgtaaaaaaacgctttcagaagaggagatcgcccatgtctacgaagtgtttaccgaaaaaaaacagaacaacatcaaatcgttgaagatcggtatcatcgttatggctatcttcgcactgataatcggagtcgcaacgatcatcaccgctgaagagatacttttcggatttatctgtctgtttgcgactctggcactcgctgctttcgccgggtatcttgcctggtctgctactgtaatataggcaagatatccaagcgatggaaccagctgcttaaagactattatccgcagatcagcgaaaaatatactctgtgaaagatttcacggaagaaaacgcgtgatcagatggagatatttacatttacatctgagcgcttgatctgctctgcctcaaagaaggcttctttctttatgcccatgccaccagctacaatgctggtcgggaaagaaacgatcttctgattcaattcagatacgtttgcgttataggcacggcgtgcaccttgcagatgctcttccacatccatgatcgcaacctgaagctgacggaagttttcattggcatgtaactgcggataattctcagcaaggatattcagttccttctgtacttcgcccatagccgaagccgcctggttcttctcggaaatgctcattccctgacgaagtttcacggcatcgaggatcgtctgcttctcgatctttgcataagactttgctacatcgaccatcttagtcaggacatcataacgcttcgtcaatgccacatcgattcctgaggaagcttcttcaatcttaactttcgtcctgcgaagtccgttcatggtggcgatccaccaaagaataataacgacagctaagaatacaattgcaccaataacataatacttcaacattttcattcaccgtacgtgccttcctggttcgtacttctccttttcttgtttatttgaagatctttcgatcgagatttaatccttcaacaaatgaggtcacagcgttgatctcattctgtacttgcatgatatcattgttgttcgggctatgatagataggcggctcgagataatccttgtgggaattgatagccacgtgaagctgattggccacaaatccgaccatgatcttaccatcactttgtgccgcaagccgcatcagtccctgcatcagtccgggcgtcagaagataaaatgcttccacttcattctggcacaggcacgtgaacatcttgttgaactgctcgtcttctgtcttaaacgtatgtcttctttctgcctttttcgtaaaaatgcctgtctttcttcttgcatgtgcgaaaccatgttggatgatctgaagatccgcttcaaaatccttatttgattcgaagatcatccatctgccacgaagatatgtagtcgtggaagagtgaccgtccgaatcagtagtctcatcttgaatcaggatatccgatctttcaaatgcaacatgattgtatgacccacggatatagtcttcactcttgtagatatttcccatctgcataagaccggtctgcgcgatctgttgacttggaaaaccataatccggctgatacatcgcatccgggatagactgccgaaccatgtcgtacacataatgtgtcttgtagtaattacggtattctgcttgctttttccggacaaagatcagatgaaaaacaatctcaaataacccgataaagaacggcagcatcataaacaggcttatcgacgattcataatcttccttgttattcatgaaagcagcaccgcagccggctatgataactccaaggatgggagcgatccacataaagatatgcagtcgcattacttttttccgcatgccttcaataatatccatttgttcgttcatgtttcttttctccttcaaacatattctatctttttcgtcggatttcttctacctgaagaaaacacaaataggaaagtctaatcagcttccaggttttcgacggtgaaggattatctgtactacttgatggatgaagggactacccagaaacaggtcgaataaatggatcaggatgctcgttttttaacggacagcacagcgatgccgcaggacattcttccttccgcgacgtagaaatccacgaggtcaaatcctctgtcgcgatagaattgtttataggattctgtggtgaattgtcgtttgaaattggcaccgactttgttggccagggaagcggcgcaagaagcgctcttgctattctcgtttagatagacgggaaggataagctgtccacctggttttactacacgcttcagttcagaaagtgcctgatccggatcatccagaagatggattacgttcgcggccagagctttatcgaaactgttgtctgcgtatttcaaattaagaatgtttccgttttcaaaagtgatgtttccatatctcttacacttcttcgcagccttcttcagcatcttgggagaaaagtctgtggcggtcagtttccgacagcgcgcagcaaccttgcggctgaagattcctgtcccgcaggcacattccaataccgaatcttccgggtggatctgcgaagcaacgtagtttcctgcagactcattcgccttgccgttgtagatggtctccattggttcgtatattactgcaatcttatcccaaaacattttttgcctccgtgcgagctgattcgtaatcccttaacatatgagcagatattcatatgaatgtctgctcatataatatcacgtgggaaagatttgtcaacaggttttcggatactgtttgcagacccatatttggtacagcagattttgcagaatatagatgacgatagaaccatctaccagatgggagagacagaagaatccggagacggagaaagagtaacagcagataggaggaatcagtatgttttgggtagttgtaattgccattcttttcatcaccagcaagccgatcacgaagatcggtaccttccatgttgcgaatacattctataaaggattgaagaagaaaaggtaaggaattgtgatttcccgcgaaggtagaaaataaaaagacgagccgaagctcgtctagtacgttcgataaggggatacgcaaccccacagcataaagctttatcttagatttctcggacattcattggtaaacacatccgcttgtctatcaccattgtttctcggacattcattgataaacaacaacaatctaagttctgtaatcataataaatccatttttatcgatagggaagatggattgtttgaatattctgtgaattatacatgctattcataatttggtttttttagcatgacataataaaaatacgtgatactcagaggaggttgtgattatgggtaagattcttggtctggatgtaggtattggatctcttggatgggcagtaattgatgaagaacaacatagaatagttgatttgggtgtaagaatatttgaaagcggtgaagaaggtgcaacgaaagcagccgatcgcgcgagtcaggtcagaagacagtatagatcaactaagagattgaacaagcgtcgtaaacatagaaaacagcgaatcaagcagtttttggaagaacagggtatcatttctacagaggatattaatgcatactatcggacgaaaggtacaaatcctgatgtatggaagatgcgcgcggaaggacttgatcggaaactggagccaactgagcttgctgcagttttgattaacttatctaattatcgagggtatcaagacttctatgaagatactgaagaagacgatgccggtaaactttcggaagcgaagaatcgaatcaacacgttattccaagagaacaagaataaatatcgcacgattggcgagatgatatacaaagatgcatgtttccgtaataatgcagatggtaaactcatcattcgaaataaggcccgtagagaaaatggcaaagcggtaaccgactataagtatcttattgatagaaggtacctgcgagatgaactaaaacgattactgaactgtcagcatgagtatggctatgatcaatttgctcctgatgtaatagatgaacttagttctatactatttaaacagagagattttgaggatggcccaggacctaaggataaggcgacagaaaagaagtggagagaatcgcttaaaggtaaccagacgtattcaggttttgatgaacttgttggtaattgtcccttttaccctgaggagaagagaggccataagaactctcagctttatgacatgtatgtgatcatcaatacactatcacaactgtcattcgctgataaggagtcgcaagagcagaactgcccggaacatcttgtacatgaaatgagacaactgctctttgagaataaaggtattctcacgaaaaaagatgtagagaatctttgtaagaaaaataacatcgaaatagagattcctcaggaattgaaaaacaagaaaaatctgattaaggcaacctatattcagtttttgtcgaatccagaagtgttcccagaatctatggtgaagcgattcaaggaagaatcctacgatgatgacaatgccctttcttcacaaatcgggtattatctcgccaaatacgctacgcctagaagacgcaaggaagagttgcagaaaataatgtccgaggaagattttaaacttcttaactactgcgacaaaattaaggtggagaagtccggaggcggtgcaaacgtatctgccaagtatatgaaagaggcaatcaatgcatatttcaacggtgtgaaatatggtgattttcaggctgaattcaacaaagaacaccctcttgaagagaaaggtaactacatgtctgaatcgggaaaggttcttcctatcacagatgcagatatggtaaggaatccggtcgtatacagaagtttgaatgaaactagaaaaatcgtaaatgctgcgagaggaaagcataaggatatcaacacaataaatattgaagtggctaaagatgtaggcaagtcttttgagcaacgcaaggaaactagtaagtaccagaaagaaaatgaagccaataatgaaaaacttcgaatggagcttatcgaaaaacttgctgcagtgaatatgcaagtgatgttggctgataaactgattgaacgttatactttgtgggacgcccagaagggaatgtgcatgtattctgggaaacctattgcatttgcggatctggttgggactactatcgtacaagtcgatcatattattccgcaatctattgttctcgatgaaacattgaacaataaggtgcttgttctcacggaggaaaaccagaaaaagaaaaaccaattgccgctggaatatatggacgagaagcaatctgttgatttcaagaatcgtgttcataatttgtacagaacaggtaaaatatcgagaacgaaaaaagaatatttgctacttcctttcttggatgatgaaacgatcaaaggttttgttgatagaaatattaatgatacgcgtactattagcaaatatatagcaagctatcttcgtgtagcctttaatgatcaggtgaaagtccaagtgataaaaggtgcggtaacaagtcgcttccgtaaaagatggctgggtagtaaattaaaacggtatgattatgtgccgtcgatttatggcttggataagaaaactagaaatctgcattattatcaccatgcaatcgatgcaactgtggtggcgaacttaacacgcccatatattgaacttgcccaagactttgtaaaatttgaagctattcaaaaggatattgtgagtttgcagaagaaaggcagcgggaataccgcccttaaactccaggaagaattgattctcgagcaagcgaaaactgtggataagatgcataaattctatgggttcaaccgtgaatataccaaagatcttctcagctccggatatgttccaagtatttgtgaagaacttcgaaaagagatagaagtacgagttccgcttgtaataggatttaatgcgaaagactatgttgacatggagaaggcgtactatgatttgaggcctctacttaactctgttaagtataatttcaaggatgtggattttgaaaaccatagtgatgtagttgatccggatacgctagaagaaatcaatgctaggcttcctcttcttaatcctaatattgtatgtatgaagtccaatgcacagcttgtatatgcggataaagatgttgatgaaaaagcatctgcggaagaggttaagaaggaacttggcaatttcataaagaagttagagcaacgtcctgtcgaagattacatcacagaaattcggatggtaaatgaagaagagtattctgaacgtgttcatgaatactatcaagatgatggttttgctgataagattgaggtgccatatgtttcgttcaagataaaccgaaaattcagaggcggaatggtagcaagtgataatccgatttctttgcaaaagactggatttgctacgttcaaagaacttgaagcagatatgagaacaaaccttaagagcccatattatgttcgtttcaacaaaggtgttggagaacttggtaatttcacgatatacgatgcaagaagctactattgtatggaaatctatatcgatactgaaggagagtatcaaatccgtggcatacggtatgtggatgttaggaaggaaaataaaactggaagactgcgtcttcttaagacacttccagaaggttgtcagcattacatgtatttgtttaagaatgaatatattaaagcatttaagaagggtaagttgagaaataacggcttcggagcctaccgaggagttgagaacattaatcaatcgactggaaaaatccgattatactcgaacagcaaccttaagggtagggatactattattaatctcgcgggagaaacaacgaagattgaaatgtcaatcctaggacatattataggagagcgaaaatgtggagatcaatcattgtttataacggagaacggttaagcgttagggatgactggttggttgtaacgtatgaggatggtgaaacaaagcagattccaatggaggatttgtactgccttgtaattgataatcgcagccttaccatcaccatacctacattaactgcgcttgctgatcacaaagttcatgtgatagttacgaatgaacaacatcttccaactgcacagatttacccgttgaatacgaattatcactgctttcgcattctaaagaaacagcttgctatgacagatgatttcagggggatgctgtggcaacgaatcgttagaagcaaaatactaaaccaggccatatgcttggataaccaatttgcagatcttgatgttgtagaaagactgcgcgaattagctgatgaagtagatcctcacgatgttggtaatcgtgaaggcatcagtgcgaaaatgtattttcgtaacgctttcggctcggagtttattcgttttgctgatgacaatattaacaatatgttgaattatgggtatgcgattattcgctctggagtagcaaaagcgcttgtgtcccacgggtttaactgtgttttgggtatacatcatatatctgaaacaaatgaatttaatttggcagatgattttatggagccatttcgaccagtggtggatgattgggttgcaagtcatgatgattgttatgaagaaggattgtcgaagcatgtcaaaggagaattagtaggattatataacacagaaatatggattgacgggaaagagacgaaagtccgctatgctatagaaacaatgattcgatcttttgttacctcaattgaaacgaacaatccagatcggatattattaccggaattgaagtataaacatgcgtaaccgtgctatgagaataattgtattttttgatttgcctacgaatacaaaaactgagcggaaacactacgcggttttccgaaagtttttgattaagcatggtttttcgatgcttcagttttctgtatatgaacgtataactcgcaatcatgatgattgtgagaagtacattgctatgattgaagggaacaaaccgccaaaaggagatattcgatgcctctccgtaaccgagaaacaatatgagggaataaagctgatccttggttcaaacgaaggaaaagaagactattctgatgaggatttgctggaattctaattgaaaactagccaaatatgctacaataatatcgttaaggttttagttctcggacattcattggtaaacaaagacttgatacggtcatcaatcgcgcactaagcagttttagttctcggacattcattggtaaacaaagactcaagatccttccgtcagacgatatgccgggttttagttctcggacattcattggtaaacaaagacaaaggggggatgagggggttgaatggaatcggttttagttctcggacattcattggtaaacaaagacgtgcccatatttccaccgaccgcactcgtcgttttagttctcggacattcattggtaaacaaagacaaatatgaggtgcaagaagtgcggactatgttttagttctcggacattcattggtaaacaaagacctagaaacgggcgtataacttcgcctccgtgttttagttctcggacattcattggtaaacaaagactgccgtttccctgatttgttgcccagtcccgttttagttctcggacattcattggtaaacaaagaccggtacccagcttataagagacgcgcaaaggttttagttctcggacattcattggtaaacaaagactcacgaacttcttcaagcattgaaagggggttttagttctcggacattcattggtaaacaaagaccgatgagcgagcaatccgctcgtttctgtggttttagttctcggacattcattggtaaacaaagacggctctgccttgcttgcgctcaaaagaagagttttagttctcggacattcattggtaaacaaagacttgtcgatcatccgaccaacaagaagtacagttttagttctcggacattcattggtaaacaaagacgatcggcgctattattacagcgattgacgcgttttagttctcggacattcattggtaaacaaagaccgcaattgctgacacagaaaccgagttgcgttttagttctcggacattcattggtaaacaaagacgtacaatgaacgcgttctctgcgggcttatgttttagttctcggacattcattggtaaacaaagactttcttaaagacgctattggtatctggtcgttttagttctcggacattcattggtaaacaaagacttcccaattctgcaaggatatgcagacaaggttttagttctcggacattcattggtaaacaaagacgaataacacgtatgttaacaaggcaaaagagttttagttctcggacattcattggtaaacaaagacgatcaagatcgaggccctggcagccaatccgttttagttctcggacattcattggtaaacaaagacgctgagtggggcgggtctttccagatctcggttttagttctcggacattcattggtaaacaaagacttagtaacactacttcagaaaatgaaaaccgttttagttctcggacattcattggtaaacaaagacagccggattcaagttccctgcaacagttgcgttttagttctcggacattcattggtaaacaaagactccgtggaagtcatgacaaatgacccggggttttagttctcggacattcattggtaaacaaagactgtactgacaaatctcaagctctcccagttgttttagttctcggacattcattggtaaacaaagactgaaggatataacgccacatgaagaagacagttttagttctcggacattcattggtaaacaaagacgttaatatgatgattaacacagttggagcagttttagttctcggacattcattggtaaacaaagacgtaggaccgcgaaaagctgaccaggtgtttgttttagttctcggacattcattggtaaacaaaagaaatgaggtggcggccaacccgccaccttttttgtattgaaaattgcaagtttccagcgggaaagtgaaagcgtcggcatttgacatttgatataatgaacaataactgaaaatatgaaaacatcatgtatcaggagggcgtttccatgaagagagaacttgcgaaagagaaagcgagagaactacttggtaagatgactaccgaggagaaagtggcacagatgatccaggtcacctacacagatggtggtcgagaagaagccctgaaatgggcaaaactcggagcaggttcttttctccatgtattgggcgatgacgcccgtgaactgcagcaggaggccatgaagacccgactgggtattccggttatcttcggtatcgatgcgatccatggacatggcctgaatacgaaagccacgatctttccttcccaactggcatgtgcctgcagctggaatccggaagtcgccagaaagatgggcgaagtaacggcacgtgaagtggcaaccgacggactgcactggacattctctcctgtactttgcatcggcagagatacacgctggggacgcgtgaatgagacttttggtgaggatccgtacctgatcggtgagatgggcgcggcaatcatcaagggataccaaggtgacgacctttccgataacgaacatatcctggcctgcgcgaagcattatcttggttacggcgaggccacaggtggacgtgatgcctacgacacagaagtcacggagagaaaagtacgtgaactcttcctgccaccgttccagaaagcagtggacgcaggttgtgccaccatcatgacggcatacggcttcctggatggaacaccgcttacagcgaaccgccggatcctgcacgatgtacttcgtgatgaactgaacttcgacggattcgtaattacagactgggacaacacccagagtctggtatggctacagcacattgctgccgatatttcagaggcttccatcatggcagcgtctgccggtaatgacatgatcatgacgacaaagggattctacgaaggtatgctttccgcactccgcgaaggcaaagtagacatctctgttgtggatgaagcagtactgcatatcctgaccatcaagtatgagatggagcttttcgagaagccggagaagaagggcgagcctaactgcttcggcaagaaagaacatctggatgcgtccctggatgcggcgagaaagagtgtcacgcttcttagaaataacggcatgcttccgctgggtgagggcgtaaagaaaatcgctgtcatcggcgagaatgcagacaatgtccgtgcccagtatggcgactggacatactttacgcatccgatgccggatccgaccaatagccgcccggccttccgtccgtatgtgacactttgggaaggcgtgaaggatctctgtgatcaggtcggaatcgaagcggtatatgcgaaaggctgtgccgtaagaccggtggaaggcgccaatgaagatgcggatctggatgaagcggtccgtgtggcagaagaggcggatgtggtcctctatgcagtaggtgatgtgatcccgcagttcggagaattttccgaccgcgctgacctgaatctctccggaagacagaatgaactttttgcccgcttgaaaaataccggcaagccggtctgcacgatcctgattgcatcgaagccactctgtatgggtgatacggctgagaaggcggatgcagtgatctgcggattcaacggcggtatgtttgccggccaggctctggcagaagtggtgttcggtaagatcaatccgagcggacgtctgccgatctccttcccgagacacgtaggacagcttccggtctactacaaccagatgccgggatggcacggaggtaaatacaatgacgtgccgaatactccgctgttcgcatttggagaaggaatgggatatagttcttttgcatacgaaaacctgaccgtcgatgcagatctgaaactgaaagtttcggtcaagaatctcggtgacagagacggcgtggagacggtgcagatctaccagaacgacagtgtgtccagcgtgctgacaccggtaagaagacttatcgcatttacacaggttgaacttgcggcgggcgagacaaaagacgtagaagtacagctgaatcaggacgattttgccctgatcaatgcgaagtgtgagaaggttgtggaaccaggcgagtttactgtatttgccggacacagcagcaaagaagaggatctggtttcggttaagatccaactttgaggaaagaggataactgagtgagtaaagagaaagcggaacgcacgactatcaagggacagacatttgacgaagagagagcgctttacaatgcggcgcacacggacgtggtgtgctgcaattttgcaggaccggcggatggagaatcggcgctgaaagaagctcgggatatcaaggtcaaggagtgcacattttccttgcggtatcccttatggcatgttgtggatttcactgtcagcgaagtcacgatggacgacaagacccgggctccgatctggtatgccaagcacggtacgctgaagaactgtgagatctatggcgtgaaggctgtgcgtgagtgtgaggatattcagatcaaggacagtacgatcaactcggtggagttcggatggaagtgcgacggactggatctgaaggatgtcacgatcaactcggaatatatctttttcgacagccgaaatgtgtcgctgacgaacgtgactatgacgggcaaatattccttccagtatgtggacggactgaagatcacggattgcaacctggataccaaggatgcgttctggcacagtaaaaatgttactgtgaaaaactgtgtggtgaagggcgaatatcttgcttggttttcggagaatctgacattgatcaactgtaagatcatcggcacccagcctttctgttactgcaagaatctcaagcttattaactgcacgatggaagggtgcgatctggcattcgagtactccgaggtggaggcggatgtgaagggtcgcatcgattccgtgaagaatccgaagtccggtacgatcacctgcgatgaagtgggcgagatcattatgggaaatgccgtcatggaatgtagcgggcaagtggtgacccgtgactgaagtcactataccttttctgtcttcttgtgtacaatgatgcatgagtgagaagtatttttctcggaagaaaagaaggaaagagaaagacggaaaatggaagaatataccccgcaggcaagtttaaagtccgggctcaaaatgaaccggaatcaactcaagtatctgctgatttttgcgatgctgatcgaccatattgcatcggattatgtgccgacgaccacgcttcttggccagcttatgcatgtcttcggaagactgaccggacctggtatgtcattgctactggcagaaggatatcagtatacgaagaataagaaaaaatatgcgatccgactctttgtttttgcgttgatttcgtgggtgccgttttcacttcgcacctaccaccgtttcctctatttcggcccgggcatgttcggcatgatctggacactttttctggcttttatcacggtctggatgtgggataaactcaagatccataaggcgtttaaagttatgctggtgatcctgacctgcatcctgtctctttttggagactggtgtatttttgctgtgctgtgggcactcttcgcatatatctaccgcgataatgcaaagaagaagtggatctcttacggaatcgttgcggcagtggcggcgatatttcccatggtctttgcgggtattgcggaaggacgtccctggctggaggcctatcagctgggcgtagcgctggtgccaatcgtgatcacctttttctacagcagagaacccggaagcagacatccgttccataagtggttcttctatgtgttctatccgctgcacatattggttctgtatctgttgaaacatgtgctgttttaggaactgttgtgatttgtatgagtacatatgaaaagcgatgctgttgaggcatcgcttttttgtagttgcttatttattctgttcggatatcagtaacccagatcgtcatttaccaggatcacggagatgcgtccctcatggcgggagtagcgggtgatcaggaactggcagcagatggtatccggtgacttgcagtcaaagcaggttcccttcttggaacagggtgtattcagaccgaagcgttgggcgttgattggtgccgctacgtttctggcacgcttcatggcgccgtccagatcgtcgcatactttattcatgccaacgatgaaaagtacatgtttcgggccctgggcgatggcggatacgcgattggaattgccgtcgatattaatgaggataccgtcacgggtcatggcgttgcagctggaaaggaagaagtccgcatcgtaggccatgagcatggcctggcgtttatcttcgtacgcatcgcggtcgatgaaattgtaatccccgtcttttagcgcgatggagagaccaatctcgtgtacgctcatggcaccacccatggtgacggaactgcccttcgggatcagactcaaagcaagctccagggcttcttctttattcttggcatagtaaccggtcatattgcgggactttaatccttcgataacggtggcggcgagaagttcattgcgctttgaaatattgttgtccatagtcgttcctcccggggatctggcgatggattcattataccatacgtctattgccaatcgggtcccctcgtggtagtatcaggaaagaagcggggcgagagtttttgccatattggcttcttgaattcgaaagaaggagcgcggatacgcgatcgggtggaccaatgagaaagtgatgatgcttgaaggatacacatgttatgacaagacctgggaagaggtcttcttgtgtgcgctttcatggaatcatcgcgaaggaaaacctgctttcgaaaagaaaataaggtagatcgtgtgagtctgtttctgcgtgcgcgggaacggactttttgttgcaccgagaatgcggatcggaaagatccgaaggccggggccccgggcagaaagaggcagatatatggcacaaatcagagtaaacgatctaacttttaactacgccagcagtttcgataatatcttcgagaatgtatcttttaccatcgacacttcctggaaactcggattcatcgggagaaatggaaaaggcaagacgacttttctcaacctgctgcttggcaaatacgagtatagtggcagcatcagtatggatgtgccctgcgattatttcccttacaagatcgcggcggaggacggggggaagacggcggatgagctgatggaatcctggaagccgggtgtcgagaactggcgcgtgatgtgtgagcttgcggaactggatgtggacgcggaattgctgtaccggccattccgtacattaagcttcggtgaacggaccaaagtcatgctggcagtgcttttcgccggagaaaatgatttcctgctgatcgacgagcctaccaaccatctggatcaggatgcgagggagatcgtgaaagggtatctggcaaagaagaagggattcattctggtgtcccatgaccgcgatctgctggatgcctgtgtggatcacgtgctggtcctgaaccgttcgaccatcgaagtgcagacgggcaatttcagttcctggtgggacaataagacccgggcggatgcttttgccaaggccgagaatgagaagcatctcaaggagatcggacacatgaaggcggcgatgcagcagagccagcgatgggccacaaaaaatgagaatacgaagatcggctacgacccgatcaaggaacatgaccggaccaaaaacgcccgttcctatattggtgcgaagacgaagaagatggagtcccgggtgaagtcatatgagcagcggatggagcggagcatcgaggagaaggaagggcttcttcaggacatcgagcaggtccgtgatctgaaactctcgccgatggagcatttccgtgaccgcctggtggaaacgcgggatctgtcgctgacgtatgagggagcctctgagccggtgttctccggattgaatctggagatcaagaacggagaccgggtgtttctgtgtggcggaaacggatgcgggaaatccagtttcatcaaggcgcttcttcgtgagacgggaaaagaactggatgaccatttcatgatcagtgggaggttggaggtggcgccccatcttgagatctcgtacatcaaccaggacacgtcccatctttcgggggaccttcggatgcatgctttcgaacatggactggattacagtctcttcctgtcggtgctgcgtcatctggcgctggaacaggcgcagttcgataagaagatcgaggagttttcggaaggccagaaaaagaaggtcttgatcgctaccagtctgctgactccggcgcatctttatatctgggatgaaccgctgaactatgtggatgttttttcgcggatgcagctggaaaaactcattgaaacttacgcgcctaccatgctgatcgtggagcatgatgtgcggttccgggagaaactggctacaaaagtagtggatatgtgagaaaagtgcgcggaaccctctgatttttcaggtgtctccatgctataatgcgagaagggagaattggttatcggccgcgaagtgatttgcacatgtaagggttggtggaatatgcgtacaaagaaatctattttcagtcttgttgtagctttagtgatgctcttgggcatgctgggtttttccgagtctaagatccgggcagaggaggatccgagagccacgaatgtgacgatttccgacaaaggaataatgacgtgggattcggatggggattataagtataaaattgcggcatatagtttcaaaactcccgccggatc

SEQ ID NO: 3660 - DNA, 18096 bp, synthetic construct
  misc_feature 1..18096: note = Synthetic
  source 1..18096: mol_type = other DNA
ctgaggaaggccaccagcgcgctcttgagcagcccctgcatatcgagggcgaggtcgaactggcgtgttcgcagggcgcgcgccagccggatgggcgcggtcaggggcggcaccgagcaaacgcctggggcgtcgccctttccccctcccacaatcaaggtctcactgaggtgggggctgccggtgagcaccgccgccgccgccggcttcacggcccagccgatatatgccttcggaaaccggcgccggagagctgccagcaccggcagggactggacgacatcgccgatcgagctgagcttcgtgatcagcacggactccacgcgcccgactgcgatcatgtggagcgctctcctggcggcctgctcttccaccgcttgtgcagccagaaccactgggcgggatgctcgcgaatctgctgctcgatgatcttggtgtagcgcgcggtgttgaccagcaggtcctggtcgcggtctccggtccggatcgttggcactggctccccgatcactacggtatgggtgtcatcgggattgcgccagccgcacgtcggtagggcgggcgcgccggtgcgaagcgcgaaggccgccgcgccgggcgcggtggaggcgaggtgaccgaagaagtcaacgaagaggccctcgtcgccggcgttctggtcgagcaggatcccgaccagctcgttgttcctcagcgcggacagcgagcgcctggccgccacctcctggtggaagactcgcatccccgccacttcccgggtgcggcggatgtactcggtcagagtgtcgtcgcgctgcgcccgggcgatgacattgacggggaagccctcggccgccaaccgcgcccccaccatctcccagttgcccaggtggccggtgatgaggatggcgcccttacccgcggccaggacggcttcgatgtgctcggccccgcgcaggtgagccacctgcttgatgtcggccccgctcatggctggcaggcggacgaactccatcaggcacttcccgagatgacggtagcactgggcggcgatctggcgcagctcggcctcgctcttctcctcgccgaaggcgagccgcagattggtcatcacgatcctgaagtggcggggcgagacgtgcctgatgagggtaccgatagcgctcccgagtcggtagccagcccgcgccgggaggctgtggtagcggcgcgcgatccacaggagggccgcgttgcccaggcgcgtctgcatcctgcggtgccaggcgtagagagcagagcggccttccggcccgtacatcgcgggcgagccgggccgctcccgacgactggtattcacatcacgcgcttcccgcgcaccaggcaagtcagctcctccgagagggtcgggccgcccggccgtccggccagctccaccctcagggcccagaccggcctcaccagcgcctcctggggtatcctcaccgcatccttctcggtggtcacgacccagcgggcctccaccggctgggcccgcagtgcctctctcaactcgtccgcccggtacgggtaatggtccgggaagcgaagtcgtgccaccacctccgcgcccaccttctccaggcttcgctcgaaggcgaccgggttgccgaggctggagagcgcgcacacaagctgtccgctgagctgctcgggctcgacctcgtcatcggttcccagctggcgcagcctcaccgggatgtgcgcggcctcccatacccgcgagcgaggggccaggctctgcacccgggcgcgaagcgcctccaggtcgtcccgtctcacgaggtcagagtgggtgagccacactccatcggcccgtgtcaggttcgcgattggctcccgcagcaaccccctgggcagcagacaggctgtgggcttgctgccggagccgctgggctctgcggctgccatcgcagcctctgtgcaatgatacccgaagggcatgagcgcgtccaccagcaccaggtccaagtctcgcgccagcctctggtactgaaatccatcatccagcacgatggcgtccgcgcctagcttctccagggcgagggcgccggtgcgccggcggtccttgccgaccaacacgaacacctctggcaggagccgcgccaccatgtaaggctcgtctcccgcggccgtgacggggagcaatggtccgagcccttcggagacgatcagcgccctgttctcgccatgtccgcgatagccgcgactgaggtaagcaacgcgacgcccttgctcttgcagccagcgcgccacggccagggcggccgtggtcttcccggtgcctcccaccgtcaggttgcccacgctgatgaccggaacggggaatcgggtccgccgcgccaggccgagccggtaggctgtaagatgggccttcagagcgaggccataccccacggataggacccagaggccggccgcggcgaggcgctctgccggggcggtcggctcacctcgcaccacgcgctcccaaaggcccttaggtgacgagatcacggcgcggactcctgtcccagaagcgcgcaggccacctccgcgcagcgccgcgcggccccgcgctggcgcgcgatcagcactcgtgcggcggccgcgatgtcgacgcgcagcctcggatcgccggcgatccggatcagctgttgggccaggtcgtcggcatcgcggacgcggaacccgaccccggactcgaccaccaggtcggccacgtccgagcagttctctgtgtgaggcccgaacagcaccgctcgccccgcggccgtcggctccaggaggttatgacctcccaccggcaccagagttcctccgacgaacgcgaccgcggccgaccgataggcgtcgcgaagctcgcccatggtatcgaggacgactatcgcctcgggggaggcaggccttccatcgctccggcgcgccaccggccagccttgcgccgctaccagggcggcgaccgcgggcactcgctccagatgccggggcgccagcaggagtcgcgcccgggggaccgcggagcggagtcggcggaatgcagccagtgccgcctgctcctcacccgcgtgcgtgctgccggccaccacccatacctcatcaccggaaatgcccaggtccgaggccaacctctcggccgggctgctgcccggcgcggccaagctgtccaccttggtgttgccggacacggtgacccgatggtccggcaggccgagccggcgcagccgccgggcatcctgctcggactgcacgcagaagtggtggggaagggagtagagccactgcacgaaacctcgggcccagcgggcgcgcttcatcatcctgtccgatactcgtccattcactaccagcaccttcgcgcccgagaggcgggcgaggccgagcaggttgggccacagctccttctcggtgacgaccaggagctgcgggcggaggcgcgccagcgcgcgccccatgcagccgggtccatccaatggaaggtagaagaaggcgtcggcttggcagctccgacgggcgaggctcatcccggctgcggttacgctggacatcgcgatacgcgcgctggggagcgcggctcgcagcgcctccagcacgggctgggcggccatcacctcgccggcggagacggcgtggagccagatgcgcggccctccggagccggccacccgcggcacgaggcccaggcgatcgcgccaggggcccagcggcctacgacgaaacagcgatcgccatagtagatagcaagcgattgccggcgtggcggccagcagtaggaggctgtatgtgagcaggcggagccagaggagccggtactcacctcggtctgcgtgctctctctccggcggctcggcgcgcgggctcatggtgcgctcggcgcctcctgcctggtggctgagagttgggcctcgtagaggcgccggtaggcatcaccccggcgcagcagctcctcgtgccgtccttcctctgcgattcgtcccccggccagcacgaggattcggtcggcccgctggatggtggacagacggtgggcgatgaccacggtggtccggccctgcatcagccgctccagcgccctctggaccagggcctccgactctgcgtccagtgcgctggtggcctcgtccaggatcagcacccgcgggtctagcaggagagcgcgggcgatcgcgatccgctggcgctggccacccgagagcttggcgccgcgctcgccgatgcccgtaccgtaacgttggggcagagcctggatgaagtcatcggcgttgcccgcccgcgcggccgcgcgaatctcctccaggctggcctcgggccgcccgtaggcgatgttctcggcgatggtgccgtcgaacaggatcggctcctgaggcacgatgccgatctgcgaccggagagatcgcaggctgacggtggccacatcaactccgtcgagctcgatgcgccccgcggtgggatcgtagaacctcgggatgaggctcaccaggctggtcttccccgcgccgctggcccccaccagggccaccatctgaccgggctcgatcatcaggtcgagcccgcgcagcacaggctcctcttcgcggtagcggaaatccacgtcgtggaaggctatcctgcccttcacccgcgccaggtcgggcgcccccggcgcctcccgcacctcctcgtgcgtatcgaggacctccaggatccggtcgcccgcggccgccccctgctgtgcggagagccagatcttgccgagcaggcctagcttgctccccaggctctggcccgcgtaggcgaaggcgatcagagtgggcaagctgagaggccccttgatcgccatgtacccggccacgcacacgaggatgagcatccccaccgcgcccacgaactccaccaggggtgtgagcagggagattgcggcggccacccgcaggttggcccggtagttgctgtcgttgatctcgcggaaccgtccggcctcgcgctcttccatcccgaagatctggacggtctccacgcccgacagccgctcctgcaagaaggcgttgagcgcgcccaggcgccgctgcatctcccgggagagcctgcgcacgcgttcgccggagcgcgcgatcagcagcgagacggctggcacgcaggccagggcgaagatggtcagacgccattcgagggaggccatcagggcgagcgcgatggcgatcgttaccggccctcgggccgcgtccaccaggtcggtgccaagcatacgctggagcacgacgacatcattgctgacgcgcgagagcaggtcgccggtcgcgcgggcgcggtagaaggtgagtgactggcgcagcaggtgctcgtagagccggcgtcgcaagtcgcggatgatgccctgcgcgaagtgttgagcgaggtagccgcggccgaaagcgaagaggctcttgaggaaccaggccgccagcatggcggcgccgaagatcagcaagctgcgcagccttccctccgcactgccggtctgcacccagcccaggcgctgaatccagtcgaggtgtgctcgccccccgagggccggcatcgccgcggcgggcgcaatggcgagcagcatgaaggcgaggagcaccgggatggcgccgttctcgaccagggcttcgccaaacaccgaccccagcgcgccgtaggccgagagacggcggccccgcgcctcggagagcacacgcctgagcactcccagggcgtgggcccggtcggccgacctctcagccccctggctcacggcttgcctccttgccgttcaccaatcccaacaccatctccgcggtgcgtcgggtggcgccggccggacccagacaggcgaccaccagcccgagatcggagcggaggcgcgccctccgcccctggtccgagagcagagacgccacctcctgcgcgatcgcctccggcgtggcggccgagcccagcaactcccgcaccacctcgcggccggcgatgatgttcggcatggcggcgaatcgctgcccgcccagcagcccgcggatcaaccgatactgaagcgtggtggcccgacttgcccggtacaccaccaccatgggcacgcccaggcacgcgaactcgagcgtcaccgtcccggagcagaccatcgccgcctccgccaactggagtgcgtcgtagtccatgccctccagcagcacggcctcgacgccggcgcggtggaggaccgccatcacgtgctctcgcgccagggaagcggccaccggcacgaggagctgaaggtcggggagctggcctgccaggcgccgcgccgcctccgccatcacgggcaagacgtagtgcatctcctgctgtctgcttccaggcgccagcgccaccaccggcctcacggcgtcgaggcggtagcgtgcccacgcttcttcgcgggtgatccgggggcgcgccgtttccaccaccgggtgccccacccactccacgcgcgctcggcctccctgcagcagatcccgcgaccagggaaacggtgtggcgatcgcgtccaccagatcgcgcacctcgacgttccccgcgcgttggcgccacgatcctggggggaagtagtaaagcgtggggagacccatccggcgagcggcacgcgcgagcagcatgttgccggccccgaagtcaatcaggacgagcgcggaagggggctcctgggcgaggtgcgcgcgggccgcgcgcagggctcgccagacccgcggcaccttggtggcggcctcgaggaccccgatcgcgccccaggtggagctgtccgcgaccaggtcaacaccggccgcggccatctgtcggccgccgattccggccaaggcgaggtcgttccgcagagcgcgcagctcccgggccagcagccccccggcccagtcccctgaggcttcgcccgccgccaggaacacctgggctgtctggtctgatgccccccgctcgccgccctggtgatctgtcgggggttggctgcttggcatggctagctagcggcttcttgctgacgccccacccgaccgttgcgcatccgccagaggaaatctacgaggtagcgaacctccgggaagctgcccaactcttcgctgaccttctccaaggcgctggacatctcgatcccggagcggtagatcagccggaaggcccgctgcaccgcctgacgcgtctccggcgagactccggcccgacgcagcccgatcaggttgggcccgatcacccgcgcgggcttcccgtccaccaggctgaatggcggcacgtcctggctgagcttggagtagccgctgaccatcgccagcgtccccacgcgcacgcgctgatgagagcctaccatgccgccgatgatcacccggtcctccagcaccacgtgtccactcatgcccgagagcgtggccaccatcacgtgatcgccgacctggcagttatggcccaggtgagtcatcgccatcagcatgttgtcattgcccacccgggtggcattgccctccccgctggcgcggtgaatcgtgacgtgctcccggatctggttgcgatctccgatgatgacgcgggtgggctcgtcgcagtagcccaggtcctgaggcggcgccccgaccgccgcgccgaagtagaggtggcaactcgcgccgatggtggtatgctccaccagcacgtgagcgtccaccacggtaccggggccgatagtcgaaccgtagcggatgatggagtaagggccgacctccacgtcgtcggccagctcgcagtccggttcgacaatggccgtcgaatggactcgccccacctcactcctcctcaccgcggccggtgtcgagcgtgttctggccctgatccgcccgcagcgcgaagaggtactcgccctcggccaccacatggccatccactttgcccaccacggtgacgcggccgatgtctcccttcgccttggtgagtgtgacctcggtgatgagctgatcgcctggcaccaccggtcgccggaagcgcagcttgtctatacctgcgaagaaggcaagcttcccctcattccccgaggtgaccaacaggaggatgcctccgacctgagccatcgcctccacgatcagcaccccaggcatgatcgggttccccgggaagtgcccgttgaagaaggcctcgttgaccgttacgttcttgaggccgaccgcgcgcttccccggctccaactccagtactcggtccaccagcagaaatggatagcgatgctgaagtacagcctggatctcgttgatgtccatcatccgcagctctcctcgtcgcccgcctcaggcgggctgtcaggcaggctcgcgatgtccgccccgacccgttcgccgtagctcagggtcactccgagcggcagtcgaggggcgagggcagcccaccggccggccgctccctgccctatcgcggcggctggctcggtccgccgaacgcggcgcgcagcgccttggccagggcgacgttgacccggtggctggggcgcaaggccactacctgggcctcgaacctgtgcccgcacagggcgagatcacctaccaggtcgagcgtcttgtgccgggcgatctcatctgggaaccgcagcggcccggagtagcctgcgggcccgaccacgaaggcgttctcgacacctccgccctgcgctagaccggcggcccgcagtgctcccaactcgtgctcgaacgcgaaggtgcgggccggcgccacctccgctgcgaaccgccccgcggtcagcggcaggcacacgagctggcgcccgatgacggttcccgagaagtctacgcccaccgtcaccgagagccccctcgccggcagcgccatcgcccacgagtcatcctccgccgcccagacgggcctggccagcacatggactgcccgccgccgactcaagcgtctccgtcccgcctggcggagcagctccacccactcccgcgcgctcccatcgcaggccggcgcctccgggccgttcaggctcaccctgacgttgtccaggcccatgccgtagatggcgccgagcaggtgctccacggtccggacgcgagcatcgcccagtcccaatgtgaccgcccggtcggtggccaccacatggtctgcggtcgccgggatctcggccccggactcggacaggaagatgatcccctcgtccgcttgcgccggcagcaacgccacggcggtcttggcccccgtatggaggccaatcccttgcttgcacacctggcgagcaatcgtcgtctgagcggcagggcggcggggatggcccgcagccgctgtggcctcacgcaggttcgctggaggtcttgctgccacttcgtgcgccaactcgggggctcacccttcggtctgcccgttgcggcgcattatagcatggccgcgcggccggcgcaaaccgatcccgggaaggggggcctcgccgcttcggctgagttccgcagccgccgccgcggctcaggccccgaggggcgagccgatgagcagcgccaccagagggtctaccacgacccgccagagcgcatcccaggccggagtgcgcatgaacaggagcagcgcgatcaggcctaggggcgcgagccggcctatcaggtaggggtccctgatgccgagcaagcgcgcggccacgtgagacccatccaggggcgggatcggaaggaggttgaacaccagcaggcccaggttcaccagcaccccgatcaggaagaacccaagcagggcctgcaagaggctggggctgagcgtctggaccgcgaggttcgagagtgcgagcctgaacagcagcgcccaggccactgcctgcgcgccgttcgcagccgggccggccagggtgacgaagacgtcgtcgcggccgggatgccgcagccgctcgagagataccggcaccggtttggcccaaccgaaaccgacgccgctgagcgtggagaccacgaagaagatggtgcctatggggtcgaggtgggagagaggcgacagggtcaagcgtccggcgcgcttggcggtatcgtccccgcagaggtaggcgacatagccgtgcgcgacctcgtgcaagacgatcgccagcagaaacaccggcaggctgactatgattctggtgagcgcgtcctcgggcatgtggcgtctatcccggcgggtggccgccgcggggtggcgacgcgcccggaggtggcctcccggaccctcaccgggtggtcgggaccggcacctcgtcgagcacctgggccaccaactggtgcgcgtcggcctgccgcacccgcgcctcgggtttcaggaaaatgcgatggcagagaatggccggggccactatcttgatgtcatcgggcagcacataggagcggccctgaatggccgcccgcgcctgtcccgcgcgcagcaagcccagggaagcccgcgggctcgcgcccagagagagcatggggtgcccgcgggtcgcccacaccagttccaccaggtactgcttcagggactgatctatgtggacgctcttcacgtgctcctgcatcgtgagcacttcgtcgagctgcaccaccggcttgacggagtagatcgggtgctgcttcatctgccggtccagcaccgtcacctcttcctccggcgcgagatagcccatgtggatacgcatcagaaagcgatcgagctgggcctcgggcagagggaaggtgccccggtactcgatcgggttctcggtggccatcacgaagaagggccgggtcagcaggcgggtggcgccgtccaccgtcacctggaactcgtccatgcactccagcaggctggactgggtcttgggggtggcgcggttgatctcgtcggcgagcaagatattggtgaagaccggcccctcccggaaggcgaactccgccgtcttctggttgaagatgtaggtgcccgtgatgtcggccggaagcaggtcgggcgtgaactggatgcgccggtaggtggcgcccagcgaagccgcgagcgccttcgccagcatggtcttgccgacccccgggatgtcctcgatcaggatatgcccgttacagaggagaccgatgaccgccagctccaccgactggcgcttgcccacgatcacggtctcgatctcgtctatcagggcctgggcccgctccgccacccaggccgcctgctcccgattctccattgctcggactcccgagaggagattatagcaggccgggagaggggcagcaacgacgaggttccggccaaaaagcgacgccccctggcgttgccgcacgggagggcgtccgggcgctccgaggagcggagccttgcggaacgaaagtccacttgctgcaatagaggcgggacaatcgccgctctggtacaatgtgacggtagtctagcaccgcacagacactacgtcaagggggaggcaggcaaaatgccggcggagttcatcttgggactggacattggcgttgcttccatcgggtgggcgcttgtggaacagcacgacgggcagcctgcagggctgaaagcggccggggcgcgggtgttcgaggcaggcgtaaagggagatatcgccgcaggcctggacaagtcccgcgccactgcccggcgcgaagcgcgatcgcgccgccgccagctctcgcggcggcgccgaaggctgaccaagttggccaggctgctgcaacgggccgccctgctgccgccaggggaactgaactcgccggagcagttgcttgggtatttcgactcgctcgatcaccagctcttcccttccgaagtgcggcatcgtgacccccataccatgcactaccgccttcgcgcccgcgcactggacgagaggctgaccgcgtatgagatcggccgcgccttctaccacctcgcgcaccgccggggtttcctctctaaccgcaagaccgcgccgcgccgcagcgatgccgagggcgtggtcaagaaggagatcgggcagctcggacagcgcatcgaggaccgggacgcgcgaacactggggaagtacctctccgggcttgacccggccgacgagcgattgcgcggccgatacctgggccggaaggaaatggtccaacctgagttcgaggccatctggcaagcacaggccgcccactatccggaactgctcacggaggcactcaagcaggaggtctcggaggccatcttcttccagcgcccgctcaagacgcccgcccgcttcatcggctactgcgaactcgagcgcgatcagcgccgcgcgccgctcgccgtgctgccggcacagcggttccgcctgctccagaaggtaaacgacctcaagatcaaggcctggggggcgtcctacgatctcacggacgaccagcgcagaaggctgactcaggaattggagacgaaggaggacctgagcttcgacgatatccgcaagttgctgcccgagctgtcggaggcccggttcaacttcgagaccttcggcgaggagaaacttatcggcaaccgcagcgccgcccgcatcgcgaaggcgctcgggaagaagcatccctggcagcagctcccgagtggcgaacaggagcgcctggtgcaagaggtgcgcactcgcagccgagatgccatcgcgcgccgcgccaggcagcgagaatatgacgagaagacggccgagaagctctcccgcgtgcgattggaggaaggctactgccgcctctcccgtcgagcgctcgccagcatcgtgcccctaatggagagcggcatgcgctatgccgccgcctgcaagcagtgctacccggacctgggccgcggccaggcctcggccgtgctacccccactcgacgacgtggtggaggtgcggaacccgacggtggagcgggcactcaccgaggtgcggaaggtggtgaacgctgtggtacgcacctatggcacgccctccttgatccgcatcgaactcgcccgcgacctcaagcggaaccgcgagcagaggaagagtatctacgaacggaccactaagaaccagcgggaccgtgccgaagcgagggccgccttggatgcgatggggtatgaccccagtcctcgcgatgtcgagaagtgcttgctgtggtgggaatgcaaccggcagtgcccttacaccggcctgcccatcagcgaggtagcactctttggagcattcccggaattccaggtagagcacatcatccccctccctcgctcgctcgacaacaccttcgccaacaagactctctgccacgtgagcgagaacctacgcaagagcaaccgcacgccctgggaagcctatggccatgaccccgacaagtggcgagagatcctcgatcgtgtcggcaggttccggggtggcggccgggcgagggaggtgagatcgcggcagcgcagcaagcagcgccagtctctccgcaccaagctagatcgcttccagctccgcgaagcgcgcgacctggccggcttcaccgaccagcagctcaccgatacccagtacgcggcacgactcgccgtcgagtatgtgggccagctctacggggccggggccgacggcaatgacgcagaaggaaccaagcgggtgcaggccgcgcggggccaggtcacgtctgccctgcgcgggacctgggggctcaacttcctgggagccggagagaaggcccgcgaggaccaccgtcaacacgccgtcgacgccgtctgcgtcgccctgactgatgccgagaccatcaagctcctgagtgaggccgccgagcgaggcctacacaccgccggccagcgtatcgaccgtatggagcctccctggcccacactccgcgacgacgtcgcgcatgccgtctacgccatggtggtttcccatcgtgtctcgcggacggtaagggggcagatgcacaatgagatgttctggagcccgcggcggcgagacgcggaaggcaaagaatgggtgcatcaacgaaaggccctcagcgcgctctcggaggctgacctcgacagcatcgtggacgacgggatccgccggcgcgtgaaggaccggctgcgcggcctcgacctcagcaaccctaagcaggccttcagaacagcggccaacctcccgacgctgtcccaccagggccgggaggtacccatccgcaaggtgcgtatccgccggcgcgacaagacgaggactattggtcagggggcgcgggcgcgcgaagtgatgctggaatcgaactaccatatcgagctcttcgcggtcactgatgccaaggggaaggtgaagtgggacagtgaggtggtcagcacctacgacgcgatgcgtcgcgcgaggagaaaggagccggtcgtgcagcatgatcgggagggctttctcttctccctcgcacagggggaggcgatcgagctcgacgaaggcgccgatagggggagggccgtctacgtcgttgcgaagatcacgaaacgaggggaagggcagcgtgaacgccggaccgttggcattgttcgccacgacgacgcgcgcatgagcacggccccggagaaagagaaggccagatcgctacgggaaccgtcggctgaggtgctgcgcaagcagggctgccgcaaggtggtgatcactccgctaggcgaggtgcggaacgccggggactgaccggagtgtggaaagaaccaagagaggggctgtagcgggctcatctcgccccttgggaggcgcaccacgcccggagccgagcgcattattgacctgtccgaagagccggcctggctgaatgtggacacctcgcggctggtgatctcgcgggacgaacagcccaaggttactatcccgctcgccgaggtggcggtgctggtggtggcccatccccaggtggtgatgacccaggcggtgctggccggggtggcagagcagggagggatcgcggtgatctgcgatggcaagcggatgccggccgcgatgttgatgcccctcgccgggcactttgctcagggggagcgcttcgcgctccaggccaaggcctccctacccacctgcaagcggctctggcagtcgctggtgaaggccaagattcgggcccaggctcgggcgctggctgatctgctgggagacgacgcgggcctcccgcagctcgcggacaaggtgcgctccggcgacccctccaacgtcgaagccgaggcctcacgccgctactggcccgccctcttcgccgaccccaggtttcggcgcgaccgggatgggggcggcccgaacgcgctgctaaactacggctacgccgtcctccgcgccatcgttgcccgggccgtctgcgccgcggggctccacccctccctcggcctccagcatcacaaccgctacgacgcctttcgtctcgccgatgatctcatggaacccttccgccccatcgtggatcgcgccgtggtgacccactgcgcgcgccgcggtctcgccgcctcgctcgacaaggaggccaaggccgcgctcatcggcagcctgatgggccggttctccctgggaaaggagagccgttctctgttcgacatcgcggggcgcaccgccgtcagcctgaccgcggtgttctccggtcggcggcgcaccctcgtgctcccggaactgtaatgccgcgcaggaacctctcggggtataggatcatgtggcttttcgtcatgtttgacttgcccgtgaccgattcgagggcgcggctgcggtacacgcggttccgcgcgcggctgctaaaggaggggttcagcatgcttcagttctccgtctacgcccgcagcttccccagcgaggaagcctgcggggcccaccgccgccgcgtccgcgccgcgctcccgcccgagggtcaggtgcgggtcctgtccatcacggaccgccagttcgggaaaatggaggtcttcaccggccgtcggcgccggcccgccgagaaacccctcgatcagctactgctcttctgaggttcacgggcgctcgtagacccccgtaggggaatcccgacgggggtctattgtaccagagcggcggttcccgaccaactacagcgtggcgagagtacaggtctcgtcgcgtgtgattgtaccagagcggcggttcccgaccaactacagcccgctctcaacgactgcgccagggccatgaattgtaccagagcggcggttcccgaccaactacagcagccgttcatcagcgccagcaggcctgcaattgtaccagagcggcggttcccgaccaactacagcagccgcaacatcaaggggcgcagccccggattgtaccagagcggcggttcccgaccaactacagcacatcacgcagcccatgcaggacatcctcaattgtaccagagcggcggttcccgaccaactacagcacgcactcgacaggcatgctaaactctatgattgtaccagagcggcggttcccgaccaactacagcgcagcgattaccggggtcttgacacaccccattgtaccagagcggcggttcccgaccaactacagctgatcgagcgggcggtgcccgagctggagattgtaccagagcggcggttcccgaccaactacagcttcctggcgctctctgcgcctacgctttctattgtaccagagcggcggttcccgaccaactacagcctggctatcagctcctcggtccgtacccacattgtaccagagcggcggttcccgaccaactacagccgcaccgcaacaacttcctggatacggggcattgtaccagagcggcggttcccgaccaactacagcgcctcttccccccgtcccctttctcctgggattgtaccagagcggcggttcccgaccaactacagccgtcaggtcgccgccctgaatctcggtcagattgtaccagagcggcggttcccgaccaactacagcaacagtacgccttgcagtatgacccttgtcattgtaccagagcggcggttcccgaccaactacagctgctcgcgggtgttgccggagacccagaccattgtaccagagcggcggttcccgaccaactacagctgacgcgctgtagagggctctgggtagcccattgtaccagagcggcggttcccgaccaactacagctgccgctcgcacgccgccgcaaaggccaacattgtaccagagcggcggttcccgaccaactacagcgtcgaaagcgaaccccccgccgtgcccggaattgtaccagagcggcggttcccgaccaactacagccaacatcaccaaggcccttcgccgaggagaattgtaccagagcggcggttcccgaccaactacagcaggattgcccgcagtggcccctgaggttatattgtaccagagcggcggttcccgaccaactacagctgaggatcgcggggtacgaggagccggtgaattgtaccagagcggcggttcccgaccaactacagccaatagcgctcatggccgatgccggctgtattgtaccagagcggcggttcccgaccaactacagcaactcctggggtggctcaaggacccgtctaattgtaccagagcggcggttcccgaccaactacagcgccattccgagcagtacgatcccggcgccgattgtaccagagcggcggttcccgaccaactacagcctcccgggcgctggcattcgccgccggcgagattgtaccagagcggcggttcccgaccaactacagcgccgcaagcagcactacctcctcggcggagattgtaccagagcggcggttcccgaccaactacagctagctgacgttgcgctcgtagtcctcgcccattgtaccagagcggcggttcccgaccaactacagccacgagcaactgcgggagaggatcgcgggcattgtaccagagcggcggttcccgaccaactacagcggtgcaggttcgggttagctagaccctaccattgtaccagagcggcggttcccgaccaactacagcacgccgcgcacgccactagccgcgctgggcattgtaccagagcggcggttcccgaccaactacagcggccgggccggttgatcgcgctaatcgctcattgtaccagagcggcggttcccgaccaactacagcagatgtggacgttgtcctccatcaggaacattgtaccagagcggcggttcccgaccaactacagcgcgatagacctggcactggtggtgtcccgttcatagttgaaggttgaggcggctctctccagcccggttctgatagaatcgggtaacccaaagcttgaaaaaggagagaaccgccgtgagaagagagtatcagattacgggtcg

SEQ ID NO: 3661 - DNA, 7404 bp, synthetic construct
  misc_feature 1..7404: note = Synthetic
  source 1..7404: mol_type = other DNA
caaaaccactctcgtcgtcgcccccctcctccccaccctcggggggaaggtgccgaaggtgtcggggcgggcgctgggacatacgggggggacgatagataagcttgagtgcgtgccagggctgaagacggaacttgcgccggaagagtttgtggcgcaggtgacgcgaatcggcgtggcgatttgcgctcaatcggcgcgaatagcgcccgcggataggaagatatacgcacttcggaacgagactgcaacggtggagagcattccgctgatcgctagctcggtgatgagcaagaagttggcggttggggcggacgcgatcgtgctggatgtgaaggcggggcggggggcgttcgtggggtcggtggcggaggcgaggaagctggcgagggcgatggtggagatcggggctggcgccgggcggaagacggtggcgctggtgacccggatggatgagccgctcggccgggcggtcggggatgcggtggagctggtcgaggcgatcgagacgttgagcggccgcgggccgagggatttcgtgaatctctgcacgcttgttgcggggcacatgcttgcggtcgggggggtgacggccgatgcgcgggagggccgggcgatggcggcgcgggcgctgagaagcggggtgggactggcgaagcttcgggagatggtggtcgcgcaggggggcgatccgagcgtgattgacgagccttcgctgctcacgaagggcgcggcgttcctgccggttagcctcgacgcgtcgggttacgtaagctcggtagatgcgaggcggatcggggagatcgtgcgggacttgaaggcggcggcgggggagcggaagtcgctgtgtggggtgctggtggagaagaaggtgggcgaccggatcggggcgggcgaggtggtggctgtcgtggtggttcccgagacagtgccggcggaacccgtggagcgggcgaaggcagaggtgtgcgggtcgtaccgcgtgggcgaggcggcgccgaggaggcggcggttgctggcggcggtcgtgcgcggggaacggccaacggcccatcatccgcagatggacgcagatggacgctgatagggaacggcagaggccggacgggattcaccgcccctcgactgcccctcgggtccgctcggggtaaacgctcagggtgaacagagacgcaaagaacgcagagaagggccggaggcatccgcagaccccccttcgctaaagctacggggggcaggctccggcgcaaaggacgcggaggacggccggagggataaccgcagagacgcggagacacggagaggggcattcttgtagggcgggtatgtcgccgaaggcgcatgcccgccggctgttctgtaggcctgccctgagcgtagtcgaaggggcggggtctccggaccccgccagtcccacacgggtcacggcttcagcgcgaagacgcagagagcgcgaagggcgcagagggggcgcccagaaaagcttggcgcccctcggtggggcgccgggcggtccgtggacctggagaaagcgaaaccctctgcgggtaaaccacgcagagggtgtgcgatgggcgcgcctccgaagaggagcgttgccttgcggaacggaagtccacttgcacaagtggcgtccacttgctgtaatacaggtggcaaccgccgctctggtacaatggattagctagtaccacacacgaagggaaaagtcaagggggtccgcgatgaaatccgatccgtcggtggtcgctgaaccgagcacactggttcttggcctggacatcggtgccgcttccatcgggtgggcgctcgttgagaccaacaacggcagccccgcgagactgagagcgctcggcgtccgcatcttcgaggagggagtcgaggggttcaactcgcccaaggagaagtcgcgagcggccccgcggcgggaagcacgctcgcgccgacgcatgactgagcgcacgcgccggcggctgaccaagctcgcccattgcctccagcgcggcggacttctgccaccgggcgaccttggcacacctgaggcgctgcacgcttacttcctccagctcgaccgatcgctcttcccatcccctgtccgcaaggccgatccccaccgcatgcactaccgtctgcgcgcccgcgctctagcagagaaactctccgagtacgaaatcggccgcgctctctaccacctcgcccagcgccgcggcttcaagtccaaccgcaaggctctgggcaaaggccgggaggatgacaggggcacggtcaagaccggcatcaagacccttcagcaggagatggaggccgccaacgcgaagacgctcggcgagtacttcggcggcatagatcccgagaaggcgcgcatccgcgaccactacctgcaccgggagacgatggttcggcacgagttcaaccttatctggcagagccaggcctcgcaccacccgaatctgctgacccacgaactgcgggcagccgtgcacgaccccatcttcttccagcgccccctcaagaccccagagcggttcatccgcttgtgcgagcttgagcagaaggagcgccgcgctgctttcaccgacctggccgcccagcgcttccgcctgctccagaaggtcaatgatctccgctacatctccgccgatggcagcagacgtctcctgacccccgaggagcgagcgaaactggttggcaggctcgaaaccaaggagaagatgccattcgacgctatccgcaaggcgttgaagctgtccgggggccggttcaacttcgagaccttcggcgagacaggcatcgtcgggaatcgcaccggagcacggctggcgaagccgttgagcgccaagcgctggaaggcgttgagcgcggaggagcgggcacaggtagtggaggagttctgcgcgctcgacagcgagcaggctcttcgagagtggggcgtcactcgattggggctcgatgatagggccgttgccaagctcctggaggtcggcctggaatcgggccactgcaacctctcccggaaggccctggacagagtccttccccacatggagaagggcgtggcctacagctgcgccgtcgcgtcctgctacccggaccgcgctcgcgccgcgcagcgcagcctcctggcgcctctcagagatgttgtggacgtccgcaatcccgctgtagagcgcgcgctgaccgaactccgaaaagtcgtgaatgcgatcatccgtcagtacggcaagcccggctttgtgcgcatcgagctcgcccgcgacctcaagaggaaccgcaagcagcgccaggctatcactgtagacatcaaagagaacgagaagcagagacaggtcgccatcgccgacctggagaggatgggctacccgccaaccggctggaacatcgagaagtggctcttgtgggaggagtgcaatcaccaatgcccatacaccggcagcatgatcagccccgttgacctcttcggcgatcccccgcagttccaggtcgagcacatcatcccccccgaactgtgccctgccctcggtaactccttcttcaacaaaacgctctgccatgtgaggaagaaccaggaaaagggcaaccgcacgccttggcaggccttcggggacaacccgggggaatgggacctgatgatcggtcgcgtgagcaagttcagaggcaggggcacaaggcaagtccaaactcagcgggcagggaagggcgggaggggcaagccgaagcccttcgtccacccgaagttggagcttcttcagctcaaggacccccaggaccttgatgacttcacccgccggcagctcactgacacgcagtatgcggcaaggctgggagtcaggtacgtcggacagctctacggcgcgggtgtagatggcgtgggcggcgacaacagaaagagggtggaggcacgccgcgcgggactgactgggcaactccgccgcggatggctgctggagcgggaggaaggcaagagacgcagcgaccataggcaacacgcggttgacgcggtctgcatcgccctcgctgactcggccagagtcaaacagctaagcgacgcgtggcacaggggttggtgcactcccggtcagcgcccccagcgcctcgatgcgccctggcccgacttccgcggcgatgtggcgaacgcggtggataagatcatcgtctcgcatcgcgttgcgcgcaagctatcagccgccttacacgacgagcttccctggagcccgcgtagaagcgatcccgacggtcgcacctgggcccaccagcgcaagcccgtacacaaactgtctgccaaggaggtggcagacatcgtggactgcaaggtgcgccgatgcgtccaagacaagctgcgggaactcggcaagagcgatccgaaggaagcgttcaagtcccagcaagaccacccccggcttctcacccgaaagggccgcagtatccccatccacaaggtgcgagtgcgcaagcccgacccaacggtaaccatcggcgcaggttcgcgccagcgcgaggtggtgcttgggtcaaaccaccacatggaagtcatcaagacgtctgaccggaagggacgggaaatgtggaaaggactcgttgtcagccgctatgaggcctctcagcgcgtcagagcggccaggaaaagcggggggaagagcaatgcggccgtggagacggaccccgcgggcgggggtgagttcctgttctcgctggcgcaaggcgagaccgtcgagctagacgagaacgagtccggcaagagacgcttctacgtggtcaccaagatcaccaagagagtgccaaagaagggggccgaagtacacacggtcggcatcgtggaggtgaacgacgcgcggcccagtaccggcaaggataaagccaacgttagggcactggaggagccctcagcggaggtgctccgcaagcgccactgccgcaaggtagtggtgacgccgttgggggaggtgcggagggcgaacgactagggggcggccggagcgacggccggcggggatgcggagacatccccgccctacaagaggggtggggtgatggaacggatcattgatctggccgatgagccggcgcggttgagcgtccggaactccctgctcgtgatcgagcgcggggcggaacccgagctaaccgcgccgctgggcgaagtggcggtagtgctgctcgctcacccccaagtgctcctgacccagccggtgctcgctcgcctcgccggggcgggcggcatggtcgtcgtctgcgatgccaagcatatgccatgtgcgatgctgctgccgctggaggcccacttcacgcagggagagcggttcgcgcagcagacgcggatttcggagccggtgagaaagcggctctggcaaagcctggtgaaggcgaagatcaaggcccaggcgcgggtgctgaaggaagtgaggggagatgacgcgggcctggccgaggtggccgacaaggtgcggtccggcgatccggacaacagcgaggcgaaggcgtcgcgccgctactggccagcgctcttcaacgatgctgagttccgccgccggcggttcggcgggaaccagaatacgctgctgaactacgggtatgcggtgctgcgcgcgatcgtcgcccgggcggtgtgcgccgccgggcttcatccctctctcggccttcaccaccacaaccgctatgacgcattccgcctggccgacgatctgatggagccgtttcggcctatcgtggaccgggcggtggcgttctactgcgagggatatggcgcaagggctgaactggacaagcgggcgaaggcaatgctcataggcgcgctgatgcaacgcttcgacgtgcggggcgaacagcggacgctgttcgatatcgcgcagcggacggcggcgacgctggcggcggtatacgcgggggagcgcagaacgctggcgctgccggagctgtagcaatgccgcgccgaagtctgtcggggtacaggggtatgtggttgttcgtgatgttcgatctgccggtggtggaaagcgaggagcggctggactacacccgcttccgcaagcggctgctgggcgaggggttcaccatgctccagtactcgatctacgcccgctactacccgagcgaggaggcgagcgcggcggagcgccagcgagtaagggcgatgctgccgaagaagggacaggtgaggctgctgtcggtgaccgaccggcagttcggaaaaatggaggtgttggtggagcgaaagcgggagcgcgtcgagaaaaagcccgaccagatggtgttgttgtaggcccctacgagccgcagacgcccccgggggacgaatcgcgggggcgtctattgtaccagagcggcgattcccgaccaactacagtatccataggttgctctcgatccacgccgtgattgtaccagagcggcgattcccgaccaactacagtctgaaggctcgataggtagcctactcactattgtaccagagcggcgattcccgaccaactacagtatgccgcactcggtttcctgtagccagggaattgtaccagagcggcgattcccgaccaactacagtgtgttcgtcaccgtcgtgatagccggccttattgtaccagagcggcgattcccgaccaactacagtcatccagtgtctagcatctactatctactaattgtaccagagcggcgattcccgaccaactacagtcttccggttcatcattgctggctgctcctcattgtaccagagcggcgattcccgaccaactacagtggcagggcgatgcctactactacgcgataattgtaccagagcggcgattcccgaccaactacagtgccaccaggccgactacgacaatgcgaatattgtaccagagcggcgattcccgaccaactacagttctgtgagccgctgttcgaggcgctgaaggattgtaccagagcggcgattcccgaccaactacagttatcgagcctgccacgcctgtgtgagttggattgtaccagagcggcgattcccgaccaactacagtccagcgccgcagaagaggtcgagcagggtattgtaccagagcggcgattcccgaccaactacagtacttccgacggcttacaagcaccccacggtattgtaccagagcggcgattcccgaccaactacagtgggcgccgtccggttcctctcccaacttgtattgtaccagagcggcgattcccgaccaactacagtcgtccaggtcgttgtacacttccacctccgattgtaccagagcggcgattcccgaccaactacagtgtggtggtgttgctcatcgtgatcgagctcattgtaccagagcggcgattcccgaccaactacagtcaaaaagggatggcctcccggatcatgggattgtaccagagcggcgattcccgaccaactacagtaatatcaggtca

SEQ ID NO: 3662 - DNA, 23564 bp, synthetic construct
  misc_feature 1..23564: note = Synthetic
  source 1..23564: mol_type = other DNA
cgaaatgcaccggcatcggggtgccgctgtcgccgatcgtcaccgcgccgccgtggttgcgcatcaacagcgcgatctgttcggtcagatagccgcggaacaggtccggccgggtgatcgaggtcgaataggtgccgggcagcgccacatggccaaaggacagccgcgaatcggtcttggaatgcaccgggaccgtcatgcgcagttccgggtagaaggcgcgatagcgcgcctggggctggccgcccttcagcgtggcaaggaaacggtccagcaggaaatgcgaggcccggtcgtaaagctcgatcagccgggccacggccgcagcggggtcgtcgaacatgacacgctcggccggctcgggggtctcgatggaaagtcttcgactgtcagtcatcatgcgcgctccgggtttcggccgacagtgccagcgtcgccgcgggctggcaagccagggccggaacccctatctgatggaaacgaaggagtgtgctgcatggaattttccgttctcgacctggcggtcgtcgccgagggctcggatgcccgccaggccatcgccaattccgtcgcgctggcgcaggccgccgagggctggggctacagccgcttctggctggcggaacatcacaacatgccgggcattgccagcgccgccacctcggtgctgatcggccatgtggcggaccatacgaaaaccatccgcgtcggtgccggcggcgtcatgctgcccaaccacgcgccgctggccatcgccgaacagttcggcacgctggccacgatccacgggccgcgcatcgacctgggcctgggccgcgcgccgggcggcgacggcgcggtgatgcacgcgctgcgccgctcgatgcagcgcaacgaggattttccgaacgacgtcgtcgaacttctgcgctatctgggaccgccccgccccggcgccccggtcgccgcccatccgggcgaaggcacgaatgtcccggtctggatccttggctcgtcgctttacggcgcaagcctggcggcggcgcttggcctgccctatgcctttgccagccatttcgcgcccggcgacctggaccaggcgctgcggctttaccgcgaacgcttcgaggcgaccgagttcggccagcggccgcgcttcatgctggcggtgaacgtcatcgcggccgacagcgatgccgaggcgcaacgcctgcgcagcagccagcagatcagctttgcgcggctgcgcaccgggatgcccggcctgctgccgccgccggtcgatgacgtgctggaagcgatcccggtgcgcatcctgcccgcggtcaacgccgccctggcggtcagcgccatcggcagtcccgcgacggtcgccgccgaactggaggagttgatcgcccgctaccagcccgacgaactgatcctggtcggcaatatctacgaccaggccgcgcggcaccgttcctttgccatggcggccgagatcctgcggggccgcggataatgcggatgctggtgttcggccatggctattccgccggcttcctgacccccctgctgctggccgagggctggcatgtcaccggcaccacccgcaccgacaccgatcgggtggcgcaggccggcgcccagccgctgcgctggcccggcgaggacgaggcggtccgccgcgccatcgcccaggccgatgcgatcctggtctcggtcgggccggaacagggtgcagacccggtgctggcggcctttggcgcccagatcgccgcggcgcggccgcgctggctgggctatctttccaccaccggcgtctatggcgaccgggacggcggctgggtggacgaggatacgccctgcgcgccctcgacccggcgcgggcgcgagcggctggcggccgagcaaggctggcaggcgcttgcggccgaacacggcctgccgctgcacatctttcgactggccgggatctacgggccgggccgcggcccctttgccaaggtgcgcgagggcacggcgcggcgcatcgtcaagcccggccaggtgttttcccgcatccatgccgaggatatcgcccaggttctgctggcctcgatccacgcgccgcagccgggcgggatctacaatgtctgcgacgacgacccggccccgcccgaggcggtgatcggccatgccgccgaattgctgggcctgcccctgccgccggccgaggattacgcgagcgcccagatgacccccatggcgcgcagcttctatgccgagaacaagcgcgtcgcgaacgaccgcatcaagcgcgaattgggcgtgacgctgcgctatgccgattatcgcgccgggctggccgctttggcccgcgccgaagggatcctggcctagggcgcgatcgagcagcagcccgtcagcatgcgcgacgcctggtcctgcccgtccaggatcaccgcgacggccagggcatagctgcggtccgacatgccgtccgaacagcgttccggccgcacaaaggcggtcagccgccccttgtcgtcgccggcgatgatgccgcgcgtcggctcgccctcgatgccgcgatccatgaccttgcgcagcgaaagctggcgctcgggctggtcgggttcgctgaagaccagccccttctgcacggtcctgaccgaccagaagggctcggtcccgctgcaatgcagcgccagcggcagctcggccggtttccagaccgtcgcctgcggcttgagaaagcgcagcgccacccagcccgtgccctcgccgatattcacccggccccatttgccggtggcgtcgcgttccagcaactcgacccccttggcggtcgaagccaggcggccgacgaccttggccttgccatcgggcgcctcgcgcacgttcagcgtgtcccaggtctcgaccacggtcacgtcgaacaggttgggcagatgatcctgcgcctgcaccgccaaaggcgcggcaagggcaaggccggtcagaaggatccgcagcattcttacctctcaggctcgtttcgccagcgccacgcccaggacttccagcaccttttcctcgatatcgggggcggacatgcgggcgtcgcgatacatggcttcggggctggcatggtcgatgaacgtgtcgggcagcaccatctggcggaagcgcaagccaccgtcaaagacgccctcgtctgacagaagctgcgcgaccaggctgccgaagccgccgaccgcgccctcttcgatggtgatcagcgcctcatgcgtgcgggccaggcgcaggatcagatcgcggtccagcggcttggcgaagcgggcatcgaccaccgtggggttgacgccacgcgccgaaagcgcctcgcgcgcgcgcatcacctcggccaggcgggtgccaaaggacaggatggcgacgcgcttgccctcggcgacgacgcggcccttgccgatttccagcacctcgccgcgctcgggcatctcgacgccggtgccttcgccgcgcggatagcggaaggcgatggggccttcgtcatgggcggcggcggtggcgaccatatggaccagttccgcctcgtccgcggcggccatgaccaccatgccgggcaagttcgccaggaaggcgatgtcataggcccccgcatgggtggcgccatcggcgccgaccagccccgcgcggtcgatggcaaagcgcaccggcaggcgctggatcgccacgtcatgcaccacctggtcatagccgcgttgcaggaaggtcgaataaagcgcgcagaacggcttcatcccccccgcagccagcccggccgaaaaggtcacggcatgctgttcggcaatgcccacgtcaaagcagcggcgcgggaaccgttcggccatcaggttcagcccggtgccatcgggcatggcggcggtgacggcgacaatgcggtcgtcgcgggcggcctgatcgaccagcgcacgggcaaagaccgaggtatagctgggcgcgttcgatttcgccttggcctgcgtcccggtctggacatcgaatttcgccgtggcatgacccttgtcggcggcgcgttcggcgggaccgtagcccttgcccttgcgcgtcaccacatgcagcagcaccggccccgccgcccgcgccttgacggtgcgcaaaagcggcaaaagctggtccaggtcgtgcccgtccaccgggccgatataggaaaagcccagttcctcgaacagggtgccgccgacggccatgcctttcagcatctccttggcgcggcgcgcgccttgttgcagcggcgtcggcagaaagcccacggcccccttggccacggctttcaggtcctggaacggcccttcggcgtaaagccgggtcagatagcgcgacagcgccccggtcgggggcgcgatggacatttcgttgtcgttcagcaccacgaacagccgcttgcccaggtcgccggcattgttcagcgcctcgaaggccatgcccgcgctcatcgcgccgtcgccgatcaccgcgacggcatcgcccggatcgccgccaagttcgcgcgccatggcaaagcccagcgccgcgctgatcgaggtcgaggaatgcccggccccgaacgggtcataggggctttccgaccgcttggtgaaccccgacagcccgcctgcggtgcgcaaggtgcgaatgcggtcgcgccggccggtcaggatcttgtgcggatagcattggtggcccacgtcccagatgatcttgtcgcgcggggtgtcgaatacggcgtgcagggccacggtcagttcgaccacgcccaggcccgcgcccagatggccgccggtcacggaaacggcgctgatcgtctcgacccgcaattcgtcggcaagctggtgcaattcgcgatcggtcaggtccttgagatcggatggcagatgcacccggtccaggatcggggtcgcgggacggtgggaagtctcatgggtcatggcttgcccctctccgggcgggctgtcaggcgtcgcgttcgataacgaaacgtgcaagctgccgcaagtttcctgcggcctctccataagggtccagggcgcattcggcatcacgaaccagggcgcgcgcctggtcctgcgccccctccaggcccaaaagcgaaacgaaggtcgccttgttcgcggcgccgtccttgccggtgcgcttgccggtctcggcctcgctgccggtcacgtccaggatgtcgtcctggatctggaaggccaggcccaggttgcgggcatattccgccagcgggccgggatcctggccggccatgaccgcgccggcggtggcggcgaactggatcagcgccccggtcttggccccttgcagccgggtgatggcggcaagatccaggggaacggctgcggtttcggcggcaatgtccagcgcctggccccagaccatgccgcgcccgccgaccgcctgggacaggccccgcaccaacgccagccgcgcctcggccgggccgacctgcggctcggtcagcagggcaaaggccaggctttgcagcgcatcgccggccaggatcgcggtcgcctcggaccatcgcacatgcaccgtcggcaggccgcggcgcagatcatcgtcgtccatcgagggcaggtcgtcatgcaccaggctataggcgtgcagcgcctcgaccgcggccgcgaccggccgcgactcgttgtcgcccagcccgaacagccgcgccgattccatggccaggaaggcgcggatgcgcttgccgccggtgcaggcatagcgcatggcgtcggtcaactcgcccgccggcaggctggccatggccgcgtccagcgcggcctggacctgcgctttgacctcctccagccggtccagcattacagcccctcggccggggcggttccggtcggctggccgttggcggccagggtgatcttttccacccgctcctcggcctcgcgcaggcgctggtcgcaatgcgcccgcagcaatgcgccgcgctcgtaaagcttgatcgattcctccagcgacgcctcgccatgctccagccggccgaccgtggcctccagctctttcatcgcctcctcgaaggacatgttctcgatctcggtcacgcggcggtctccctcagcacttcgacatgggcgcgcaccgcgcggcccaaagcggccagatcataaccgccttccagcgccgacaccaccggggccgaacaggcagccgccgtatcgcagatcatccgggtgatggcggtgaaatcaccctcgtcccacatcaacgaggccagcgggtccgcggcatgggcatcgaacccggcggaaaccagcacaagctgcggccgccatgccgcgacccggtcgcagatcgccgcccaggcggcccgcgcctcggccccgccgctgcccggcgccaggggaatgttcaccacctggccatgcgccccccgctccgcagccgtcccggtgcccggataaagcggcatctggtgggtcgaggcgaacagcgcccgtttctcgtcccacagcacgtcctgggtgccgttgccgtgatgcacgtcgaaatccagcaccgcgacccggtccagccggtgatgctccagcgcccgcaaagcgccgatcgcgaccgaggacaggatgcagaaccccatcgcgcgcctgcgctcggcatggtgtcccggcgggcgcatggcgacaaaggcattgggcgcctcgcccgccaaaaccgcatcgacggcggcgcagaccccgcccgcggcgtggcgcgccgcatccaggctgcccggcgccaaggccgtatccgggtcgagcatgttccagccctcggccggcgattcaagacgcaggcgctccaggtaatcggccggatgggcgcgccgaaggtcctggtcctgcgccgcgcaagcctcgcgccgcccaaggtccatcccgtccagcgccgccagcacggcgtccagccgggccacctgctcgggatggccggggggcgtcacatgccggtgcccagaaggatgggtgaaaagcagggtcattaccgcacggattatgggctggcccggcgcagggcaaggaaaacttccccccgcggaccccggacatccgccggaaccgcgccccgcgcgcctttctttcgtgtgcaaatatcctgcgggggtccgggggcgcaaagcccccggtctggcccgtgcagcaacccccttcgcccggctgctccagcggacgcatccgaatgccgtcggcgcgcgttaccccgccaggcaagcaagccgaccgaaacaggagaaggccatggcagcggaacggaacgaaagggcggccgtcaccagggggctgttgaaccgctgccccaattgcggacagggacggctgttcaggggctatctcgccatcgtgccgaaatgcgccgtctgcgacgagccgctgggactataccgcgccgccgacgggccggccttcttcaccatgaccatcatgctgttgctgctgatcccgatgatcgggttcacctgggcagcctatcgcccggacccggtggttctgctgggcatcgtgggcctggccatgaccctgctgaccctggtcatcctgcgcctggtgaagggcgccttcatcggctatctctgggcccggcatgaacaggaccgcggcgcctgaccaccggccaggaccccaggccgcggcgctcaggcacgcagccgctggccgtcatggccggcaatgcgcaattccatcagcgagccttcgggcatgtcccggtcaaaggtcacttcggcgaaatgctcggtgcgtcccagccgcggcccttcggtcagcaccatgcgcgccgcgccgacctgggcctgcaaatgccgggccagggccgcatcgcccgccgcccgcagccgcgccgcccgttcccggatcgccgggccgggcacgcgcggcatccgcgccgcgggcgtccccttccttgccgaataggggaacacatgcaggaatgtcagcccgcaatcctcgaccagcttcaggctgctttcgaacatcgcctcggtctcggtcgggaaaccggcgatgatgtcggcgccgaagacgatgccgggccgcagccgccgcgcctcgtcgcaaaagcggatggcgtcgtcgcgcaggtggcggcgcttcatccgcttcaggatcatgtcgtcgccggcctgcaaggacaggtgcagatgcggcatgagccgcggctcgctggcaatcgccagcatcaggttctcgtccgcctcgattgaatcgatgctggaaatccgcagccgcggcaggtccggcaccagccgcaggatgcgcatcaccagatcgcccagccgcggctgccccggcaggtccgccccccaggacgtcaggtccaccccggtcagcaccacctcgttgaagccgcggtcgcgcagccgcttgatctggtccaccaccacccccgctggcacggagcgcgaattgccccggccataggggatgatgcagaatgtgcagcgatggtcgcagccgttctgcacctgcacataggcgcggtgccggccgaagccgtcgatcaggtgccccgccgtctcgcgcaccgacatgatgtcgtcgacctggaccttttcggtctcgccgatcaggtcgggggcctgcatagcggtccaggtcgcaggctgcatcttttcgtggttgccgatgacgcgggcgacctcgggcatggcggcgaaggtctcgggctcggtctgcgcggcgcagccggtgacgatgaccggggcgccgggattttcccgcgccagccgccggatctcctgccgggccttgcgcacggcttccgccgtcaccgcgcaggtgttcaccaccaccgcgccttgcagcccggccgcctcggccatttcgcgcatggcctcggtctcataggcattcagccggcagccgagggtcgcgaaaaccgggggcttcatgtccgtcatccgcgccagaccccatcaaagacatgcgcggtcggcccggtcatccagaccccgtcctcgcgccagtcgatttccagcaccccgcccggcacgttgacgcgcacccgccgcccgatcagcccgcgccttgccgcggcgaccacggccgcgcaggaacaggaccccgaggccagcgtgacgccggtgccgcgttcccagatgcgcagcacgatctcgctgtccgagacgacctgcacgacctcgacattcgtccgctgcggataaagcggatgatgctcgtgttccgggccaaagcggaccaggtccaccgctgccgcatcgggcacgaaaaaggtcatgtgcggattgcccatgccggtcgccaccggatcgccgggaaccggcaggtgcagcgtatcgacatcctcggccagcgggatcccggcccagtccagcaccggcgcgcccatgttgacgcgggtcagcccgccgcccgcatcctcggccgcaagcagggcgtggtcggtggccagccgcaagccaccagccccggtttcatccatcaggaagcgggcgatgcagcgcgtggcattgccgcaggccgccgagaccgagccgtcggcgttgaaaaacaccagccgcgcatcggcatccccgccgggcaggatgacggccagttggtcgaatccgacgccgcgatggcggtcggcgatggcggccacggtcgcagcatcgggcagcgcgccggtctggcggctgtcgatgacgacgaagtcgttgccaagcccgtgcatcttcatgaaaggcagcgggcggcggggaccggggcgttgcggatgttccatggcgccgacataatcctgcggaaaagattctgccagaggcgatgatttttccgcttgaccctatccgccgccgcccgtagttagccccccgtgcgatgggcccgtagctcagttggtagagcaactgacttttaatcagtgggtcacaggttcgaatcctgtcgggctcaccactgaacttccttactctcggatgatatccaagtcgttgagcagtcgctcgcgcagaacgcagcaattaccttacccgacagccagcagttgggcaaatcagcgtgatagctgacgtagcaggtcggagttcggagtggtcttgcgtcgtttagactgattgcgggcgggcgattccagaatatttgcctttggcatcggatggccgggtgccacaatccgcccggccgaccgcgccgtccgctgtgtcgcgcaacgcttccataagaggaccgcaccaatggaaacacgggccgtagcccgtgttccgatgtggtgctctgtcgagcttgttagccgctcgaccgcgatttctgaatgctggcaggaaacaatggtttggcggatccgtcaagcgcaatgtcagccatcagaaatcgcagtccagcgtaacatacgaattcctgcaaattccctcgccacatgggcgactgcaagctatcgtcccgtaagcattgccaaaaagatggtctcgaacatgctcacccgcctcgccctcgatattggatcttcatccatcggctggcttctctacgagattgtggacaaccggcccgtgcgcatcctggatggcggtgtgcggatcttcggcgatgggcgcgaggccaagaccgggcagtcgcttgccgtggggcgccgcaatgcccgcgccatgcggcggcgccgtgaccgttacctgcgccgccgcgccatgctgatgaaacgcatggccgaggccgggctgatgccgcaagatcccgacgaggcggcggcgctgaccgttcttgatccctatgcgctgcgggcgaccgggctggatcaggcgctgccgctgacccatctgggccgggcgctgttccatctgaaccagcggcgcgggttcaagtcgaaccgccgcaccgacaagggcgataacgagggcgggctgatcgcggatgcctcggcccggctggatcaggcgatgatggcggcgggcgcgcgcagctatggcgagttcctgcacatgcgccgcgccggcgcaggcgacgcccgcgcggtccctgccgtccgcacccggatcaacccgcacctgaccggcgagggcggcaaggaacagccgggctatgacttctaccccgaccgccgccacctggaggaggagtttcacaagctttggcaggcgcaggccccgcaccacccggaactgaccgaggagttgcgagacctgttcttcgagacgatcttctaccagcggccgctgaaagcgccggcgatcggccgctgcctgttcctgcccgagcgccgcctgcccaaggcgcatccgctgacgcagcagcggacgctttacgagacggtgaacatgctgcgggtcaccgcgccgggccagccccggcgccgcctgagccgggacgagcgcgacaagatcgtcaccgccctgaacggcaaggcaccggccaaaagcccaggtgcgaacaagctgaccctggtcgcgctgaaaaaggtcatcaagctgcgcccggacgaagccttttcgctggaaaccgcgatgcgcgatgccatcgcctgcgatccggtgcggatgagccttgcccatcccgaccgctatggcccaggctggtcggcgctaagcgtagacgatcaatgggaaatcatccagcaactgcgcgacgaacaggacggtgaaaggctggtggactggctggtcgagcgcaccggctttgaccgcgcccgcgcccgcgccattgccgacgcgccactgcccgaaggtttcggccgccttggcgagacggccacccgccgcatcctcgccgcgctgatcggcggcacggcggatcacgcggtcgcgacctataacgaggcggtcgaattctgcggctggaaccattcgcatctgggcacgggcgaggtcctggaccgcctgccctattacgggcagatcctcgaccggcacgtcctgccgggcagcggcgaggaaaccgacgacgacgtgacccgtttcggccgcatcaccaacccgaccgtgcatatcggcctgggccagatccggcggctggtgaaccggatgatcgacatccacggccgcccgcacgagatcgtcctggagctcgcccgcgacctgaagatgagcgaagagcagaagcgcgacctggcgcaggtcaacgccaagaaccagcgcgccgccgaactgcgcagccaaaaactgatcgaggaattgaaggtcgaggataacggccgcaaccgggccattttgcgggtttgggaagaatcagcgatggatgtgttgaaacgctgctgtccctataccggggaacgcatcagcgccacgatgctgttcgacggcagttgcgatatcgaccatatcctgccctattcccgcaccctggacgatggtttcaacaaccgcgtgatctgcctgaaatccgccaaccgcgaaaagcgcaacaagactccgtgggaagcctggggtggcacttcgaaatggccggccatcgaggccaatctgaaaaacctgccggatggcaaaagctggcgcttccaacccgacgcgatggagaaattcgagggccagcgggatttcaccgcccgcgcgttggtcgatacccagtatctgtcccggctggcgcgggaatatctggaaagcctttatgccgacgccctgtccacgggtcgccgcccgatctgggtcgttgccggcaagctgacagaaatgctgcgccggcactgggggctgaacggcctgctgcccgacgcccatcgcggcaccgccaaggccaagaatcgccaggaccatcgccatcacatgatcgacgccgcggttatcggcgcgaccgatcagggcatggtcaagcgcatcgccgatatcgccaaggccaatgtcgagaacgggctggaggaactggcaggctcgatccccccaccatgggaggatttccgcaatgacctcgacaagcagctcaggatgacaacggtcagccaccgcgccgatcatggccgcatcgacccgcaggccaagcgacagggccgcgactcgaccgccgggcagctgcacaacgacaccgcctatcgtctgaccggcgaatccgtccgcggggtgccgctggtcgtcacccgcaagccctttgacagcctgacccaggcgatgctggacaagcttcgcgatccgcatctggcatcgctgttgcggcaggccatcggcgacaagagcggcaaggagttgcaggcagccctgaaaacctttcgcgagcgtcccggcccctatcaccgcatccgccatgtgcggatcatcgaaccggtggacgtgatccagatccgtgaccggcagggccgcccgtacaagggctacaagggcgacagcaaccaacgctatgaggtctggcggatgccggacggcaagccggtccatcaggtcgtctcgaccttcgacgcccatcagcccggcgagaagaagccgcatccagcggcaaagcggctgatgcgtttccacaaaggcgacatggtccggctggacaacagcaagttcgggccggtggtggcggtcgtggtgaaattcagttcaatcggcaccatcgtgatggtcgcgcataacgaaagcaacgcggatcagcgctatcgccgcgacaaggaagatgtttttatccggttccagccaagcagcctgatgaaatccggcgcgcgccgggttcttgtcgatgaaaccggtcgcatgcgcgattctggcgcaatttgatacaagattcctctggaccgaatcgcccggcgcgttaacatttcttattttgtcgcgtcgggtatttttcccattggatcagattgttgacatcagccaggacgggcgtcacctctcgcgtgatcgcggcttcatgaaggtcgaagcggcaggcgaggttatcggccgtgtgccgctggatcagatcagcgcggtgatcgcgcattcgcacggcatcacctggagcaattcgcttctggtcgaactggcaaatcgcggcgcccccgtggtcctgtgcggggccaatcaccagcctcgcgcggtcatctgcgcgctcgatgcccatcacatgcagaatgcccggatgcgcgcgcaatgggacgccgcccaaccgctgatcaagcaggcgtggaaacaggtcgtcatcgccaaaatcaagatgcaggccgcggctcttgccgccatcggccaaccgcccgctccgctggagatgatcgcccgctcggtgcaatccggcgacagcggcaacgccgaggcgcaggccgcacgcatctattggccgatgatgatgggcaaaagctttcgccgcgacgcggacctgcccgacatcaacgcgctgctgaattacggctataccgttctgcgcgccgccacggcgcgggccgtcgtggccgcgggcttgcatccgaccatcgggttgttccattccaaccgctcgaacgctttcgccctggccgatgacctgatggagccgttccggccgcttgtcgatctgaccgcacgcgccattgccgaagccgacggccccgaggtttccccgcaggccaaaaggcagatggccgacctgatcgccctggacctgccgctggccggtgagacgagccccgtatcggtcgcgctgtcgcgcttggccgtatcgctggcccaaagcttcgaatcgcgccagttgcgcttgatcctgcccgtgccgcccgcgcccctgattctggccggactggggaaatgagcggccttgcaacctttctcagcgggtatcgcctgatgtggatcctcgtgatgttcgacctgccgaccgacaccaggccacagcggaaagctgccggcaatttccgcaatttcctgctggacgagggctttgaacgcagccagttctcgatctacgcccgtttcatcaacggcaaggaagctttcgagagccgagttcggcggatcgagcgcgccctgccctcgcaaggtgatgtgcagatcctgaccctgacagaccgccaatatcgcgacatcgtgcatttttcggatcagggccgccgggaggcgcgagagaatccatcccaactggtgctgttctgatgccgtttccccgtttgactacattccatcctgctgtattcttctgtatttacagaagcttacagcaggatgaagtgtagccattcagaaatcgcggtccagcggcaaccgtcaaaagcgcctgtcgcacaaggtcgcaagtgtagccattcagaaatcgcggtccagcggcaacaaggccggcgcagggatgtaggcggcctcgagtgtagccattcagaaatcgcggtccagcggcaacgtcgtgggtcatggtcagtcctccgcatgcagtgtagccattcagaaatcgcggtccagcggcaaccacgaggcgggttgaataggccaggcatgccagtgtagccattcagaaatcgcggtccagcggcaactatctaggcacccatcagccggggcgacacagtgtagccattcagaaatcgcggtccagcggcaactttccggcggcattccctcactgaccgacgaagcggccaaggcgttcgcatttctcctgccgccaccgctcggcgcgcgcttcatgcaccgcctgacgcagccctgcttcggcggcacacaagggatgatatcgagtgcgcgagcatcgcttaacagcaattgatcaagtgacagcgttgccgcccttcaccatagcagcacggcggagacagggctgaaatgccggcaggatccccggcccccgccctagtttgctgttccgggttgcaaatgcgcgatgtttgcgcataacaacccgaaacgcatggagccgggtgcaattcccggctggctcttccggccgccgatccgccggacaacccgaacctacaccccaagatcgaaactcgacatgcggccccattccgggccctgatcggtcaggaacggatgacatgatttcacttgatgcctaccggacccaatggttcggcaatatccgcggcgacctgctggccgggctggtcgtggcgctggcgctgatccccgaagccatcgccttttccatcatagccggcgtcgaccccaaggtggggctttacgccagcttttccatcgcggtgctgatcgcctttaccggcgggcggccgggcatgatctcggctgccacggctgcgacggcggtgctgatggtcacgctggtgcgcgaccacgggctgcaatacctgctggccgccaccgtgctggccgggctgatccagatcggcgccgggctgctgcgcctgggtttcgtcatgcgctatgtgtcgaaatcggtgatgaccggctttgtcaacgcgctggcgatcctgatcttcctggcgcaattgccggaactggaccccagcagggtcacctggctgacctatgttctggtcgccgccgggctggccatcatctacctgtttccgctgctgacccgggccgtcccctcgccgctggtcgccatcgtcctgctgacggcgctttcgatggccttcggctgggatgtgcgcacggtgggcgacatgggggcgctgcccgacacgctgccggtcttcatgctcccgcagatcccgctgacgctggaaacgctgctgatcgtcctgccctattcgctggccatcgccgtggtgggcctcttggaaagcctgatgacgcagaacctggtcgatgagctgaccgacacgaaatccgaccgcaaccaggaatgcatcggccagggcatcgccaataccgccaccggcttcatcggcggcatggccggctgcgcgatgatcgggcagagcatgatcaacgtgaaatccggcggacgcgggcggctttcgacctttaccgccggtttcgtgctgctggtcctggtggtctttctgggcgaatgggtggcgcggatcccgatgcccgcgctggtggcgatcatgatcatggtcagcatcggcaccttttcctggtcgtcgctgaagaacctgcgcacccatccgcggtcttcctcggtggtgatgctggcgaccgtggcctcggtggtctggacccataacctcgccatcggggtgctggtcggcgttctgctctcgggcatcttcttcgccgccaagatcgcgcaactgttcaaggttacgacccatatcacccccgatggccggctgcgcagctatgtgatcgaggggcagctattctatggctcggtcgaggatttcatggaagccttcgacttcaacgaggcggtcgagaaggtgatcatcgacgtcagccgcgcccatatctgggacatttcctcggtgcaggcgctggatatggcggtgctgaagttccgccgcgacggggccgaggtcgagatcgtcggcatgaacgaggcatcggaaaccatcgtcgacaggcttgccatccatgacaagcccggcgcgatggacaggctgatagcgcattgagggaggaaagcatgagcgaacaaccgcagaagatcgtcgcgcttgtcgatggttcggcctattcggccagcgtctgcgaccacgccgcctggctgtcgggccacaccggcgcgccggtcgagttgatccatgtgctgggccgccgcgaggcgccggaaaagcaggatctgtccggcgccatcgcgcttggcgcccgcaccgccttgctggaggagctggccgaactcgacgcaagacgggcgaaactggccggccatcgcggccgcgccattctggaggatgcccgcgccattctcgacaaggcgggcgtggccgaggtcaccacccgcctgcgccacggcgacctgatcgaggctctggccgaggtcgaggccgatgcccgcgtgatcatgattggcaagcgcggcgaggcggcggatttcgccaaagggcatctgggatcgaacctcgaacgcgtcctgcgcgccagccacaggccggtcttcgtcgcctcgcgcgcgttcaggccgatctccagggtgctggtcgcctatgacggcggggcttcggcggtgaaggccgtggatcacatcgcccgcagcccgctgttccaggggctggacatccatgtggtcacagtcggcagcaccacgcccgaggcgctaaacgggttggcgactgtcaaggcgtccctgcaagccgccaggatcatggcccagaccgcgatcctgcccgggcagccggaaaccgcgcttggcaagctggtggatgaggcgcccttcgacatgctggtcatgggggcctatggccattcgcgcatccgcagcctgatcatcggatcaaccaccaccgccatgatccgatcctgcaaggtgcctgtcgtcttgatgcgctgacgtcgctgccgccgcggaaaaagggggagccggtcggcaatgcggccccccgcattcggacggccgttttacgatgcccctcctatagaagccggcacaccgactctgcacggggatgcaaacttgggtctgcgtctcgtcatgcggggccgttccggagcggcacggatatcaccccgccattcaacttgcgttgatctgtctcattgcgctataaatcaataaatctttagttgttgattcgatggaagagcaacgcgcccttgtcggcttcgcggccctgtcgcaggaaacccggctgcgcatcgtccggttgctggtcaaggccgggccggaaggcatggcggccggggccatcggcgaggccctggggggtgtcagtacctcgcgactgtcgtttcacctgacccacctcgaacatgctgggttgatccggtcccggcgcgaagggcgcttcatcatctacagcgccatctttgcgacattggccgggttgatcgcattcctcatgcgcgattgctgcgacggccacccggaaatctgcgcgccggtcgcggctgcgctgtcctgctcctgtgaacccggcaaggatgcctttcatggctgaagcctcgcccttcgcgaccaacccgccggatgtcgtcatttaccacaacccggactgcggaacctcgcggaacgtgctggccatgatccgcaatgccgggatcgagccgcatgtggtggaatatctcaagacgccgccctcgcgcgcgatgctggaacagcttatcacccgcatgggcatcgcgccgcatgaactgctgcgccaaaaaggcacgccctatgccaagcttggcctggacgacccggcactgcctgacgccgcgctggtcgacgcgatgctggcgcatccgatcctgatcaaccggcccatcgtggtcagccccaggggcgtgcggctctgccggccctcggagcaggtgctggacctgctgccgccgcagcgcgccgccttcagcaaggaggatggcgagcaagtcgtggatgcccagggcaaccgcattcgctcgtcctgaaaggatctgatgatgacccccgacagcccggcccgccggctttcctttctcgaccgctacctgaccttgtggatcttcgcggccatggcgttcggcatcctgctgggcactatgttcaccggcctgccggatgcgctgcacgccatggcggtgggctcgaccaacatccctatcgccatcgggctcattctgatgatgtatccgccgctggcgaaggtccgctacgaggacctgccccgggtctttgccgacaagcgcgtgctggtgctgtcgctggtgcagaactggctgatcgggccggtgctgatgttcgccttagcggtgatcttcctgcgcgatcatcccgaatacatgaccgggctgatcctgatcggcctggcgcgctgcatcgccatggtgctggtctgggaccagctggcgcgcggcgacgggcaatatgtcgccgggctggtggccttcaacgcgatcttccagatcctgttcttctcgacctatgcttggctgttcctgaccgtgctgccgcccctgttcgggctggagggcagcgtgatcgaggtgggcttccggaccgtgaccgaggcggtgctgatctacctgggcatccccttcgccgccggcttcctgacccggcatgtgctgatcgcgcgcaagggcgaggcctggtatcgggacgtcttcctgccgaagatcagcccgatcacgctggccgcgctgcttttcaccatcatcgcgatgttcagcctgaagggtggcgatgtcgtgcgcctgccgctcgataccgtcaggatcgccgtgccgttggtgctgtatttcgccatccagttcctggtcagcttcgccatgggccgcctgatcgcccgggactatccgcgcagcaccgccatcgcctttaccgccgccggcaacaacttcgagctggccatcgccgttgccatcgctgcctatggcctgacctcgcccgtggccttcgccgccgtcatcggcccgctggtcgaggtgccggtgctgatccttctggtcaacgccgccctgtggctgggccgccgctggttccccgaagcaaccccgcaagaggcccgcgcatgatccccgacctgccgaacctgtcgcccgactgcctgcgcgcgcccgcgatccccgacctgccgcgagcaacccatccgccgcgcatcctgctgctttacggctcgctgcgcgaacgctcctacagccgcttcgccaccttggaggccgagcgcctgctgcggcatttcggctgcgagacgcgggtgttccacgccaacggcctgcctttgcccgaggatgccgacccgtcgcatcccaaggtgcaggagctgcgcgacctgtgcctgtggtccgagggccaggtctggaccagcccggaacgccacggcgcgatgaccggggtgatgaaggcgcagatagactggatcccgctgtcgatgggcgcgatccggccaacgcagggccgcacgctggcggtgatgcaggtttcgggcggctcgcagagcttcaacgcggtgaaccagatgcgggtgctgggccgctggatgcggatgttgaccatccccaaccagtcctcggtcgccagggcgtatcaggagttcgacgaggcggggcgcatgcggccgtcgagctattacgaccgcatcgtggatgtgatggaggaactggtgaatttcaccctgctgacccgcgacctgtcggccttcctgaccgaccgatacagcgagcgcaaggaagccgcggcaaagctcgaggaacgggtaaacctcaaggctgcgacatgaggctggagaggcgcgatatcgggcggggagcgatcacgagacgcacccggatcgcgccgtaaacggcgatcgaaccgggtctgaaccgggtaaccgtcttgacattccatcgtcgtcgtcggaattttccggcatggggtcttgcgatgccccacgaggcgccagccgaagttcgcgttccattccgacaactcactcaatggagggaacgcagatgcctgcgcctgatgccataacctgcgacaagctcgccaagctgatcggcaccgcacgatgccccgtcgtcctcgacctgcgccgggcggatgcgagagacgccgaaccccgtcgcatcccctccgcccgagggctgactgaggatgaaatcgctcctgcggcgctttcggaactggcccgcagcctggcccgtccggtggtggtcctttgcgccgagggacacgggcgcagtcagggcgtcgccgcctggttgcgccatgaaggggtcgcagccgaatatctggagggaggcatggcggcatggcttgccgccggcctgccactcgtcacgaccacaaggatcaccggccatgatccgcagagccgcagcctgtgggtgacacgggcgcggcccaagatcgatcgcatcgcctgcccctggctgatccggcgcttcatcgatccacgggcggtgtttctgttcgtcgccccggccgaagtgcccgcagtgaccgagcggttcggcgccatgcccttcgatgtcgaaggcgtgttctggagccatcgcggcgaggactgcaccttcgacacgctgctgaaggaaacccggctgagcatcccggcgctcgaccggctggcgttgatcgtgcgcggggcggataccgcccgcctggacctcgcccccgaagcggcaggtttgcttgcggcgtccctgggcctgtcgcggatgtattccgacgatctggagcaactcgatgccggattgcagctctatgacgctttctaccgttgggcgcgcgatgccacggacgagatccacaactggcccaccaacgccaggggtccgggccggggcgcgacatgaaacggcgtgctggatttccaacgctgggtcaggccaccggggtctgggccaggatcgccgcgctgagtttcggcgggccggccggccagatcgcggtgatgcaccgaatactggtcgaggagcggaaatggctcggagatgcgcgattcctccatgccctgaacttctgcatgttgctgcccggccccgaggcgcagcagatggcgacctatatcggctggctgatgcacggcgtgcgcggcgcgctgatcgcggggatgctgttcatcctgccgggcttcatcgccatgatggtgctgagctgggtctacgcggtctatggcgatgtgccggttgtgaccgcgctgttcttcgggctgaaggccgcggtgctggcaatcgtgctgcaagcggtgttccgcatcggcaaacgtgccctgaagaacaaggtcatgctcggcctggccgccgcgtccttcctggccatcttcctgttcgatgcacccttcccgctgatcgtggcgctggcggcaaccatcggctggatcggggcaaaggccgggattgcggccttccggggcggcggcggacatggctcgacagatggcgcacatgtcagcgacgccgacacgatccttggcgaagaccttgatcttccgccctcggcgcgcagaaacgccttccgcgcgggatgggtggcggtcgcgctctggctgttgccggtgctgctgctggtcgccctggtgccgggcagcgtcttcaccgacatcgctctgtatttctcgaaactcgcggtgctgaccttcggcggggcctatgccgtgctggcctgggtcgcgcaggaggcggtcggcggctatggctggttgcagccgggtgagatgctcgacggtctcggcatggccgaaaccatgccgggaccgctgatcaaggtgttgcagttcgtcggcttcatgggtgcaatgcgcgaggccggatgggccatgccgctgctggcggcaacgcttgggggcatcctgacgacatgggtgaccttcgcgccctgcttcgcgtggattctgctcggggcaccgttcatggaaggattgcgggaaaaccgggcgctcgtggcggcgctggcttcggtcacggcggcggtcgtgggggtgatcctcaatctcgcgatatggttcgcgatccatgtggtctggcgcgaggtcgagcctttcaattgggggccggtctcgaccagcattccggtgctggaaacactggatggctgggcgatggccctttcggcgctggcgatcctcgcggtgttccgtctgaagctcggcatcggccttgtgcttggtggtgcggcgctggctggcctcgggctgcatctggccggggcgatctgacggcggatggcgaggccgctgcccgaaccccgaagaaacccggatatccgcgatgccagggcggatgcgggtcgcccgcggtcagttgatcgtggtgcctgccctggttcgcatcacctggggagggtcgggcggcatggtaacgggcaacgtgacgccgactt

SEQ ID NO: 3663 - DNA, 23516 bp, synthetic construct
  misc_feature 1..23516: note = Synthetic
  source 1..23516: mol_type = other DNA
accgtgttgccgaactgctcgagatggtcggtcttgatcccgactacgccggccggttcccgtccgaactctcgggcggtcagcgccagcgtgtctcgatcgcgcgcgccttcgccgcccggcctgacgtgatcctgtgcgacgaggtgctgtcggcgctcgacacggtcgtcgccgcgcgcgtactcgatctgatgaagcagctgcgtgaggagcacaaggtcgcctatgtcttcatcagccatgacctctcgacggtcgcctcactggccgaccgtgtggcggtgatgtacgctggccgcatcattgatgcgggtctgaccaaggaggtcttcgcgccgccgcaccatccctacacgcagctgctgatcaactcggttccggcactgcggcagggctggctcgaagaaatcatcggcacccaggaggccgaggccggtatgcgcagcaatgtgatgctgcacgacgagccgtgcccgttccgtatgcgctgcccgatgatgattcccggcacctgcgacacgcagcccgcgccgcgccagcaaatgggcagcggtcacgtcatctattgccagcataacgaccgagaactcctgaaggctcagagcacgcctgattgctgacggaggttcgccatggtgtccagttccggctgttcgacaggaatcaccggcgcaattttgcgtacatcctgttcaatggcgactttgatcccgtgaacgatcaggtcaaagagcagctcaagcagatggtaatgggcgcgttgatgggcgcggacatgaacggtgtgaacctgttccctgccgttccgctcgacgatgatctcgccggcgacatggcaatcagcaacacgatggacctgggcacggcccacggtctgatgctggtcgagtttctcggtgtcggtcaggacggtgaatgcgttcacaggatcagctacaccgagattgtcgcctcccacggggcggtcgacagcgctcggcgtcagtactggcgcatcccgggcatcttcggggacacgctggtcgcatcggcgaactgaacgtcagagttccgttcgaggtgcgcccggccaaagagcggcagagtgttttcaagcgcagcagccacgcgaaagaccgtcgtgccgtcgtaaggattgcccaagagctgaacgccgttgagcacgccgttcggtgcgaagcccgacagcacggcgagggcctggcaacggctgaagctgttgagaagtgcggtcatgacggtgtcgtggatctccacctctctgccgttgactatgacgggctgctcccaatccggccactcggcgggaatctccgtcgtgccgatggcggagcagatgaaggcgccgaaccgtgcgatctcgggaccgaacgcggcccggctctcgccaatggtctgaacgcagtgatggaacatgcgtgaggtcacgctctcgttttcgcgatcgaagacgggcgtgtaggcgcggaccagatcgggatggttgttggcggcgtccgagaactcgtcggcatagatcagcccaccccaggtgccgtaggcgtgggccaggtcgggcgctcaaggagtcttgatctccgtcacggtcgcaccggccccgccggatgaggcaccgcaggtgacgtcgagattccaggggttgcgtgtcgtgccgtgcagtctggtcatgcaggtccagggacagacaagttccgggcaggtagcagatgtcgagattggccatggcgggattccggggatggttgaggtgcggacgctgatgtgtcacgaaacggtcgcgtcttcgttgcatgatgcgcgctgtttgcggggacaccaaagcatgaccgatttgacacgcaggctggcggcggagttcgttggtacggccttcctgctcgcgaccgttgtgggatcgggcatcatggccgagacgcagtcgccgtataacgcgggcgtggcactgctgggcaacaccattgcgaccggagccatcctggccgttctgatcctggtctacggccccgtctcgggcgcgcatttcaatcccgcggtcacgatcgcctttgcgatccgcaaggaaatcacgccgagcgattgcgcaatctacatcgtggtccagatcatcggcgccctggtcggcacgattgtcgcgcacatcatgttcaaacagccgttgctgttcgcctcgacgacagaacggaccggtgcgagccagtgggtcggtgagctggtggcgaccttcagcctgcttgcggcgatcctgggttgcctgcgctggcgtcccgaggcaatcccgtacgccgtcggcctcgtgatcacggcgggctactggtacacgtcctcgaccagcttcgcgaaccccgccgtcacgatcgcgcgcagcttcaccgacacgttctcgggcatcgtgcccgcacacatgccggccttcatcgtgtcccagatcgtgggtgccgtgatggcggtctatttcttccgctggctgctaccgccggccgacaaggactagagcaggtcgcgcctgaacccgcggctccagcggcgcgaggagatctttctgtcgccgtggaaggcatcgacctcggcctcgtgatggatgtgctcggccgtcgaccactggtgcgaccggatgtcgactctgacctcccagtcgccgcgtttgagcgttgtcgactgttcgtggtggctactggcgcagagcgggtcgccgtcatggatcgtggagcgccgccgcagctgatgcgagacctcggtgtcgatcggatcgatacggatcgtgccctcgttgccgaagaacccgccgtcagcatcgacatgcgatgaaatctcgcccgtgatcaggctgcgttcgatccagcggtgaaagtggccgtcgctgacctgcgagatcggcacatccggcgcggtttcgggctcttcgaaggccggcaggtcatcgtccgaggcgcggggcgcgcgcaccggcaactcgaacagcgatgaacccgcctgcagcgtcagggtggcggcttccggcgcgggccagatcatcggccagtagcacgacgagatcgccacgcggatgcgatgaccggcggggaaggcgtgcgcaatgtcgttgagcgccacacggaccgtgtaggtcttgccgggtttgagcttgcggggccgttcgtggctgtcgcggtgcgtcaggttcagcgcaccataggtcacacgcgtcgacgcaccgtcgggtgcgatgtcgttcaggcgcacggcgacctgtgccacgggcttgtcgctggcgatcttcagcactgcgacgggttggccgagaacctcgacacgatcagacaacggttcgctgtcgaaacacacgctcttgccgtcatcggcctgctgatcgccggccagttcggctgccatgccgaaggcgcaccactcgccgccgtcgagtccggtcgaagccggcgagcaaaagacaatgggaccacgcctgcgcatcttgtctgccagcgaccggtcgccgttcaggtggagcgtccggggctcgatctgagccgacggccaggtgtcctcggcgacccagcggcctgggcgctccccgtagtcggtcgcgggtctcacgctctcctgcatccagacacggtagttgggttcgttctcgatgccgttctcgatgcccttaagccagcggtcccaccagcgcagcgcgtcctgaaggaaaccgatcgccgggcctggtgcgccgtcctgcggatagacgtgggcccaagggccgatgatgccccggcgcggaacatcgagacctgccatgaggcgggggatggcattggtgtaggcatcggcccagccggcgatcgtgtagacgggaaccttgatcgcggcgtagtcctcgcagactgagccatgcttccagtaggcgtcccgcctggggtgacgcagccattcgaaggcccagggctggtcgcggtccaagcgctccttccacatgtcgagccagcggtcgccgacgatctcggggtccggcgggcggttgttgaacagcatcatggtcgccgaccacatctggtttgcgtccagcagacagccgcccatgtagtgcacgtcatcggcatagcggtcgtcggtggcgcagacggcgatgattgtcttcagtgcctcgggctgcagcgctgccgtctgcagtgcgttaaacccgccccaggacttgcccatcatgccgacgttgccgtcacaccatggctgcgtggcgatccaggcgatgacctcaagcgcatcgtcgagttcgtggacctgaagatactcgtcgttgagttcaccttcgctatcgcccgcaccgcggatgtcgacacgcaggcaggcgtagccgtgacccgcaaagtagcggtgcatcggctcgtcccggcaccgtgtcgactcccgcttgcggtaggggatatattccaagatggccggtaccgggctcttttcggcatcgtccggcatccagatgcgcgtggccagccgtgtgccgtccgacagcggaatccagatgttctcgatgtcgcgcaccgcattggagaaccgttcgacaatgcgtttcatgacgttgtcccctccgaacccgcgcgcatcgtggtcgatcacgtcactgtttgaccttgtagccggtagcgacgatgcgttggcagagcaaggccatcagtcccgtcacgatcatcagaggcaggagcgttgagagaaccgttccctctgcgacgccgacatggccgttgcgcacaccgtcgatgatccagaacgccgggctcaggcgtgccagggtgtcgaatccccagccgtaggccgtgattggaaagaagacgccggagagaaagatcaggggtccgacaaccagtcccgccatattgccgacgtggtcgaatctggtggcccagaaaccggtcgcgaggccggtcgcagcccccagaacactgcctggcacgccgtagacgatcatcagaacgactgacgccggcacgatcggaatgaagagcgagagcccgatcaaggccagtgtgcctgtcgcaaggccggctgttgtgccggcggcgagcaagacagcggtcagctcgatgggacgcaacggagccccgagcagcgctgcgagcgttccccggatcttggagtcgatcgtcgcccaggccgtcatctcgtaggacgtctggacggtgaccatcgtgacgagaccggagacgacgtagtgcgtgaaggggatgccgcggacgtcggcgcgcagtccgccgagtgcaagcccgaagatcgccagaaacagcagcgtcgtgcccaccggtccgacgaccgaatgctgccagcccttgaggtaacgccgcacctcccagcgatagagcgatgccatcgccacggtgttgatacgtggcatgggacgggtggcatcagggttgatcaccggagtgtcgctcatggtactgctctatcgccggaagcacgcgcgagcaagaacgggctatgaaggtttcgaacaggcgggggacaggcgtgagcgatttgaagattgcctccatacccggcgacgggatcgggcaggaggtgatggccgaaggcatccaggcggtggagaccgccggtgcgcagcagggactcagcttcgcctggtcgtgcgaggtctaccctcaccccaaccctctaccggtcccgggagagagcctcctgccgagggcgtcgcggcccggggcggcaccatacgcttgccaacctcgctggcgttgccgagcaggttgggcacgagacgctgggtaaagagcatctgcacttcggtgccgtcgggcaacgaacccgaggatgcacatacggttgtggatcggcatgtagggcacggcgaactgcaactgtggccataggaggctccgtctcaggcggcgtcggctgcctcgagcgcttcatgggcttcgagccagcgagcttcggcggcgctcagagcttcttcgatcctcgctcgcttcttcatcagatcggtcatggcaaggttcgtttcggggccatcgtggttggccggatcgaacaatgcacggtcgatatcgctgcgctgatcggtcagccgggtgacctcgttttcggccttttcgaccgccttgcgcagagtgcgcgtcttctcgcgcgcttcggcggcgcgtcgccgttcatccttgcgactgagcttcggtgccgctttgtcggaggtgtctgtgttgtcgttcgaacccgaacgaccgaggacgagattgcggtagtcgtcgaggctgccgccgaaatcgttcgcagtgccgtcggccaccagcaccagccggtcggccgtcagctccagcagatggcgatcatggctgacgatcacgaccgcgccaccatagccggcgagcgcctgcaccagggcctcgcgggcatcgacgtcgagatggttggtcggctcgtcgagaatcagcatgtgaggcgcttcgcgcgtgatcagcgccagtgccagccttgcccgctcgccgcctgaaaggtggcgtacggcaagttccgccttgtcgccggaaaagccgaagcggccgagctgcgcacggacggcgccgggctttgcgtcgggcatcagccgggtcatgtgctgcagcggtgtgtcctgcggttcaagctcctcgacctgatgctgggcaaagtagccgacccgcagcttgccgctcgcattcatgccgcccgtcatcgcggccaagcgaccggagagcagccgcgcgagggtcgtcttgccgttgccgttgcggcccagaaacgccacgcggtcgtctgggtcgaaacgcaggttgagcccttgcagcacgggaccgtcgccgtaaccgacggcggcgccgtcgagcacgatcagcggcgggcggagctcggcgggatcagggaactcgaacgacaagctcgaatcctcgactgccgcggcgatcggctccatgcgcaccagcgccttcagacggctctgggcctgccgtgcggtgtgagccttgtagcgccaacggtcgacgaaggcctgcagatgtgcgcgctggcgatcctgcttgctgcgcattgcctcgatctggtcgagcctctcgcgacgctgccgttcaaaagcatcgtagccgccagcgtagagcgtcaccttgccgccttccagatgaaggatgtgatcgaccacattgttgagcaggtcccgctcgtggctgatcaccagcagcgtgccgcggtaggtcttgaggaacgaatcgaaccagatcgccgcctcaagatcaaggtggttcgagggctcgtcgagcagaagaagctccgggcccgagaacagcgccgaagccagtgcgacgcgcatgcgccagccgccggaaaagctgtcgagcggctggtgctggtcagtctcgtcgaaaccgagacccgccagaatgcgggcggcgcgcgccggcgcactgtgggcgtcgatcgcattgaggcgttcgtgaatctcggcaatacgatggctatcgtcggtctctgcttcttcggcgagcaaccgggcgcgttccgtatcggccgcaagaacacgctcgaacgggctgtccgggccgcccggcgattcctgggcgacatagcccatgcgcatgtcctttggaatcccgatcgaaccgtcgtcggcctcctggatacccgcgatcgccttcatcagagtcgacttgccagcaccgttgcgcccgatcagcccaacccggctcttggtctggatcgaagccgaggcgcggtcgaggataatcttgccgcccagccgcaccgtgatgttggagatcgtcagcatggcgcggctgataccacgccaggccgagcggcgtcatcgggcgttcatatctcttcttcggtgacgccgtcgtcgttgctgtcgcctgtcgcctcgggattcacgcgccggatgatgatgtcgccgttttccagaacctcaggcatctcgtactgcgggatccccgcgaccagcagctcaagcgtcagcatcaggcgcttcatggtctctttggccatggcgaaggggtcatcctcttctgccagggccggctgaaacgaaagcggaaaggcgatagcggctgcgatgaggcagcccttcaacgggggcatcggcggtctccggtccatgcgtcgggctgacgttgcggcggcaatgcggcgatcctgtgacggctggaccgcgtgccgccctattgcaggtggccgcaagccggttccgagcaggtcatcagatcccagcgcgtgtcgatctcgttccagaagaggcggtagctgcctgcttcgttcaggcggtagcgcagttcgacgccgtcggtgaggatcaggaagtaccagtcggccgcaccgctgaacacggcgacttggccggagtcgagcttgaaccggctccagacctcgttgtcgttggaaaggccgaatgtcaggcgttgggtcgccgtgttctcgacgtagatttcgttggcttgcggggcggctgtctcatccacctgcgcgtcgacaggtgtcccacaggcaacaagggctgcgacgacgacgtggaaagcgaggcggtgcagcctcacgggctcgcgggaatcagtgcccgttcctggcgcgcacctgatcttcggcgcgcttgccgtgataagcgaccatgaagaaccaggcgaacagtatcagcccgatgcccatgaactgcgccgggccgtccttggctccggctgcgatgagcaggcccatcaggcccatcaggaaaaacgcaagggaggtaaccagcatacccagcatcagtctgtctccacggaaacgtcgttgcgcggagcatactcggaacggcgcttgaggcaaggctgaggcgcccaattccaggttctggcgccgtggtcatccacggccctgatggttaggatagcgccgacacgcgtgaggggagatcagccgtgaaggtggcgtttctgggtatgggtgtaatgggttatccgatggcgggccacttggctgccaaggggcatgaggtcacggtctacaaccgcactgcggccaaggccgagcagtggagcggggagcacggcggcagccatgcggcgacaccggctgcagccgccgagggccaggagatcgtttttgcctgcgtcggcgacgacccggacctgcgtgagatcatcgcgggcgagagcggtgccatgcacggcatgagcgacggcgcgatttttgtcgaccacaccaccgcctcggctgacatcgcgcgcgagatggccgagatgctcagcgccagggacattggtttccttgatgcgccagtctccggcggtcaggcgggcgccgagaacggtgcgctcaccatcatggtgggcggtgaccgggaccagttcgaccgtgctgcgccggtcatggagtgttacggcaaggccgtcacgctgatgggcacagtcggcgccggccagctctgcaagatggccaaccagatctgcattgccggtctcgtccagggtctcgccgagggcctcaacttcgcccagcgcgcagggctcgacggcgaccaggtgatcgacgtgatctcacagggtgcggcgggctcctggcagatggtcaatcgtggctccaccatgtgccgggacgagtacgacttcggcttcgctgtcgactggatgaggaaggacctccgcatcgccatcaccgaagccaggaacaacggcgcactgctgcctgtcgctgccctcgttgaccagttctacgctgaagtccagtgcctgggcggcagccgctgggacacctcgagcctgatgcaccggctcaagcgtgcgccttgagcgaagagcgtctcgttgagagatgcgaaactctttgtgcaaagtggtggtcagatcagggtctattcgggtttttcagggatgtgttgacatgatcaacacagcgggtcccgtcgagggtctcgggggtaacaagcggcatggcgggttccggctctccggaaagagtttatgggatagcgtgcggtgccggggctgtgtccgtcggccgtgagccgtcggacatgtttgttcgattgtcatttcaggttgtggcgatcaggtcgtgccaatagagtaaagggatggaacagaacaccgacaacctcacccgtctcggacttgacattggcacaaattccattggctggtggctttattcgaccgacggtaatcgcataaccgacgtcatggacgggggtgtgaggattttctctgacggtcgtgacccgaagtccggtgcgtcactggctgttgaccggcgtgcagcccgctccatgcgacgcaggcgggatcgctatctgcgtcgccgtgcggctctcgtgcgaaagctgtccaaggccggactggccttctcgatcagcgaggagggggtcaagaagggcgtggctctcatgcgaaaactgtccaaggccggaccgatgcaactctaccccggcgccgagggcggtgcggctctcatgcgaaaactatccgaggccgggctgatgcctgacggcccggaggcggccaaggcgcttgaggtgcttgaggcgcttgatggtgaacttggcgacgcggaccgaggggaggcggccaaggcgcttgaggctcttgcgttgctggacccttacgcgttgcgcgcctgggggttggacaagaagcttccgcttgcacatctgggccgggcgctttttcacctcaatcagagacgtggcttcaagtcgaaccgcaagacggatcggggcgataatgaaagcggcaaaatcaagccggccacgaagcggctggatgaggagataaagaaaaataaggcccgaacctatggcaagttccttcacatgcgccgcagcggagagccagaagaaccgggcgaggacggaacccggcctgacgaccgccgcacaaaatccgtgcgtacccggtcgagcatggctcggcggggcgatgcagagaaagaagaagaaggttatgatttctatccggaccggcggcacctggaggaggagttcagggaactctgggatgcgcaagtgaaacatcatccggatgttctgacggatgatctgaaaaaagctctcttcaagacgatcttccatcagcgccctctgaagaagccggctgtcgggctgtgccttttttccggtcagcatggtgttccgtccgatgagaggcggcttcccaaggcacaccccttgacccagcggcgcgtgctccatgaaacggtgaacaacctgcgtgtcacggccgacgggcgtgcgaaacggtccctgacactggaacagcgcgatcggatcattcacgcactggacaacaggaaggcgacgaaatcactgaaatcgatgaagttgaccctcgatcagctcggcaaggtcatcgagcttgcgccagatgagcgctttacgctggaaactatcgcacgtgacgccattgcatgtgacccggtgcgggccagcctcagccaccccgacaggtttggaccgaggtggtcagacctggatctggacgcgcagtgggaggtgatccgacgtcttcgcgaggtgcagagtgaggccgatcacaaatgtctggtcgcctggctggtcaagactcatggattgacgaaggagcacgcctcggccactgcaaatgcgcccttgccggagggatatggacgcctgggagaaacggcttcgcggaagattctgggtgcgctggaagccgatgtggtgacgtatgatcaggctgtcaaatcctgtggctggcatcactcggatcaccgcacaggcgaggttctggatgaattgccctattatggggaaattcttgatcggcatgtgatccctggctcggggcagcccggggatgacgacatcacccgcttcgggcggattaccaatcctaccgtgcatatcggtctcaaccagttgcggcgattggtgaacaggatcatcgccacctacgggaaacccgatcagatcgtggtggaactggcccgggacctcaaacaatccgacaagcagaagaaggacacacagaaccgcatcaagacaaacaccgaggcagcccgcaagcgcagcaaaacgctggaagaagagcttggccaggcggatagcggtgccaatcggatgctgttacggctctatgaggagctggggccggcaatcggcccgcgctgttgcccctacacggggaaaccgatcagtgtcaccatggtctttgacggcagctgcgatgtggaccacatcctgccctattcccgcacgctggatgacagcgttgccaaccggaccctgtgtctgcgcgaagccaaccgggagaaagggaacagaaccccatgggaggtctggggcgaaacgccacggtgggacatgatcgccgccaacctcgaacatctgcccaaaaacaagcgttggcgctttgctccggacgcgatggaacgattcgagggcgaaaacgactttcttgaccgggcgctggtggatacgcagtacctgtcccgcattgccagaagctatctggatgccctctataccgaaggggggcatgtctgggttgggctgaccgagatgctgcggcggcattggggcctgaacagcctgctgccggatcacaacaagggcgcggccaaggccaaaaaccgcaccgatcaccgacatcatgccatcgatgcggctgtcattgccgcaacggatcggggtctgatcaagcagatcagcgatgcggcaaggcgtggcgaaggagatggcctgagcgccgaagaggtggcaagaaccacgcccgaaccctgggagggctttcgcggggatgttcgcaaccagctcaacaggatcatcgtcagccaccgcgccgatcatgggcgtattgatccctcggcgaaaaagcggggacaagacagcaccagcggtcaactccacaacgataccgcttacggtatcgtggacgagcaaagcgtggtcagccgcaaaccactcctgtcgctgacgtccgacgatattgccaggacatcaatgggcaagcgcatccgcgacccctatttgcagtcactgctctccgaggtcatcaagggcagggaggacaaaaaggacatcgaggccgcgctggcggcgtttgccgcgtccgatcacctgccgaacggcgagcccaacccctatcggggaatccgtcatgtccgtctgatcgaaagcctgcaatcgtccgcgcgggtagaaatcagggacaggaagggagaaccctacaaggcctacaagggtgacagcaatcactgttacgaagtctggagaatgccggacggcaaacccaaggccaagatcgtcacaacctttgaggcgcatggtgacgctgtcgatcgcccgcacccggcggcaaagcggctcctgcgactgttcaaacgcgatatggtggccatcgaaaggaatggagaaacgctgatctgccatgttcagcaattcaatctttccgatggcgttgttctcgcagcccattttgaagcgaatgcggatgcgcgaaatcgtgacagggatgacgatttccggtttattcgaatgggtccgagttcaattctgaaagcccgcctccgcagggtccttgtcgatgagatcggtcgcgtgcgggatcccggaccgacgcatccgatggactgaggcttctctcaggttcacgggagcgcgatctggatcagatccttgacattgcaaccgatggacggcacctggcgcggctgcgaggcttcctgacggtctcggagggaggagctgaaatcgggcgcaccccactcgaccggatcgcgggtgtgatcgttcatgcgcatggcaccacctggtccacgtcgctgctcacggaactggccgaccggggcgtgccggtggtgttgtgcggttccaatcatgcgccgcgttccgtgctcatgcctctggaagggcaccatgcgcaaggtggccggatacgagctcagtggcatgcccgattgcccctgatgaaacaagcctggaagaaggtcatcatcgcgaaggtggagatgcaggccgccgccctggaagccatgggagaatccggtgccccgctgcgcatgatggtccgcaaggtcacctcgggcgacagcaccaatatcgaagcacaggcggcccgcacctattggccgtgcatgatgggcaaggcgttccggcgcgatccaggggcctctgacgtcaatgcgttgctcaattatggctataccgtcctgcgcgccgccacagcccgtgccgtggtgggtgcaggactgcacccatccatcggcatacaccacgcaaacagaggcaatgcgtttgctctggccgacgatctcatggaacccttccgcccattggtggattgcgccgcccggaatcttgcgcttgaccgtgggaccgaggtcgacactgcggcaaagcaggctttggcacgcctgatcggcacggatctgccgcttggcgacggtgtgacaccggtctcgcttgcgctcacaaagctggcgacctcgctgggacagagtttcgagaccggaaaactggcgctggttctccccagtccaccgggcgcgctcacactggcggggctcggacgatgacccgcaagtccgacattctgtcaggatatcgtctcatgtggatgcttgtgatgtttgaccttcccatcgagaccaaacagcaacgcaaggcggccacgacgtttcggcacttcctgctggacgagggtttcgagcgaagccagttttccgtctatgcccgcttcgtcaatggcaaggaagcctttcatgcaagggtcaacaggatcgagcgctccctgccttctgccggcgatgtccagatcctcaacttcaccgaccggcagtatcgcgatattgttcacttctcggatcagggccgcaggggccctcggaaaaacccccagcaactggtcctgttttgatgggttcattctggaacagagcaaaacaaacccgggtaagctcctgtaaaatcaagggcttacccgggtatggagtctaggcgttcagaattcggggtcaagccgcaacatggtcgatcgaggaccgccgtactgatgcagtctaggcgttcagaattcggggtcaagccgcaacgcgcgggcggggtcgcgcggggggggggactgacgagtccaggcattttgtgtgcccggtcacctcggcaaaggttgtcccgacagcggacccggcgcaaggctggtctggcacgaggcgacaaaaaggaaacgcgccccgtaggacgcgcttcaatgtggtgcaatcgagtgcttgttaaccgctcgaccacgaattctgaacgaacccaacatatacgctccaaaagtggatcgtcaagggaattctgtgggattctgccgtaagccgggacgaacggaaaagaaagggccgcggcgtgaaccgcggccctttcgggtcaccgtgggagatcggctggtctctagaagcccatgccacccatgccacccataccgcccatgtcggggccgccggccggcatggcaggggggtcctttttgggcttctcggcgaccatggcctcggtcgtgatcagcagaccggccaccgaagcggcgtcctgcagcgcggtgcgcacgaccttggtgggatcgacgatgccggccttgaccaggtccttgtaggtctcggactgggcgtcgaagccgacgttcttttccttgctctcaaggatcttgcccgcaaccaccgcaccgtcgaagccggcgttctcggcgatctgacgtgccggggcctggatggccttgcgcacgatgtcgacgccgacctgctggtcggagtcatcgagcttgagcttgtccagcgtcctgatggcgtagagcagagcggaaccgccgcccggcacgatgccttcctcgaccgccgcgcgggtggcgttgagcgcgtcctcgacgaggtccttgcgctccttcacctcgacctcggtggcaccgccgaccttgatcaccgcaacaccgccggcgagcttcgccaggcgctcctgcagcttctcacggtcgtagtcggagctggtctcctcggcctgctggcggatctggttgcaacggccctggatctgctttttggcacccgcgccgccgacgatgaccgtgttctccttggtcatgtcgacccgcttggccgtgcccagcatgtcgatggtgacgttctcgagcttgatgccgacgtcctcgctgatgacctggccgccggtgaggatcgcgatgtcctcaagcatggccttgcggcgatcaccgaagcccggcgccttgcatgccgcgaccttgaggccgccacgcaggcggttgacgacgagcgtggccagagcctcgccctcgacatcctcggcgatgatgacgagcggacggttcgactgcacgacctgctccagaaccggaagcatggcctgcatgttgccgaccttcttctcatgcagcatgatgaaggggtcttccatctccgcgatcatcttctcggtatcggtcacgaagtagggcgagatgtagccgcggtcgaactgcatgccttccacggtctcgagctcggtgtcgatgcccttgttctcctcgaccgtgatcacgccttccttgccgacggcctgcatggcgctggcgatcatgtcgcccacggtggcgtcgccattggccgagatcgtgccgacctgggcgatctcgctctcggtgttgatcttgcgcgaacgcttgtcgaggtcgtcgaccacggccgacacggcggcctcgacgccgcggcgcagatccatcgggttcatgccggcggcaaccgccttcgcaccctcgcgcacgatcgactgggcgagcacggtcgcggtggtggtgccgtcaccggcgacgtcgttggtcttcgaggcaacctcgcggaccatctgggcacccatgttctcgaacttgtccccaagctcgatctccttggcgacggtcacgccgtccttggtgatccggggtgcgccgaacgacttgtcgaggaccacggtgcggcccttggggccgagcgtgaccttgaccgcgtcagccagaacgtcgacaccgtgcagcatgcgcgcgcgggcttcggcgctgaacttcacgtctttggcagccatagtgcttgtttctccttgcagatgcttgtgcagatgcttgtgattgggcggaagcgggccggagccttgcttacttcctgcccctggtcgtcgcgatgacgcccatgatgtcggtctccttcatgatcaggagctcttcgccatccagcttgatttcggtgccggaccacttgccgaacagaatgcggtcgcccgccttcacgtccagcgcctgaaccgcgccgctgccgtcacgcgcgccgggaccggtggcgacgacttcgccctccatcggcttttccctggcggtgtccgggatgatgatgccgcccgcggtcttgtcctcaccgtcgatgcgacggacgagaacgcggtcgtgcaaaggcctgaaacccatgagccactctccttcgaactggcggttttcaacaacgttgccggaatgtgctggcactctgtggcaacgagtgccatccagatggtcgcccgtgttgcgactgtcaacccgacaaagccggaatcaggcagaaattcctcatctccgcgaatcggagatcatcctcaatgtgtcgctgccgcgacacgcgccgaccacgagcgctttttctccgatgccattgcgcctgatgccgttgcggaattgtgatcgcggcgacgctttccttcgtgcgggaatgctgcaaggatgagatcatgttccgtacgtgagcgtttcatgcgcccgcgttcgtaacgatccacgtgttcgtaacgatcatggacgccctgtggcgtcaacttccggggagtgaatcatgaagcgcatgggtatcaacgagttccaggacaagttgttcaccggccaactgagccggcgtcaggccctgggcgtgatgggcacgatgggtgtcgcggcgatgagcgtgtcgccgcggggcctgcgcgcagaacagcagccgctggtccttgagtggtccggctacgaaattccggagctttatccgtcgtatttcgagaaacatggcgaacccgtgttttcgttcttcgccagcgagcaggaaatggcggtcaagatccgtgccggtttcccggccgacatcacgcatccctgcgccgacacctggggccgtatggccgatggcggacttctccggccgatcgacacgtcgcgcctgtcgaactgggagaacgtgttcgagggtctgcgcggccatcgttccaccgtcaacgctgccggcgagacgatgatgctgccggtcgactggggcaacagctcgatcatctatcgcaccgatctctacgagggtgaggaaagctggtgcatgcttttcgatgagcgctacgagggccgtctctcgagcgtcgattccgaggtctcggtcctggttgccggcctctgccacggcttcggtgaagacagcttcaacatgaccgatgagatgctggccgagattcggccgctggtcgagaagcaggcccgtatggtccgcttctactggaacgaccagacggagatcgagaacgccatggccacgggcgagctggtcgcggcctatgcctggaacgcggcggtcaagaccctgctcgatcagggcgttccggtggcctatgccgtgcccagggaaggcatcctgaactggctgtgcggtctctcgatcgtcgccggcggcgaggccgacgaggatctgatctacgcgttcctcgatgcttggctcgaccccgaggccggccgtttccttatcgaggaatacggttacggtcactcgaacagcgtggcgttcgagatctccgatccggacaaggtcgcgtcgctcggcttcccgggcaacccgatcgagatgctcgacaagggcatcatgttccagccctacgacccgcaggtgctggagaacatggtcaacatgttcgacgaggtgaagatcggtctctgatcgctcatcgtcgtatggacagcagtcgtatggacatgaacggggcgcggtcgatgccgcgctccgttcagtttctgcccagtctgacaatcaatggcgatcacaaccgtgcgccaggctgtcaacatgctttccatatggaggtctgctgtgtaagagagacgatccgggatgtgcgggacgacaggcgttcgggaggtctgcacgtcaccgctcgaccggccggggacatgatggccggggacatgatggggtaggggcatgaccgatcaaacgcggggcgtcagcgcaggctatgcggaacagcagatgtcgccgggcttcagggcccgcgcgctgttcctgaaacacgaatgggtgcgcggctacacgctgatgacgccgacgctgctgtgcatgatctgcctgatgtgtctgccgctgttcatgctgttttcgtacagcttctggacgcagaactatctcgacatcgacaagacgttcacgctggccaactacgaggccttcttccagaagccgatctatatcgcgctcatgatgaagtcgatcaggatgtccctgttctgcaccttcatcacgctgctcctagcctaccccatggcctatttcatcgccttcaaggtgacgaaaaacaagctggtgtggctgatcctgatcacggttccgttctggacgagctatctgcttcgcgttttcgcgtggaaggtcatccttggcttcaacggcgtgatcaactccggcctgatcagcatgggtatcatcgacgagcccctgcagttcctgctctacaatccgacggcggtggtgctcacattggcgcacgcctgggccgccttcgcgattctcccgatctacgtatcgctggaaaagatcgacagatcgttgctcgaagcggcaaccgacctcggcgataccccgacggaacgcttctggcggatcacgtggccgctctcgctgcctggcgtgattgccgccggactgctcgtcttcattccgaccgtgggtgactacgtgacgccaagactggtgggcggaacgacaggcatcatgattggcaacatcatccagtcgcagttcggcaaggccaacaactggcccatgggtgccgcgctctcggtgatctcgatgatgctcattgcactcctggtggtcaccttcattgtctcgacgacccgcgcgagggccaaatcgtcatgaccgacgcaaccgcctccaacatcacggcccggaaggccgcggaagacacgcgcggcgaggagacgccgcagttcttccagtcgaagcacgagggctaccactggacctcggaagcgccgatgttcctgtacgcggtgtggtatctcgcgttcctctacatcccggtgctgttcctgccgctgttctcgttcaacgactcgatctatgtcacgttcccgctcaagggcttcacgcttgcgtggtacggcgacatgatggacaacccggcgctcctgcgggcgctggagaacagcgtcaaggtcggcctcacggttgcgctgctctcgaccttcctgggcctcttcgcagccaaggcgatgacgcgctactacatgcccggcaagggtccgctcaccagcttcatcatgcttccgctggtcgttcccggtatcatcctgggcatcgcgctgctggtcatcacgaacctgctcggcctcccgctttcgctcttcacgatcggactcgcgcacacgctgatcggtgtgccgttcgccatgctggttctgatgtcgcgcctggaagggtttgacaagagcctggaagaagcgtcgctggatctgggcgagggcgcgttccagaccttctggcgcgtgaccctgccgctcgcctggcccggtatcctggcgagtgtgctgctgaccttcacgatctcgttcgatgagttcatcctggccttcttcctggccggcaacgaggtcacgcttccgatctacatctggagccagctgcgcttcccgaaccgcctgccgatggtgctgtcgctcggtgcctgtatcctcgtgttctcgttctttatcgtgacgttcgccgaagtggtgcgccggcgcggtgtgggaccgcagagcggtgccgcaatctgatcggcccgaaaaccgatcggatcaaaacctctggagaccagttcaggaccggtggcaacaacaacagtggacatgggtgctcatggcgcgtgaagactatatttcgatgaagaacacctcgaagcacttcggcagtgtgaaggcggtcgacgacatctccttcgacatcggcgaaggcgagttcttctcgctcctgggagcctcgggctgcggcaagaccacgcttctgcgtatgctggccggatttgaacagccgacgctcggcaacatctacatcgacggccagccgcaggccggtgtgccgccgcatcagcggccggtcaacatggtgttccagaactacgccattttcccgcatctcaacgttcacaggaacatcgcctatggcatgcgcaagtcgggcctgagcaaggccgaggtcgacggcaaggtcgacgagatgctggagctgatcaagctgccgggctatggcgcgcgtggcgctcatcagctttccggcggccagcggcagcgtgtggcgctggcccgggcgctgatcaagaagcccaaggtgctgctgctcgacgagccgctcggtgcgctcgacaagaagcttcgcgagcagatgcagcttgagcttcgcgccctgcagcgcgatgtcggcattaccttcgtgttcgtgacccacgatcaggaagaggccatgacgatgtcggaccgcatcgcggtcatgtcgctcggcaaggtgcttcagatcgactccccgacccgcctctacgaggttccgcaggtcaaggaagtggccgacttcatcggcacgatcaacttcttcgagggttccatccgcggcagggaaggcgagagcacggtcgtcgatgccgagggtctcgggaccgtgcactcgacggcgtcgtccgagccgccaagctcgggccaggtgaccgtggcgatccggcccgagaagttcaatctgaccttccggcagcccaacgtgccgaccaatgtggtcgagggcacgatgcaggcgacggcctatctcggcgatcgcagccattactatgtgcatgtcgacgggcgtgatgccccgattgcggttgccgcgcagaatgcccagcggcagctcagtgcggtcgacgccgacaggcaggacaaggtctggctgacgtgggacgacgattcggcgctgttgctgacagcctgagtccaaccggttacaatgtcgcgcgtggggcctctggtgtcgcgcgctttctccttccgggccttccttttccggggtctcgtctttccggggtttcatgcgctacgccgccatcgtcgatcgtctcgccaacgaaggcgcacgcgcctgggaaatccatgcccgcgccatgcagcgtcgacgcgaggggcacgatgtcgtcatcctcagcatcggcgacccggatttcgctacgccgccctcgatcgtcgatgccatgttcgaccgggttcgcgccggcgatacgcactacggtccgaccgacggcggaccggcgctcaaggcggcgattgcggcctaccacacccgccacgccggccagcaggtcgggcccgggaacatttccgtcacacttggtgcgcagggcgggctgttcggtgcggcgatgtgcgttgccgagcccggtgacgccgtgatcgtgccgcagccggtctacgtgacttatgaatcggtggttcatgcgaccggcgcgacactggtcgatgtgcccttgcgtgcggagcgcgatttccatctcgatccggccgatatcgaggccgcggtgacaccggcgagccgggccgtcatgatcaacacaccgcacaacccgacgggcgcagcttacgggcgcgaggagcttgaggcactgggcgagatctgcaaggcacacgatctctggctgatctcggacgaggtctacagccgcacgctcttcgacggtcgcgagcatgtctcgccggcggccctgccggggatggcggagcgcaccatcgtggtcaacagcctgtccaagtcccatgccatgacaggctggcgcgtcggctggaccgtcggacccgaagccttcacccgtcacatgtaccacctgggcctggcgatccactatggccccccgaccttcatccagtcctcggtggcagcggcgttcacggacgacttccccgagatcgatgcgatgcgagcgcactacgaggcccgccgcaacagtgtctgcgacgtgcttgagggcaattcccggcttcgtgtcatccgtccgcagggaacctgcttcctgatgatcgatatccgcgcgagcgggctgtcgtcgcaggatttttcgttccgcctgctggaagaggccggcgtctcgctgctggccggtgagggcttcggcagcggtggaacgggcttcgtgcgcctgtcgctgaccgcacccgacgcggacctggccgaggcctgccgccgcatcaaccggtttaccgggagcctcaggacctgacgggcgccgggcgcggcatcaccttcgtgtcaggccggcgtcatggccttgcattgcggaagaccgaacgccacgttatcgctccgacaggcagggacatatg

SEQ ID NO: 3664 - DNA, 23510 bp, synthetic construct
  misc_feature 1..23510: note = Synthetic
  source 1..23510: mol_type = other DNA
cccgcctgcaccagcgccaccgcctcgcggatcgagcgcgcgatatggggggcgtgacgcttgttggggcggcccggcgcgcgcggcgcgccgaagcggcgggccagcaccggcaccccgcgcgccattgccgcatgggcctcgcccggcgcggaaatcggcaccaccggcgcgccttcgggcaggtgcgtcgggtcgccgatcaggaagaaggtcaactcatccttcagcgcctgccacgcgcccagcgtgatttccgggccgatgcccgccggttcgccggaggtcagcgcgatcggggcggccgttgcgccggtgtcagttgacatattcgatgcgcgcgttggccttgaagtcttccagcaggaattgcgccgccgtgccaatccgctgatttttcagttgggtttcaaccatttcgcgggtcagcgagcggggcagttcgttgccgcgcttgcacagcatcaacacgacctgcgccccggattgcgatacgagattggtcgagacttcgcccggatcgaggttgcgcaattcggccccgtaaggcgcgggcacggcgttttccggccgctcctcccggatcagggcattgtcgcccagggtgcgggccacggggtagaaatcgtcgcaggaggtggattgttccgccagctttttggcccagcgcagattggcgtcgctgcgcccacccggcagcagaagcgcggcatattccaccatcactttcggcgtgccgccgcgcacggtgtcgcggtcacgcagcaaatacaggcgcacatcttccggggtttccacgatgcgcgacaccttgccaaccgccagcccgcgcacggcggcagcggtggccgggggcagggcccggatatcgacccagttcatctcgccgccggtattgcgcgacaggctgatggacatgcgccgggcggcatcggcaaacccggctgcatcgaggctgcgcagccgttcggcccgtgcttttgaggctttgcgcgacgcggggtccggcgcgggcagcacgatctcggagagcaacactttcacccccggttccggctccgcctccgccatcgcggcatcaatatcggcctgcgaaatcgacaccgtggggatcaattcagcgcgcacatattcgcgccagatcaccccggcggagatgaagtcgcggaaggtttgcgggctgatgcccctctgggcgaggtattcctgcaactgctccagactgagcgtgccgcgcgcggcaaattcttccatcccggcaacaatctgttcctcggtcgccgtcaccccggcctgacgcgccagacgcagctggatcaattcgttttgcaactgctccgaggcgaggctgcgcacatctccgggcgcgccgagcgcggtcaggaaggcgattctttccttcatgtcgaagcgcgtgatcacctcattgtcgatgcggatcaccggatcgaacaggttctgcgcgctgacaggcgcggccagccccagcccggccagcaaggcgactgcccctaacttcttggaatggttcagaatttccgcgaacatgcccatgctcatatcctcattgctccgggcttcgcggctcagacgcgatccatcccgcgccccagaccccggccagcccccggtttggcgctacaataggccggttttgcgccttctgcgagccatattttgcccgcgtcctttttacgcgccccaagagccataatgggggactggtaatggtgggcggcggggggtaggtctgaggggatgaatacggcccgaaacggggccgaaaattatgaacagatctggagagaagacgcatgaccgacgtggtgaaggcacaattcgaggcgctggatattgaggttctggccaaggcgacgggccgggtggtggtttttgccgaaatgggcggggggatggataaatccgccaagcgggtgaacaagctgacccgcggcgcgctggcccggctgatcgagggcgaggcgtttgagaaggccaaggcgggcgaggcgctggagctgggctacccgaccggcatggcggcggaggcggtgcaggtgatcaaatatgaccgccgccacgacgcggaagcggcccgcaagatcggtgcgcgcattggcgaaaaggcgctcggcaaagaggtgctggtgatggcgggcaatctgcgccatgtcgaagaggtcgccctcggcgccatgctgcgggcctattccttcgtcgatcaccgcaccggcgaggcgggcgaggtcaagatcggcgcgctcacggtgatggtggccaggccggacgtggtgaaggcgaaagcggcggcgatttcggccattgcggagggggtgttcttcacccgcgatctggttaacgagccgtccaacgtgctgaacaccaccgagttcgccgaccgcctcaaggcgctgtccaaactggggctcaaggttgaggtgctggaggaagcggagttggagaaactcggcatgaaggcgctgctcggcgttgggcaaggctcgcgtgcgccgtcgaaagttgtggttattcaacaccttggcggcgaaaaagatgcggctccgctggcgctggtcggcaagggcgtggtgttcgataccggcggcatcagcctgaaaccggcggcgggcatggaagatatggtaatggatatgggcggcgcgggcaccgttgcgggcgtgatgaaaacgctggcgctgcggggggccagggccaatgtcgtggcgcttgtgggcatcgtcgagaacatgcccgatggcaacgcgcagcgccccggcgatgttgtgacctcgatgaagggcgacacgattgaggtgatcaataccgatgccgaggggcgcctcgtgctgtgcgacgtgatgtggtatgcgcaggagcgtttcaaacccgccgcgatgatcgacatggcaaccctgaccggcgcgatcctcatcgctttgggccacgaaaacaccggcgtgttctccaatgatgacgctttttgccgcgatttcctgaaggcagcggaggcggagcgcgagggggcgtggcggatgccgttgtcgcccgtctatgacaaggagctgaaaagccgggtggcggatatgaaaaacgttggcgcccgcacggccgggtcgatcacggcggcgcagttcctgcaacgcttcgtcaaggacggcaccccctggatccacctcgacatcgccggcaccgcttttggcgccaaggccagcgactacgcccccgcaggcgcgaccggctggggcgtgcgcgcgctcaaccggctggtggccgacaattacgaaacggagtaatggccgcgtatttttaccatatgacccgcgccccgctggaaactaccctgccggttctgctcggcaaggcgcgcggggcggggtggaaggtgctggtgcgaccgggacttgcggagcgggcgggctggctcgacgatctcctctggcgcgtgccgccggaggggtttttgccacacgcgctttgcggcgcgccggacgcggccgacgagccggtgctgatcgggcaggaggcgcaaaacggcgccgaatgtctggtctcggtcgacggggcggagatcacggcggcggaagcggcggcggcgacgcgggtgatggtgctgtttgacggcaacgacccggcagcggtggaacgcgcccgcgaccaatggcgcgcgctgaccggggcggggatcgcggcgcaatactggtcgcaggaaagcgggcgctgggagatgaaggcggagcgttgaagcggtttctgctctaacgccgcaacaccagcacgccgcgctcgaaggacaccgaagaaaagcgctgcaaataggtcatgcccagcagcgagccatccatctcgccgccattcacataggccacgacgcggctgtcttcaaaaccgccgagggtgaaactgtcgagccgcacacgcgcggtctgcacctccccgttggcggtttgcgcaagcccgatgaaggccagttcggacgggttcagccccacgcgcaccgcatcttcgcgcgtcaaaacgatgttcgaggcgccggtatcgaccagaaattccaccggctcgccattgacccgcgcgacgaggtggtaatgcccgtccggcccgaccggcacttccagcgtgtcttcggacaccatgctttgccggggcatcagctggcgtgaaatgtcgccccaaagcccgtaaactgccaccagcccgaggatgataatcagccagatcgacgcctgtttcgccacctgcccaaggctctggcgcccctcgacaaagaaatacccgcccacggcggcgagcagcaatatgaggtaaaccagattggcaatgtcaaaggtgtccatgggcataatatgggggcaatgggctgtggcgggaagccctgtccgggatttttgttttctagggatactgggaacaataattgcacaaatcgaacattttaaccgcatattgcgctaaagaaacgttattaagttgcactttttcaacattttacgcaaagcgcggcgcggtccgggccttacccctctgccgcctcaagtcgctcgctcgccgccatccacagcgcctccgccttgtccagcccctccatcacctcggcatatttcttctgccagacctccagatccccgatccggtcgtcctcgtagagcgccgggtcggccagtttggcggcgagtttttcgcgcatctcctcgatcttttccacccgcgcttcgcatttgcggacttcggcgcgcagggccagcagggtatcgcggtcggcgcgtttctgttcgcgggtttttgtcttttctttcaggggcttgggcttttcatcccccgctagcaacttcgcccggtaggcttccagatcgccttcaaacggcgcgacccgccccccttcgaccagccaaagccggtccgccacgaggcttaacaggtgcatgtcgtgcgacaccagcaccacggcgccggaataggcggtcagcgcttcaaccagcgcctcgcggctttcgatgtcgaggtggttggtcggctcgtcgaggatcaggagatgcggcgcgtcgatggtggcgatcagcagggtcagccgcgccttttgcccgcccgacagcgcccccaccagcgtcaccgcctgatccgcgttcaggccgaaacccgacaggcgggcgcggtgctgggccggggtttccgttgggcgcaggcggcgcaggtggtcgagcggggtttcgtccgcgtgcagcacatccatctgatgctgggcgaaatagccgatgcgtagcttggaagacatggtgaaacggccggtttcgcttttgagttccccggcaatcagcttggagagcgtcgatttgccctcgccgttcttgcctaaaagcgcaatgcggtcgtcctgatcaatgcgcaggttgagccgggtcagaaccggcgccccgccgtaacctacggaggcgccttccatattcacgatgggcggcgataattcctccggctccgggaagctgaaacggcgcagggcggcttcctgtggcaaggtggtgaatttcagccgctcgatcattttcagccgcgattgcgcctgttttgccttggtcgccttgtaacggaaacggtcgacgaagctttgcagatgttcgcgccgggcctccgccttgcggttctccgcctgcgccaccgccatccgcgcggcgcgggtttcggcgaaagtgtcgtaggggccggaataataggtcagtttgcggtcttcgaggtgcaaaatcccggtcacggcgcggttgagcaggccgcgatcatggctgacgatgatcaccgtatgggggtatttggcgaggtaattttccagccacagcgccccttcgaggtcgagatagttggtcggttcgtcgagcagcagcaggtcgggggcggaaaacagcaccgccgcgagggccacgcgcatgcgccagccgccggagaaatcggcgcaggggcgcgcttgtgcgtcgtgatcaaagcccagccccttgaggattgaggcggcgcgggcctcggcggaccaggcgtcgatgtcgctcaggcgggtctggatctcggcgatgcgggcggggtcggtggcggtttcggcctcttccagcagcgccgcgcgctccgtatccgccgccagtaccgtgtcgatcaggctcacatccgagccgggcacttcctgcgccacgccgccgatccgtgcgcctttgggcagacgaatatcgcccccttccagcgtccactcgccgcgaataaggcgaaacagggtggtcttgccggtgccgttgcgcccgacgaggccaaccttgtgcccctccgggatggtggcggatgcgccttccagcagcgggcggccttcgatggcgaagctgatattatctatgacgagcatggggcggggatgcctgacggcgcggcatttggcaaggggatgcgggggcgctgcggggcgatttgggctttctttgcccgcgcgcccatgttacggcgcgggcagaatttggcgggcggccgctcgccgggcaaatccgagaccaacgtaagaccagtgaggacatcatggccattcaacgcaccttttccatcatcaaacccgacgccaccaagcgcaacctgaccggcgccatcaacgccaagatcgaagccgctggcctgcgcatcgtggcacaaaagcgcatccagctgacgcagaaacaggcggagaccttctacggcgtgcataaagagcgcccgttcttcggcgagttggtcgaattcatgatctccgagccgatcgtggcgcaggtgctggaaggtgaaaacgccatcgccgcttaccgcgaagtgatgggcgcgaccaacccggcggaagccgccgaaggcaccatccgcaaggaattcgcgcagtcggtcggggaaaactcggtccacggctccgacgccccggaaaccgctgctgaagaaatcgcctatttcttctccggtctggaactggtgggttaagcggtttctgagaccggatcgaccgaaatcgccgcccgcgcccagtcggcgtgggcggtttgcgtttgcagatgggcgcgcagcagggcgacgttgcgggtgttggcattccacgcgatgtcgaacacatcgcccagccccggcacaagaccgaccagcacatccaccgccagattgagcgccatccgatacagcaaacgccgcgacgcgcccagatcataggcatgtttcatgatataggcgccggggatcagcgaggcaaaatcccccaccaccggcaccagccccatcaccgcatccagcccgaaccgcaggtccgtgcccggaatggggatcagcctttccagccgccacgcgagcttttcaagatgctgcaggcgggcctcaatgttaacgtccattacatggatatgggggccgggcggagaaaaacaagcgatgcgtcctgtccgctccccgcattcccgcgcacctgcccgccgccaagcgggccgggcagtcaatcgtccgatttgcgaaacagggtaaaataggccagtggggcgcagatgccgatggtcatgatcacgaacaggacgctggtgatgatcggcaggtcggacgggcggccggtcagagcgaggtagcccttgaacacggcgatttccgcgaaggcgatggcgacggcaaggagcagggaatttttccagcggcggctcacgggcccgttctccgttacggctgatagggcagggaggagtggtgcaggacgatgcgcagcacaccgttcgcgtcccgtttatagccgaaactcttgtctgcctgcgtgactttgccgtttttgtcggtcaggatgccccggcccatccacatcgccacgtcgccttcgataaagctcgcggcggtgacaaattccgccttgcgccagctcagaagggcaaagccgccatcgcgcggataggtcggatcatgggcgatgaaataggagagcgcgccgtcgcgggtcgggcggaaggtctggtcgccgctggcgagggtcggcttgaacagaaccgggccgtgcccgtaaccataagccgcatccagcacctgctccgccgccgggcgggctgcgtcgatgccgccgtcgtcaaaggctttggcgatggtgatgaggccttcgccccaggcctgacgggctgcgatcagatcgttttcggtaatcggcatggtgttcctccctttattgcggcgcagtatgcgcagcgtgggggggcgggtaaagccgggatgccgaaaatcccggcggcagcgcgacttacgtcccgtcacgccgccggagggataacaggggcttattgccgctgcacatatccgcgcagtttgcccgggcgggtcacgccgtcgaccgtgatcgtcatcccggaatcggtgcggccattgagggcgataaacttgccatcctgcccggaaaaggcggtatattcggcctgaccgccgaactgcaccaccttgccgtcgtgatccagccgcccgttgatgctggtggggaaaaacgacgcgccttcgtccggggtgaagttggaaagcagggtgatcgagccatcaatcggcgtgaagcgggcgtaaaagtcttccagctcctcgtcggtgagctgcccgcgcaacgcatcgcgcagttcctgttccgtggttggcgcgccctgaaagttggtcatttcccccgtcagggtgccgccattgtcgtcgaaacgggcgagtatgtgcaggtcggcggagccggcaaacattttctgggaggagggcgcgtatcggatgccgccggtgccggcatattccgcgctgccggtcttgggcagttcggtctcttcgatccagacatcgtcgagatgccggccatagaggtgatagcgctcaaactgccgctcggcggcgttggcgtattttgacccgccggatcccccgctacagccggtcagcgccagcgcggccagccccagtgccagcgcgcttcgggagaggagtttctgttcgacgttacgcatttttccctccgtatgccgcgatccggctttgtcccaagacccgcggcggatacctttcagagccggggtcagtgtaggcgataatgcggtggagggggaagaaaaaaatgcggttatgaagtcccgttgaaagacaggtccgtgctggcacttgcgtgtgggggctgtttagggcaggcggcgaccggggccaccatctgctaggtcgggcgcgtcggaccgggtcagtccttttgcaggtaactgctaaatgagccggtaaccgctgcgccgtcttcgctgacggtcatgcctcggacgttgctgccgtcgatgatgatatattggtgctcgccgccaataaagttgctaccagaggcaacgccgccgaccttcagcatatgcccgtcataggtcagttcgccatccagcgcggtgttgaaatcttgggcattcacatcaatgccggaaaaatcggcattcatggtgatttgcccctgaacgggacgatacccgccatagaattcggcggcctcagcggcgggcagggtgccgttcgatgcgtgatcaagttcatcttgcatgacttcccggccgtagaaattgtttgccgcgccggtgagcgtgccgcccgttgcggtgaaggtggcggccaggtgcgtatcggcgctgagattgtgcagctttcccgccggatcgacatagctcagtcctcccgcgccggaataggacgcactgccgctgttgggcaggttcaccatttcgtcccaaacatcatctgcaccggctgccaaccgttcatgggtccggaactgctgttcgaccacttcgccgtaattcgcgccggacatgcagccggacagggcgagggcggcgccgatgagagcggtttgggcaagtgagcgcatgatgtgttcctttacgctggggggcggcttcggcctcgggggtgtctgcgcacgataccaatcgggcggaatatgccaagagaatatctgggttttttccgaggagttttgaggcgttaacaaaaaacacgggccgtggcccgtgtttcaatgtggtgcaatcgaatgcttgttaacgactcgaccgcgggttttgaactgtgggcaatataccggatattttccgcaagtcgagcgcgatctttgcgggtggcatctcgcgtaaagataatgttgcgttgggccggctgccggggcaaagtcccgggcaaaatgcggccagggagggaacggatgggaacgcggttggggttggatattggcacgaattccatcgggtggtggctttacgcgaccgatggcggggagattgccggggttctggatgggggcgtgcggattttctccgatgggcgtgatccgaagagcaaggcgtcgctggcggtggaccggcggatggcgcgggggatgcggcggcggcgggatcgttacctgcgccgccgggcggcgttgatgaagcggatggcggatgcggggctgatgccggcggacccgcaggcggcgaaggcgctggagctgctcgatccgtatgaattgcgtgcgcgggggctggatgaggcgttgccgctaccgcatttcggccgggcgctgtttcacctcaaccagcggcgcggcttcaagtccaaccgcaagaccgaccggggtgacaatgaaagcggcaagatcaaggatgcaacacgtcgacttgatcaagaaatggcagtggcgattaaggatgaaagcaagcgtactctgggggctttcctgcatatgcgcaggcaaaaaacacctgagaaacctttaactgaacctaaggaaaacaaggatcatactcgtaaagactatcggcgcacgccttcggtgcgcacacgcatgagtgtggcggtgcgcggcgggccggatgcgaaggccgaggaaggctatgatttctaccccgaccgccgccacctgtcggaagagttcgacaagctctgggcggtgcaggcccggtttcaccccgaggttctgaccgacgatctgcgcgacgaaatccgtctgatcattttccaccagcgccgcctgaaggtgccgaaggtggggttgtgtctgttcaccgaggaagaacgcctgcccgccgcccatccgctgaaccagcggcgtattctgtatgagaccgtcaacgctctgcgcgtgacggcccccggcgaggcggtgcgcgcattgacccgcgaggagcgcgatcagatcattcatgcgctcgacaacaggaaacacaccaagtcgctgtcgggcatggcgctgaaactcaaggcgttgggcaagacgatcgggctgcggtcggatcagcattttactctggagaccgccaaccgcgacagcattgcctgtgatccggtgcgcgccagcctgtcggacccgcgccggttcgggccgggctggtcggcgctggatgatagggagcaatggcgcgttgttcggcgtgttcgaaatgtacaaggtgagcgatgcgcacaagtggttgtcgattggctgatccgccagcatggcctgcctcaaagtaatgcgtgggaggttctgaatgcaccgctgccggagggctatggccggttgggccggaccgccacgacccgcattctggcggcgctggaggcggaggtgatcccctatagtgcggcggtggcgcgctgcggctggcaccattcggacgagcgcacgggcgaggtgctgaccgaactgccgtattatggcaaaatccttgagcggcatgttattcccggcacctatgaggagaaggacgacgacattacccgctatggccgcatcaccaacccgacggtgcatatcgggctgaaccagttgcgccgtctggtgaaccggatcatcacggtgcatggcaggccggacgagatcgtggtcgaactggcgcgcgatttgaagcgttcggaggaccagaagcgcgagatgcagcgcgagatccgggagaataccaaggaggcgatccggcgcggcgagaagcttgatgagttgggcgttcgcaatacgggcgagaaccggatggttttgcggctgtgggaggatctgaacccggaggattgtctgaagcgcttttgcccttattcggggcagcggatcagcgcgtcgatgctgtttgacggttcctgcgacgtcgatcacatcctgccctattcgcgcacgcttgatgacagtttcgccaaccggaccctgtgtctgaaggaatataaccggcaaaagtccaataagacgccgtgggaggtctggggggaaacggcgcaatgggcgacgattgaggccaatctgaagaacctgccaaagaacaaggcgtggcgctttgcgccggacgcgatggagaagtttgagggcgagcgcgattttgaggcgcgggcgctgaaggatacgcaatacctgtcgcgcatcgcccgcacctatctgagcgcgctttatgacggggcggatggcaaatcgcatgtctgggtggtgccggggcggctgaccgaaatgctgcgccgccattgggggctgaacgccctgttgtcggaaggcaaggcagcgaacaaggccaagaaccgcaccgaccaccggcatcacgccattgacgccgcggtcatcgccgccaccgaccgcagcctgatccagcggatcagcaagatggccaagcgcgatgagctggccggggcggaggaggtggcgcgcgcggtgccggcgccctgggaggatttccgcgatgacatcgccgcccagcttgcccgcattaccgtcagccaccgcgccgatcatggccgcatcgacccgcaggcccgcaagtccgggcgggacagcaccagttgtgcgctgcatcaggaaacggcctatggcctgaccggggaaaccgatccacgcggggtgccgctggtcgtgacccgcaagccgctgagcagcctgacccccgccctgattgcccgcgaggctcccggcaaaggggggatgatccgggatgcggagctgcggcgcaggctggcggttgcgaccaagggcaaagagggcaaggcttttgaagcggccatacaggattttgtcgccaaaccgggagcgtatcagggcacgcggcatgtgcgggtggtggaaccgattggggtggcgccgatccataacgggaaggcgaaaccggccaagtcctatgcgacttcgggcaaccatcgctatgaggtttggagaatgcccgacgggaagatcgttgactgggtcgtgccgaatttttacgcgcataaagccgacctgccaacggatgcccgtccggccaccccggccacctgcctgcgtccgcacccggccgcgcgtctgctgctgaagctgcaaaagaacgatatggtccggttgcgcgatgcgtctggggcgttggtcgtggcgacggttgaaaagttctccagcacggggattatcgaaatggtcccccattccgaggccaatgccgcggaccgttacagcaaggacaaatccgacaatgtctacatccgaaaaacggcaaacacgctgctgaaagcggaggcccggcgggtctatgtcgatgaaatgggccgggtgcgcgatccggggaaggcggggtagggcgcggctttccttcctgaaaccagcccgatttggggaaatgccttgcgcgtattacactcgcaccgggaggggtgattcgccttgggcgcgagggtttggtgttggatcagatcattgatatcgccacggatggacggcatctgtcccggcaacgcggcttcctgattgtctccgaagaggggcatgaaatcggacgcacgccgcttgatcaggtggcggcggtgattgtgcatgcgcatggcacgacctggtcgacctcgctgctggtggaactggcggaacgcggcgcgccggtggtgttgtgcgccgccaaccacgccccccgctcggtgctgatgccgctggaagggcaccacttgcagggcgcccggatgcgcgcccagtggcaggcgaaaacaccgctgatcaaacaggcgtggaagcaggttgtagcggccaaactgcggatgcaggcggcggcgctggaggcggtcggggaagcgcccgcgccggtgcgcatgatgatccgcaagatcacctcgggcgacagcaccaacatggaggcccaggccgcgcgctactactggcctcgcctgatgggggaaacctttcggcgcgatgcgaccgccggggatgaaaacgccctgctcaattacggctataccgtcctgcgcgccgcgaccgcgcgggcggtggtcgccgccggtctgcacccgaccatcggcctgtttcatgcccatcgcggcaatgctttcgcgctggccgatgacctgatggagccgttccgtccgctggtcgacctgagcgtgcgccatatcgcagcgacccgcggggcggcggttgacccggaggcgaaacaggcgctggccgggctgatcgccaccgatctgccgctgggcgacggcgtcacgccggtttcggtggcactgatgaaactggccacctcgctgggtcagagcttcgagaccggcaaacttgccctcgcgctgcccgacccgcccgatccgctggcgcttgcggggctgggccaatgaatgtgccggtgacaaaattatcggggtatcgtctgatgtggattttggtgatgttcgacctgccgacggatacgaaaaaacagcgcaaggatgcgggcacgtttcgcaatttcctgctcgacgagggctttgagcgcagccagttttcggtctatgcccgcttcgtcaacggcaaggaggcctttgcaacccgcgttaaccgtattgagcgtaacctacccgccgcaggcgacgtgcaaatcctcaacttcactgaccggcaatatcgtgatattgtgcatttctcggatcagggtcggcgcaaggcgcgggaaaatccgaaacaactggtgcttttctaaggtgattcgcgatggaattttacaatagaccccggctagttccttgtattttcaaggtgttagcgcgggatctattgtaacagttcaaaacccgaggtccagccgcaacaacctagggggcgctaacgcacccccgacattgtaacagttcaaaacccgaggtccagccgcaactcccggcgcatggtgctaaaagcaaagtcaattgtaacagttcaaaacccgaggtccagccgcaaccggccgaggagcgcgcagtttagcgcgctgatccggcgactgttcgtcgtaaaatggaagcggcgggtttttcatccacttaacgtaacaagtgttggcgcgccggtgggtatagttccagttctgtcttcggggcctgccccagcggcgactggtcttgttgcatctgttgattattcgccgattggctctgttttgcagcaaaatttcgcctctgctttggatcagtttgtcgagcttcaggccctcgattttcagcgttcgaagcttcagaggcgtaatcagaagttgactgaggcgcttgcgcgtgaaactttgaacccatcagttgcggggatttatggtgatggttcgtctgctggtggttctgatccttctgtgtcttttggcagcggtcgcggcaaacgcttagttcgcggggttgacggtcgttcggttattgtttctgatgccgaacctatgccgcttttttgcggaatatcttgatatgtctggtaatgtttattacggcgttaaccctaatgtcccggatgctaaatagttagtttctcctgcgagtatcgagttggttgatacgttatctggtgatcctaaagttggtggtaatttcgttggcaattctcttcggtatattgccaagggtggcgtggtgggtcaggcatatcgttatttgacagatacgtcatttgatcctcctccttctcagttttattctcctccacctcttccgttgcttccgtcaactcgtcttaatccttatggcgtgatcaagttcggtccttcgacgcttgaccaatatgtaggtctgcgtaaataatccagcaaaatcaataacctaaagaagagtcttaatatgagtctgtctcgtttccagcagccgcgttcgcggcgtcatgaaaaccgacatattgtcggcaagtttcgcggtggtaagttgcagccggtgcatatgcttccggtgcgtggctctgagagtggttttgtcaccaatcagattgcgttcaaggtggacccgcttgcgggccagcttatgagtccggcatttaagaatcctgacgcggattatagcggctctgccgatgttgttcgtgcgaagctcgaaactggcgcgccgctgtttgatcttgagccggaaaacttgatcagcaagttgtgtcgcatcaatccgcgccgcattgatggccggaagtatgctagtgagatggtccgtcttgcacataactgcgcggtcaatcacttgcgccgcgccaagtatgtaaacgcggggtaagattttaacactacaaaacccaacgttcaggcacagcaatgaaggtgaacaggaaggggccttacttgaatatggctataagcactaatgcaatcagtagtccaagtatcgagtgcctgctacgccagaggtatgatcgctggattctcctctcccaatctatcgctggtggcgttttgattgtgatttctgacagcctcgcgggttcgatcgctcctgcgggcataccgacatcgattgagtctgggtaagccttgaacgcttcggtgaatatggttgcggttcccttcaaggggagggtcgggaattttccgatatggtcaaaaagcgagttaaactcatgcttgccaaggagcaggaaggcgcttgtcccatcccaatctgcaaaaaatcggcccgactccccagctaatacgccatcctcgggaagccctgtcgggtctaaacatgcgaattccaagtttaacgtagacagttgatacttcccgccaatgggtaagttctcatggtttggaaaaatgtcgacattacatcgggtgatggtttcataattagggagttctttattttctttcgcattagagaacacctttatcgaatgtggactcatgaggtttgcgtcgaagaaaccgccagtagcgtgaatagatcgggttattccgcttgctccgggggtgttgtcgttccagtcgatattctctctgtcgctcaaagatattcgattattttctgaatcccagctcacgcggcagcctaaccggatgttttcaaggctaagaataatttgctgcggcatcttgctaatctcttcacccgtttccgtatctttgaagagacggtccgatattttttcccatttgggagcgtttttgaaaatggtcataaattcctcgcatcacggtgatgggtggataggagcaaaaaaagcaccaataaacaacagagggcgtgaaatgtatgaaaacaaatgacatttgagaaagtgttgaaaacagtgcgtgacgtcgggggggcaacgcggtggcggttgtcttttggctataagcctttgattttacgccgatgcttcgtggattttgagatcaaaatccactcccgtcagctatacccagccaatgcgggccagcttgtgagggaacatcctcatgctaccgggcgcgccagccaaaacaccccatcacaagccgacggattccgaaagataaacgacccatggacaggctcttgcagagcgtctgatcccacggcgcagaacggcgtcgggttattgcttttcgccgatcgcgctaaggtagacgtagcgctgcacgaccccgttgcgggttatgacgaagggctcagcgctatcgtcgctcgaggaccggagtgtgatatttgcgtcatcttctgtcgccgcaaatccgccgctgagactgccgccgacaaccacattgttatccccgtccagtaattttccatcaatggaaaggcccgtaaaataagggtaatccgtcgatagtctcttgagtcggaagtgcgggctgtcgctgctgatccgcaaagtgccatcgacttcccggttaaactttctgatcagttgcacccgctcttcatcggtcatgtcggcgtagtcatagacggaccacaggggcgcgttctcctccatggtcaggccaatggcggagtagagattgtcgatcttgccgtggatcgcagtatcgtagccatcgaagtcgacttcgaggttcatgtctccgatcatcgtgacgtcccggaaatactgccacttcggggagtcatacgccaccacggcgctgccggaataggttgcggacccgcttgttggcaggggaccgtctatgagatccccagatatcacctcgtttcgggccaccaaattatgcccgcgctggtcgagaagggtttcggccgaaagtgggtgcggtgtcccgcccgcgccgccgccgccaccacccggcgttccaccggcgcacccggccagaatgaaggctgcaattaccaggctgatccgtttcatctttacactcccagagttgggcatttaaaggataatctactgaactcagggaaaatttcaagcattacccgacctccgcctgcgtcgccttgtgccccccgccgcgccgccgaagctgggttcgggcagggggatggtggcgcgcaggagggggaaggggtcggcggcgttgggcagggcggaggcgttgacgaaatgctcctgaaagcgcggttcgacggcggtttcgatcttggtgatctgccgggcgaggcgttcaatttcgccgcgcgcggcgcggttgagcagggcgatgcgcgcgccggtgccggcggcattgcctgcgctcgtcactttctccagcgggcaatccgggatcatgcccagcaccatcgcgtgtttgggcgagatatgcgccccgaacgcgcccgccagcaccactttatccacctgttccaccccgcgctgatccatcaacagccgcgcgccggcgtaaagcgcggccttggccatctgaatggcgcgcacgtcgtggttggtgacggtgatctgcggcgtgtcgtcggtgccgggccagagttgataggcataggtgcgcccgtcgggcaggatatgcggcgagccggtggcttcgggggagccgatcaggccggaggcgtcgagcagcccgctcatgcgcatttccgccaccacctcgatgatgccggagccgcaaatgccggtcaggccggtgcgggccagcccctcggcaaagccttcctcgtcggaccatgcctcgcagccgatgatgcgaaagcgtggcgcgccactttccgggtcgatctgcacccgctcgatggcaccgggggcggcgcgctggccggaggagatttgcgcgccctcaaaggccgggccggtgggcgaggaacaggcgagaacgccggtgcggtcgcccagcaggatttccgcgttggtgcccacatcgaccgtcagcaccagctcgtcggacttgtgcggcgcctccgagagcgccaccgccgccgcatccgcgcccacatggccggagatcagcggcagcacatagacccgcgcccccgtggccatcggcaggcccagatcgcgggccagaagccgctccgccgcgtcagaggccagcgcgaagggcgcctggcccaactcatagggatcgaggcccagaaacaggtggtgcatgaccgggttcatcacgaaaaccgcttccagaacaaggtcttgcgccacgcctgcctcggcgcgcagcgtgtcgatcagcgcgccgatcccctcgcgcaccgcctgcgtcatctccgccgcgccgccctcgttcagcatggcgtatgaaacccggctcatcaggtcttcgccgtagcggatctgcgggttcatcaggccggaagaggcgcgcacctcgccgctttccagatcgaccagatgcccggcgatggtggtcgagccgatgtcgatggcgaggccgaacagcccctcccgatagcccggccacagcgcggcaatgaccggcgcgcccccatcttcatggatcgccgccgtgacctgccaatcccccgcccgcaggcatttttgcaagcccggcaacagagccggatcgagcgtcagcccccgcgcgccggtctgtgcctccagcgccgcaatcagccgctcgcggtcgcccatcgccacttccagcgtgggcttttccacttcgacatagacccgccacagcgccgaatccagcgtgatatcgcgcgcttcggcttccttacggatcacctgtttatgcacctgactttccggcggcacgtcaatgaccatatcgccccggatcaccgcctgacagcccagccgacgcccctttttcagcccgcgccgatcgtcatagcggcgttccacctcgtttagcggctccagcgccgtttcgcgcgcggtgatgccgtgtttcgggaagtcgccaaagcccggcgcgcattggcatttgccgcagaccccgcgcccgccacaggtcgctgcaaggtcaacgcccaaagcccgcgccgcatccagcacggaactgcccgtcgccacccggccccggcggccggaaggggtgaatatgaccaacgcgtcttctgtcatggcgccccttttagccccgcactttgccgcgcaacaggggcggcgttttcaagatcaatatgagacagatcggggttcaggtggaaaacttagatggaaaatgaggtgccgcagccgcaggaggtggtggcgttggggttgtcgatggtgaaacgcgcgccgatcagctcttcggtgaaatcgatggtggcgcccgcgaggaagggcagggagacctcgtcgatcaccaccgtttcccccgcttccgtcagccgcaaatcgtcgtcactcggcgtgtctagcgtgatttcataggtgaagcccgagcagccgcccccctccaccgctacgcgcagcgctttgcccgccgccgccgcgccgatctcgcccagccgctcgaaagcgcgggaagtgactttggggggcaggttgagttccatgcggtttccttagggtttccttttcggtgctttttcaaatatatgcgggcttgggccgggcgacaagcgtctggcggcaagataagccgggaggcgggaatgttggcgaaatatgcgtgtgatccggcggcgagccgggggcggttatacaatgagccggaggggtttcgcagcccgtttcagcgcgaccgcgaccgcatcattcattcctccgccttccgccgcctcaagcacaagacgcaggttttcgtcgagcatgagggggattatttccgcacccgcctgacccattcgatcgaggtggcgcaggtggcgcggacgctggccggggcgctggggctggacgggcacctgacggaggcggtggcactggcgcatgatctgggccacacgccgtttggccatacgggagaggacgcgcttgatgcgctgatgcagccctatggcggctttgaccacaacgcgcaagcccttcgaatcgttgcgggtttggagcgtcactatgccgaatgggacgggttgaacctgacttgggaaagccttgagggcatcgccaagcataacggtccggtgacgggggagctgcccgccgcgctggccaattacaacgcccgccacgacctcgaactggcgacacatgcctcggcggaagcgcaggtcgcggccctgtccgacgacatcgcctacaacaaccacgacctcgatgacggcctgcgcgcggggctgttcacggtggcggaaatctgtgaattgccgatcatcggcgcctgttttcacgaggtcgatcagcgctatccggggctggacgcgcggcggcggcgctatgagggcttgcggcgggtgtttggtgtcatggtggaggacgttttagcgcgctcacgggcgattctggcgcagttggacccggcggatgcggcggcggtgcgctatgcgggacagccggtgatccgcttttccgacgcgctctgggccgacctgaaacagatccgcgccttccttttcgcccgcatgtatcgcgcgccctcggtggtcgagatgcgcgcgaaatgcaccggggtgatcgaagacctcttccccgctttcatggccgatccgagtctgttaccgcccgagtggcgcgaggacgttgcgcgggcggcggatgagcgggaactggcgcgcatcgtggccgattacatcgccggcatgaccgaccgcttcgccctctcggtgcatcgcgacttattcgcctgaacgcccccgccagagccgaaacgccgcccagaggatcgccccggttgtcgccagtgccagaaggctctgggcgctggtgaaggcggtttcaaagccgcgcgggaagggccaccaaccggcgctgcggatcgtgaaggccagattggtggtgccgtggcctgcgttgcgcagcagcgggaaaagcgtcagcagcgcataggcggcggcgagcagggcaatgccgatgctgaaccgggcgctgccaaaggcgtttggtgcataggtcagcccgaccatcagcggcacgaggaaaacatagccgccgccgatgctgcctgcggtattgcccaacgcatagaggatgttgtcggcgttgagcgttgtgagtgcctgcacgatcaccagcgcggcgatcagggcggcgaggggccattcggggccgcgcggatcggcgcgcatggcggagaagggggcgacgagaaccagcaggcccagcaggacggtgccggtgatcagcgcccacggcgcaagcggggtgagcagaaacagcagcgccagtgccgggccgagtgccgcctgcgccggacccatgagggcgcgcgggccgggagcggtggccagtgcaatggccagtgcggccagcggggcttgggcgaagaactgcatcaggccgggatagtggtcgaaaaagtcgttgaagaaatagtaaaccggcgcgggagcctctgccccggccatcgtgcccagcgtcgtgacctgaaacaccaactgcacgagaggaaccagcgccaccagccacgccgccagtcgcagcccgcttgcgccgatttcgcgcgcccgcaccgcgagcgtggcgatcagggtgatgaagaagagctgaaacaggatggcgccgaagaaatacagcgcttcataaagtttgaaacgctcgaacgggtcggacatgctcagggtcggcaggttcagcaccaccgtgtcgaacagcagttttagggcgagcagcaacagggttgcggcgaagaggcggcgttttggcgtggtggtcatgtcggtttctccggttacgcgggcggttggcaggcgggttggctgcgggactggctgacctttgcgccgggatagggcggcgcggggcaggggtcaaggcgacgaattgacagggcttcgcgcgcgggcgcggcttgaccttcgtgcgcggggtggtattgcctgtcgccaggctacccgccgccagagccgcccaagatcaaaggaacccccgatgaacctgtttgccgatattcgcgcccttgtcctcgatagcctgaccgcgctgacccgtgaaggggggctgccggaggggctggactttgctaatgtcactgtggagccgccgcgcgatccggggcatggcgatatgg

SEQ ID NO: 3665 - DNA, 23363 bp, synthetic construct
  misc_feature 1..23363: note = Synthetic
  source 1..23363: mol_type = other DNA
tacttgggttatcaccagaactagaccatccaccgtaactaaaggtgtccgcacccgcaccaccagacaaggctgaacgccactgttcaacacgcaacttgtcatcaccgctgccagcaacaaaaatttcaatagaatgaagataatctttctcgccggtaccaatagacacggttccccaagtttcgccacgcaactttacatcaagtgagtccgtatagctggcatagctgacagtgtcttttcccgctcccccggccagaaagtcattgccggagcctccatccaaatgatcatcaccctcgccaccatgtagggcatcatcgcctgcaccgcccttcaggatatcattgcctgcgttacccagcaggatattgttaccgtcattgcccgttattctgtcatctccatccccaccaacgatggcctcaatattcttcaaggtatctttgtcagtaccattgacacgaacgacggaactctggccgccatcagccagcgtcacgacgatatgtccctgttcttcactatagtccatatagtcgcagcccccttggccatcgatggtgtcatggccaccactggaacagaacttgttgttaagatcattgcctgtcaggtgatcatcaaaagcgcccccagccaagtgattataatcaatgatctcagaaacctggacgccattaacaagaacaggagttggctcgttcatacccagtgttatcgttaccgggccagtggcaaagttacttttataaacagcgccttcaacaccttcattgtgaggtatagtatcctctcttacggggttatcagggggtattgcggtaaccctcgctgtatccagaatcagattttcggcggagagtgtggttacaccgttcagacgcacggagaaatcctctctcgtgtccccggacgtatcggcaaagactgttaacccagtatcatcggacttgtaccacaatgaaaaagggcgtggtgtctggtcactgaatgtcagggcttggtgtccctgcatgcccgtattggcatccagtgccgagaaatccaggcggtcatgatcggcaggtctgaagtcatggaccgtatctcgctcggcagtttctggcccggaatgggcgatatcgcgccagacaaacacatccgcaccggcaccacctgtcaggtggtctgccccgcctcttccttcaaggaggtcattaccccgtccaccctgcaacaggttgttcccatcgttgccgcgcaggatatcgtgaccgttcccaccctctgcattctcgatatgggtgtcgtaggcaatacctaggattccgctgtccttgtcccaagctgccggatcggatttggtatcaacgccgccaaagaacgacagggtgcctggtgtcaggtcaatgttcgcagacgtgtcccgtccgctccagctgaccgtatcattgccgcccgcatcccagatggtttcataaacataggtcttgccggcaaagtcataccggttgtctccggtacgcgttgtcatgttcttcccgtacaggtactgcaacgcggccatgtcattgagcatgtaagtcagcggcgtggacttgaagccgccagtatcttcgccaccgatcatgggcttgtatgacatgaccgagtaagctacagagtcgtactcctgtgtcacaggaaagttgtctttatcgatttcgctttcatcatgcgtatgcttcagccccaaggtgtggccgatttcgtgcatggcagtcagatgtaactggcttcccggtgatccatctgttctgacagtattgtaccaaggattaaaccagactgagccagctatatcattggtgtctggaaattcggcataagcaactccatccagaagagcggcctcatccatggttttgctggcaccgatcaaaattcgtccaggctccccgcctccctttttttccgtgaatgaaagtcgggtaaagtcttcaatttgtttgaatattccggcaatcgatgaccgtagaccatctgtaataaaggagggatcgagagccaaaccctcctcccagtgtgttgttacgtgctcatattcgggagatacgaagctgtatgtcagttctaatggctttcccggaacaccgtcggaagaccagaacttcccatggagcagcgaatcaaccgcttcctgcccactggccgatacgttagatgcgctattgtatctggtaactgctgcactcataatctttttccatcataactagcgtcatccaactataccaaggcggcagtcttattctcctattaaatgcaagtagacgtttattttttctgaaatttcaatcttagattgtctaagaaaatagaaaaaagcacgctaatccgtctgggcaggcagccagcggtacagtgtagcgggtgacacgcccagactctcggcgacggtgcgggcgggcgtgccagtctccagaagcttgcgggctgccgtgatcttgccgggggtcatctttccgtggcggcctcctttacgtccggctttccgggcggcatccagtccggcgcgggttctttcggcgatcaggttgcgctccatttccgcaaggatggccatgatgtggaagaaaaaccggcctgccgggcttccggtgtctataccgtcggtcaagctgcggaagtggatgccacgggcctgaaggctgtcaaccagatgcacaagctgtttcacggtccggcccagacggtccagtttccacacaaccagcgtatcaccagtgcgcaggtaatccagcgcagaggaaaggccggggcggtcttcacggctgccactggtctggtcctcgaacacgcgctcgcaaccggctgccgacaacgcctctgtctgtagctctgtggtctggtctcgcgtcgaaacgcgggcgtagccgatcagcatgacatctccctcaaaactcatcgcaaacatcaccaagaaccgatacggtttcaagtgtggtttttgagagcgtgaaagccgcgtgccgccgtgcccggtgtctcgaaaccggatcggcttataaatggccgtttttacgacgggggaaatgttttgggtgccaaataagattacagccccagctctggatgccggaactcaagaaatcgatattcccgtacttccttgtaagcccccatatatatctattagaaactagtatgatgcctccctgatatcaaaataatttcctattgatcttttttggaaatcagaactatatcttatagccgcattgaaatcattctaatataaatgtgataagaaggtttaatagtaatttccaaattatataaataggcaatatttttgatatcaaatgttaatagtataagtttatgatctatatagggtattaaattaggtaatgaaatacttattttttgaattattgtatcaatgactgcggctgtaattttatttggtggccagaaaatcccctccgtcgtaaaaatagctttttatggttttgttccggtgcctagatgttgaaacgccacgggtttgagccgtggcatttcagtatgttggtcagatgtgttccggcaggcggtgtgatatcagaggatcaggccgtcaggcccaaaatcggtgaccccgcgcagggtgacactgaaattgttggtggccaagctcccgtctacatcggcatacagaacgacatcattatcgcttttttccatccacaccgacccttctcgcggcccatcggggctccaagtcaacttcctgattctaccatctatactgccaatagagagacgatcacctgcagcggcgtcaaaatccagaatcacgtcatgaccaggcaaatctaccaggaaatgaaatagatcggcaccatcaccacctcttagaaggtctgcgccacgtccaccatccaaggtgtcgttcccactccatccatccaggtggtcatcgccatctcctccgaccaagaggtcattgccgtcaaagccatcgaggcggtcattaccagccccgccatacagacgatcatcgccatcatggccatgcagaccatcatcgcctccacccccgtaaatggtatcgttgccagcccaacccagcaagtagtcacccccatccccaccgtctaggatatcatcgccagaccagccagacagggtattattttctgcatcgccaatcagcacatcattaccggatccaccccgaatttcctcgatattgcgcaacgtgtcctcggccacaccatccacatagaccgtggcatcctccgcaccgcgcagcgtcaccttcaccgggacttccttatcatagtaaacagctctgtcgcgcccgtccccaccatccagaatgtcattaccggccccaccatacagccagtcattaccacccccaccattgagggtgtcattgcccccccagccatccaagtggtcatcaccatccccagcggttagaatgtcatccgcctcagtcccatgcagccaatcgtgatatgacctataataagtcatggttttctttgttgttgtcatacgatcccccttggtccatatggtatcgagtacactcccgcagcccgatactcgcattatgatgctatcgcaattgtagatgccccgagaactgcaaaatataactatattatattgtattacgttccctcatttagagacagtatcagctaaaaatatgcacctctcataaataacggatcatggttttttctggtgtgtgctagacgtgaaaacgccacgggttttggcccgtggcgttttctgtgtgtttgccggaagtgttccggcgattggtgcgcctgtatggtgtcagaggatcagggcgctctggtcaagatcggtgaccccgcgcagggtgatgctgatgtcttcggtggccggattgccgtcaaggtcggcatacaggaccacgccgtcgtcgcctttctccatccataccgcccacgcctgcgggccgccttcgttccaggtcaggccggtgcccttggttgttttcatgccaaggtcgatgcggtcacccccggcggcgtcaaagtccaggatcacgtcatcaccgaaagagtccagcgtatagacaaaccggtcggcaccgccgccgccggtcagggtgtcgttgccctcaccaccggtcaggacgttggctttgtcgtcaccggtcaggatatcgtcaccaaacccgccgataatattttcgatgttgcgcagggtatcttcttcctcgccgtcgaccagaaccgtcgctgtctttgcgccggccagggtgatctccagcgagccggggcaccacgaataatcgacggtatcaatgccgtccccaccgtcgatcacgtccttgccgtaaccgccctctaggatatcgtcgccgcccttgccaagcagacggtcatcgccgtccccgccgtccaggatatcctctccctcgccaccgttcagaacatcattcccgccgtcgccgttcagggtatccgccccgccatcgccatgaaggacatcattcccggtgtggccgttcagggtatcgtcgccgccttcaccatacagacgatcgtctccgtcaccgccgtcaaggtgatcgtccatgtcacgaccatacaggcggtcgtcgccgccctggccatacaggtggttgttgcggtcattcccggtcaggacatcagccccggcaccgccccgggctttccggaccccggtccagtcggtcacatgcagctcgaccgaatctgtggccagaccggcgtcaatcatgtccccggcaatacgggtagtaaccccaaggtcatgggtggtgagactctcgaccacgcccaggtgcaggtcaacctctgccgtgtcagcatttccatcggtatcacccagcaggcgcatagatccatcttcgccgcgacgcaaccacaaggaacgagcccgcgggcccccctcgctgaaggcaaactcacccaccgccgacaggtcgatccggtcctcgcccgacacaaagtcggtgatcacatcgccccgggtttctgccgccgtggtgtacacaaaccggtcccggcccgcaccgccggtcagtctgtcggcacccgcgccgccatacaggctgtcatcgccgtcgtggccatcaagagtatcgttgtcgtcctagccgaacagggcgttcttgccggaggttccggtgaacacatcatcgccccgcccaccggtcatgctggcaatatcggcatgccggcgcatgtcggcggtcaccccgacctccgatgtgctgacatccagggcattgccccagaccggcatcaggccaagatcaaaggatttcaggctttccaccccgctcagggtcaggtccacctcggctgttttggcatcgccgtcggtatccccgcgcaggtgcaggccgttttcatcccgtgccgtccacagtgaacgggcccggggcccttcaacgctgaacacaaaatccccgacagccgacaggtcgatccggtcctcacccaccgtaaagtcggtaatcacatcgccccgggtttctgctgccgtggtgtacacaaaccggtccgccccggctccaccggtcagtcggtcgccgtctgcgccgccggtcaggctgtcctcgccgtccccgccggtcagttcgtcatggcctgcaccaccggtcaggacatcatgacccttatcacctgtcagggtatcatcgcccgcaccgccactcagggtgtcgtcgccttctgttccaaggatggtgtcgtctccggcaccgccgatggcggtatcggtcccggcaaaagcggccagatccagggtcacggctgcggtcgccgaggtcgcatccaaggtggttccccgggccacaaccgtggctccgacatcagcggcacccaggtgactggcctgtgacaacaggatgtccacctcggctgttgtggcatcaccgtcggtatccccgcgcaggcgcaggttttcaccttctgcaaccgtccacagcgcaccggcccgcgggccgtcctcgctgaacaccaaatccccggcgccggacaggtccagcgtcaccggaccggtctggttcccgctgtccagaaccccggaccgcagcgccgcctggaatccgaacgcatcggcccccacagatgtcacgccatgcagcagcatgttgatttccgcgctgtcctcatggccgtcggtgtcgcccagaagacgcaggttttccccctcaacaaccgtccacagcgcccgttcgtgggcaccgtcttcgctgaacacaaagtctccggcgccggacaggtcaatccggtcctcaccggcatcaaagtcggtgatcacgtcgcccaccgtctccgccgcagaggcaaacacaaaccggtccgcgcccgcgccgctgctcaggatatccgatcccgcaccgccagtcagggtgtcctcgccggcatcacgcttcagcgtgtcattaccttcaccgccggccagggcgtcgttgccgtccccgcccttgatggtgtcatcgccggtcccgccgtccagagtatccgtgccagccccgccatacagccggtcgtcaccgtcctcgcccagcagggtgtcagccccggcgtacccgtgcagcaggtcatccccggcaccccccttcagcgtgtcctcgccgtcatcaccggacaggcagtccacaccgtcaccaccggacaggatatcgttcccggccccgccaaacaggtggtcgtccccggcaccgccctccagcgtgtcatcacccgcacccccgtcaaggcggttgtcgtcaccatcgccggtcaggcggtccccggcggcggttccgctgatatcatgcacaccggggaagtccgccagatccgccgtaaagccggccgcatccagaatgctcgattccagtgccgccgcatccaggcgaccatcgcggataaccagggcggcattcaccccgtcgatgtcggctacatccagagacgcaacatttttcagccgcaagtccacttccgccgttgtcgcatcgccgtcggtatccccgcgcagaagaagatccttcccgtcacgcaccgtccacagcgcccccgacagcggccggtcccccagaagggcaaaacgccccacaccggacaggtcgatccggtcctccccggccttgaaatcggtgatcacatcgcccaccgtctccgccgcagagccatacacaaaacggtcatcgccggcgccgccgatcagggtatccgatcccatcccgccgttcagggtgtcgttcccggccccgccaaacaggtggtcgtccccggcaccgccgttcaggatatcgttcccggcaccgccgttcagggtgtcgtccccgtccccgccgtacagggtgttgtgcttgtcatcaccggtcagttcgtcattcccggaaccgccggtcacatgctcgatgttacgtagcgtgtcctcggccacaccgtccacatagaccgtggcatcctccgcaccccgcagcgtaaccttcaccggcttgtcggtgtttgaataagacacgtggtcccagttactgggaccgacaaaggtgtctttctggcccggggtgttggtgaagtctgtcacggggttctccctgatttatggggctggcacggccctgtggtgtgcaggccggggcgggggtttcgcagatgtgtgcgtatgacttatatcctggattgctttatgtccagcctaatgcactgattctatttgttcttgttccgcccacgccaggcacaacttttacccgtggttggagtgggcccgtcgtaaaaacggctgtttctacgacggggtgatgtacctcattctgttgttttacctttgacagttttcatgatttaaggaaaaagtattttccttaaatcatgaaggactgcgcacatgattgtcgggtttctgaatcagaagggtggtgttgggaaaacaacactcagtgtcaatgttgcggcaagtctggcgcgtcgtggtgggcgtgtcttgttgattgatgcagatccgcaaggcagcagccttgattgagcggcggctcgtgaagcggcaccgttgctttcagttgcgggtcttccacgtccaacattgcataaagagataggccagattggctatggctatgatcatgttgtgattgacgggccaccccgtgtcactgatttagcccgatctgccgttatggccgccgatgttgttctgatccctacacagccatcgccttacgacatatgggcatcagatgaggtcgtcaagcttattggcgaagcgattgtttttaaagaaaaccttaaatacgcatttgttataaatcgcaaaatatcaaatacggcaatcgggtgcgatgtgcgtgaggcgctggcagcttatccagatgttcctgtttttgaatcgtctcttacccagcgtgttatttttgctgaagccgcagctcgcggactttctgttcacgaagttgatgaatgaattgtgttctgcctatgagcggtttttgtaattacggagagggaaagtatgagcaagaaagtttcaatcgggaccaggccgacaaccaagtcagctcctgtttctgcggatgcatgggtggacagtcgggatgcagaggaaccgatgaagaggttgacaattgatatccctgcaagtttgcaccgtgccatcaaggcccaatgtgccatgcgtggcagcaagatttcagatgagttgcgtgacttacttttgcagaaatacggatagtcgtatatacgtttaatatgttttcattaattgagtgtttctgtttatgcccgcagcattcgggggagtgccctagggggcagggcaagatcagggccatgcagcttgggggtggcaggatcggctgaagactttttttgcgagccgccatggccaataaagatacggaatgcatctaggttcatgatcgggtacgacaaaaaggaaacccggggccgtagccccgggtttctatgtggtgctctgtcgagcttgttaacggctcgaccgcaatttctgagagccgaactctcatttatttgccgtgagttgtcaaggtgcaatcagtcaccttttccaggaaaatgctcccgtctgtccgatcgaatttgggacgctcgatgtttgccactttgaatcactaccttggatggcgttgtgtgttgacataaatcaagggtcgaacaattattcccccatcttttttatttgggttcgtaacatgcttcgtcttgggctcgacatcggttccacatccatcggctggtttctctatcgcataaccaacggcatgattgccgagattatagattgtggcgtgagacttttctcggatggccgggacgcgaagacaggcgtttcgtcagccgtggagcgtcgcaatgcgcgcgcgttgcggcgacggcgtgaccgatatttgcgccgtcgtgcagcgttgatgaggcgccttgctgcggccggtttgatgccggaagacccaagtcaggcgaagccgttggagttactggatccctatcgtctgcgggccgatgccctggatcgccgattggaacttaccgaactcgggcgggcgttgttccatcttaaccaacggcggggcttcaagtcgaaccgccaaacagaccgcggcaacaacgagggcggcaagatcatcgatgggtctgcgcggctggatcaggcaatgatggccgtcggagcacggacctatggcgaatttttgcacctgcgtcgcagccaggccgaagatccgcgccgtgtgccgtctgttcgcacgcggcttaccttgcggtccgttgacggtgggaaagcagaaacggggtatgacttctacccggaccggcgacacctggaggaagagttcaacaaggtctgggctgcgcaggccgcacatcacccggtgctgacagatagcctgcgccatgaagtgtttgagacaatcttctttcagcgtcccctgaaagcaccagcggtgggacggtgtctgttcttcccggaaccgcgcctgccaagggctcatccgctgacacagcggcgtgttctttatgaaacagtcaatgcgctgcggatcaggaccgaaagcggggccgctgttcccctcggcaaggagcagcgtgataaagtcatcatgcttctggacggcaaggcaccggtcaaggccatagcctccgcgaaactgtcgctgaaggctatcgcaaaacatctcaagttgcgtgacgggcagacctttaccttggagaaggggcgcgattacatcgcctgcgatccggtccgggcgagcctgtcgcaccccgaccgcttcggcccgcgatggtcggtgcttgaggctgaggtgcaggccgaaatcgtcgggcgtattcgtgatgatgatgataccatggctctggttgagtggctgaagcaggtccacggcttggacgatgcgcatgcacgcgcaacggctgatgcccccctgcccgaaggctatggtcgccttggcgagacagcaacgcggaagctgttggactgcttgaaagccgaggtcctgacctatagcgaggcggtggggaaggcgctcgatcaacatcactccgaccgccggacgggcgagattctggaatcacttccctattatggtgaagtgctgcaggctcatgttatcccggggaccggtgagccgcatcatgacgatatcacacgttttggacggatcaccaacccgacggttcacatcgggctgaaccagctgcgccgcctggtgaacaggatcatcgcccgctatggtaaaccagcagagatcgtggtcgaactggctcgcgacctgaagcaaagcaccggccagaaaaaggcggccatagccctgaatctcaagaacagaaaggctgccgaggcgcgttcagctcttctgaccgaatggggtgttccggatacgggtgcgaaccgcatgtgtgttcgtctgtggcaggaactccatgaagatccgatgatgcggcgttgcccctataccgggaccatcatttcaccctctttgctcttctcgggcgcgatcgacatcgatcacatcctgccctattcccgtacacttgacgacagcacggccaaccgcaccctgtgcatgaaggaagccaatcgccagaagcgcaacaaatcgccatcagaagcccggcgggacgggatgcggatctgggcgcttgaagacgacaatctgcgccatattcctgaattcaagcgctggcgctttgccgaagatgcgatggcacggtttgagggcgagcgggatttcgaggcgcgggcgctggtggatacccagtacctttcgcgaatatccaaggcctatcttgaaacgctctatgacggtgcagatggcaagagccatgtctgggtcgttccagggcggctgacagagatgctgcgccggcactggggtctgaacgggattcttacggacccgctgcgtgatgtcacaaaagagaagaaccggatggaccaccgtcaccacgccattgatgcggctgtggtggcggcaacagaccgtggcctgatcaaggcgatggccgagcaggcgcgtacagatgtcgatcagggccgtgaggcactggcctcatccatcatgcccccgtggcccgggttccgtgaagcggttgcggcacaagtcgaccgtatcattgtcagccaccgccccgatcatggccggatcgacctcacgacccgcatgaaagggcgcgaccagacaaccggccccttgcaccgcgacacggcctatggcctgaccgggcaatccgagaagggtgttccgcttgtggttacccgcgagcccttcgacaacctgacccccaccatgatcggcaagatcagggacgaaccgttgaaggcagcccttgcggccgtgaccgccggcaagaaggataatgcgtttgccgaagcgctggcacacttccgcgacaggcctggcccttaccacgggatccgccgcgtccggttgatcgagccgatcagcgtagtcgaaatacgggatgcatccggtcgggcttacaaaggctataaaggcaattccaaccattgctttgaggtctggaggttacccggaggagccatcaccgaacatattgtcagcaccttcgatgcccaccaacctggccctgagccacgcccacatccggcggccaagcggcttttgcgtttgttcaagtccgacatggtaaagctggatgacagcaagtttggtccggttattgctaccgttgtgatgttcgaccgtaacggtaagatttccttggtgccgcacacggcatccaatgcaaggaagcgctgtgagaaatataaagaagacctttatctgcgtttcactgcccgcaccctgatcgaggcgggtgcccgtcgcattattgtggatgaaacaggtcatttccgtgatcctggcagaaaagggtaacggggttctggcgggttctgtaggctgaatccattcggcgggggagaggggaaccagccatggatcagatcattgacctcacacaggatggtcgccatctggcccgtgaccgtggatttctgaccgtaagcgagggaggaaagcggatcgcccgcgtgcctctcgatcaagtcgccgcagttttggcccatgcccacgggataacctggtccaacgcgctgctggctgcgctcgcggaacagggcacacctgttgtcatctgcgggtcaaatcatcgcccaacgggccttctgtggccgatggaggggcaccaccaacagggtgcgcgcattcgtgcccaatggtctgcgcccgtacctctggtgaagggggcctggaaggccatcgtcattgccaagatcggtatacaggctgcatcgctcgaagccattggacagtcctcagctccccttcgcatgatggcgcgtcgtgtccggtccggtgacacaggcaacattgaggcacaggccgcccgcttttactggccactgatgatggggccggatttccgccggaataccgatggcggtggcatcaacgcgcttctcaattacggctatactgttctgcgtgccgccaccgcacgggctgttgccggtgctggtctgcaccctgctatcggtatctttcatgccaatcgcggcaatgcttttgccttggccgatgacctgatggaacccttccgtccgtttgttgacatgactgtccgggagatcgtcaggcgggaaggcacagaggtcacaccgtccgccaaggcagccttggcccggcttattgcccttgacctgccgttggcggatgaaacgacacccctggccacagtacttgggcgtctggcctcctcgcttgcacgcagcttcgaaacgcgtcgtcttgcgcttgccttgcccggtctcccttcgatcgatacctttcgtgccttgggatcatgaatggaaccacgtatcatctcagcggatatcgtctgatgtgggtgctggtcatgttcgacctgccggtcgggaccagggcccaggccaaggctgctacggacttccggaattttctccttgatgaaggctttgaacgcagccagttttcggcttatggtcgttttgtgaatgggaaggaggctcttgaggcccgcattcgtcgcattgaacaagccttgcccgacaagggtgacgtccagattttggctcttacggaccgtcagttccgcaacatcgttcacttttcgaaccaagaccggcggagggcccgcgaaaatccgtcgcaactggtgttgctataggagcgatgcgtgcaagaaatacaccgctacatcgcgatattatcaagtggaatcaaggcgcaaagcgctgatcaagactagcatctcagaaattgcggtcaagcagcaactcgtcatgggttggcgcactgccatcgatcagactagcatctcagaaattgcggtcaagcagcaactgatcatctgcgtcaaccagaagcacgtccagactagcatctcagaaattgcggtcaagcagcaactccgtccatgcagaggatggcgccccgctgagactagcatctcagaaattgcggtcaagcagaaacgctgaaggtgacacgcggaccttgcaggctagactagcatctcagaaattgcggtcaagcagcaacatgcacggcgacgttatcggggttgtacgagactagcatctcagaaattgcggtcaagcagcaacggaacagccgccttgaacgtggcgcctctgtaaaccgcaccattcaatttccggtctatgactttctcaggcttaccggacgcggaacaggcaaacaagcttacgaactcttcatgtctgcactggaccggctgcagagcaccactattcgcaccaccattacctctggacagaatgaggagcgtgaatgccagggattctcgtggatcgacagctacaggattgtcgagcgcatcaattcgcgtggacagagggtaatggccgccgttgaattgaccctgaacaaatggatgtttcgtgcaattgtcgagaacaggcgtgttctcaccattgatcgcgggtatttcaggctcaagatgggcttggaaaggcggctttacgagctggcacgcaagcattgtggccgtcagccgatatggaagatttctctgccgcgcctggcggaaaggtgtggctcagaaatggagctccgtaatttcaaggtttatctgaagaaaatctcggaagctgatagtctgccacaatatcgggttggtctggcattcgacaagtcagaccctgagcaacaacgcatgaatgaagatctcgggaccaacgcgtggcgttgggggcggaatgatcgcatcttggccgtattcactcataaaaccatggagcttttacccccgccgagtgagattgacgaatgataaaaagcaaggccaagcctgtggataacacgacctgtatatcggtatattgcgtgcaataagactcggtagatcacgcacaattatccatttaactgactgatagaattagctaaatagaatctataacggtttaaccttatataacacatacagataacgtaaaacggacggaaacagcagggccacaataattcgccagaaatagggatttgagtagcaacggaacagaaaaactacttaaggatttcagggctcgtcaggggcagttttctgaggatcgcgtaacgacctaagttcgcgtcgagccacgaattccggcagagagaaggtgcatcagccgaacatagtgacgtgttttgagccaagcagcgacaggcatgcaccgtattcgggtcgtacgttgttgtcttctgccatgagctgattcaggcccgcatccattgtagatcgtgtttcagagcacgacgacattgacaaccagaccaagcattctaggttgatcttacagcctttcacggtaactttgccgcaatattgatccggattacgcatttcgtacggagcaggattacgaccacgacatccgcctgatgaagcatcacttaaattgccacagaaaaacgatcgaggaattgcgtctctggcgttgatcgccaaaattattatgtaggttttctgttccattgttactcagacccctatgtataactacgaacaggggtgcaaatgaaattggcaagtatttatgcacctgtctcaaagaatctcaaagcttctctgtcgtccccccccccccggcaggatagaggaggcgggcccaccttctgtcttcattccatgagaatgcttgttcgcacggccgggccgtgctcaacgcaagcgtaagaaacccaacagggtgccttgcggacaacgcttccctgcctgtcgtgcccacacgttcaggcaacggccttgcgttttccaggccggacgcctgccggatccagaggcgttccggtggtattgaatggcaatcgtctaggcatgcagggaacggcagaaaaatgcagagattggacaggcccccacgatgcgtggaaagcaaggcaactgttggcataggggcatcctctgtactgcagaaaaaaagccatctttaagccgcaagcgcggcgggggaagagtgcttttcttttggcacgtcctgcccgggaaaatagtccggacgctgctttatgcatgcccgcccttgatgctcccccggtcagggaggcggccctgccatgctcgatccctgtggcacatagtgcgccacccacattcctcgtgggagaacaggcatgcgcaacggtattccgtcaggggtgctgacaagggcacaccacctcttatttttatcccgacctgttttcattttaccattttcatttacctgtggtagtgatatagggtttgcacaatcaaaaaagatgtcctttgggacatcgtcaaaatcgtggggggggagggatctgctacaagccctgcaaggggccacgggccggtcttcacaaggaatttccttcgcagacactgttttggacagatcggtttttatcggtctgcatcgtgtggtgtgtgatcgcacacacaatatcgctgtccccggcctcaggcaggggccgacgtgcttggtcgtgcgaaaatcacaggatcccttccgtcattcattacggctttcggccagtccctgactggtcccggaggggggccttgtgtgttcatgaaccggtttgtcctgtgtgtgcttgcatcccttttccttgcagcctgtccgggggttgcgcaggtcacgcccgaggatgttgtgaaatccatcgagcaggagcagttgcgccggcagcaaagggactgggacttcaacgccgagccggacaaacggcctgatattcatctggaacgtcccggggacggaccggatgaccgggaagaggatccgggtccctgttttccggtatccacaaccaggtttgaaggagccgaagacctggacctggttccccctgatgtcgacaggttgaacggcacgtgcgtacgccaggatgatttgagccgctatctggacagcatgaacgcattctatgccggcagggggtggatcacgacccgggtctatctgcccgagcaggatctctccggtggtacgcttcgtgttcttgtgattcccggacggatcgaggacttcgactatgaaggggggcaggcggcggattcccgtatccattctgcctttccatcggggaagggggaccttgtcaacctgcgtgatatcgaacaggccctggagaacttcaacgctccgccgacacagtccggcaccttcaagctgtaccccggaacccgccacgggacctccattgtccggatatccccgcaaaacaggttcccgctcgggggacgcctgtccctggacaatcttggctaccggaataccggtcgctacaagaccggggcagacgttcattacgacaatctcctcaatcgtaacgacacgctccggctaggcgtatcatcgacgacaaggggactttcagggggcaagacctacgcccgggatgtacacggccgttatctgatccctttcgggaactggggcctgcacatcggagccgggtacaacacgtacaggttcacgcttccgggcatcaaccagcgcttccccctgcatgggtataatcacaggctgtcggcagacctgcagcgccttctgtggcgtggtcaggcagccaaggtctatgcggttgccggggtcggcctgtcccgttcaaggaattatctgggtgaccatgaggtccttgtccagcgtcgttttgcgaccaaggcgaaggctggcctgaacggacggacccattttgcagggggctaccacagctggtccgtcaatgcgatccggggcatggaggccctgggagcacgaagacccctgaaccccgcgcttgatccggagccgttcctagttacgggcacttcggcggtgcatgcccggttcatggatggtctcttgcgtctggatcatcagatccggggccagtactcacgcagtgccctgtcgagttccgaccggttttccctgggcggtggctctttcggcatacgcgggttccaagaaaacagcctgtcaggaagcaagggtctctcgacccgcaatgatctggcgatccggctgcaccaggaccctgatacacaggttgcgttcgttctcgggctggacggtggctctgtcaccctgagcgccgatgatcaccggacctatgggcaatccgtcctggtcggggcttcggcaggcgtccggctgtctcttttcagccggcttcatcttgacctgactgttgcacgggcccttgagcgcccggcctcttttaccgatcctggcacggtgaagtacgtgcagatggcgctgtcgttctagggacaggagcccgggggaagccatgcacacactgatacgcgcctttcgtctgttccagaaagcatcggccttgcttgcggccctgttttacccgctctctcctgttctggtccatgcccagccggtcacgaacacggaacgtgcctttgacgaccagtcaaggagcgggatcccgctcttcaacatcaacacgcccaacagcagtggcgtatcaaacaatctgcaccatacgttcgatgtcccgtcgcgcggagccatcgacaacaattcggccattgccgcctactcaaagcttgaagcgggatttatcgagggcaatcccaacctgacccccgggcatgaggccgagctgatcatccatcaggtcatcggcggtacccgctcgcagatggacggtctgctggaagtggtcggacccacagcccgtgtcgttgtgatcaacgaggatggcatcacctgtaacagctgtggcttcatcaataccagccgggcaactctttcgaccggtgcggccattttcaatgaccagggtgagctggagcgctttgaggtccgcggcggcgatatcctgttcgacggaacgggttttgatgccaccaaggaagatcaatccatcggtcagattgatcttgttgcccgcaccattgccctgcgtgaaaaagccaaggtcaagggcctcacgctgaacgttgtcatggggacgaacagggttgatgccaacagcctcgcggccgacccgataaccgttgataccccggccccgaatatcgctctcgatgttgccgccttgggcggaatgtatgccaaccagattgccctagttgccaccgaggatggggccggcgtcaacatgaacggcgcgatggtctcggcttccagcctgacgcttgatgcaaaggggtatatccgccttggatccgggtccagcctgtccgccggcacagataccaccatcacaacaacagaccggttcgagaacgccggtaccataaaaagttcaggcagcatttctgtcgcggctcatacggttgacaacacaggcactatcgatgcgggcacatcggtttcgatcggggctgttgataccatcaagaacagcgggacgatcaagtccgggcagaagacaaccctggccgccgggcggcgggtcgagaacaggggcgctgtgctctctgacggggatagtgtcatcgacgcgccgtttgttctcaacgatggcggaaagatcattggcaaaaacacgctcgatatcggccatgcgaaaggagaggggggacggtccgaatctgtcgtgaacaggaacggcagcatagaggccggaaccaagcttccaaatatcaaggccaggtccattgtcaaccaggggacagccccgaccgtcaggatcaaggacacggtcaaaaggttcatggaaaagtccggccccgtaaatccgggcgaggatatccgcaatcgcctggtgtcagcggacatccacgcgccggatggttccgttgaccccggaaaacgtgacgattacctgctccttctggagaccttcttttccggcacggtctcgggggatacgccgctggacccccgtattgtccgcctgcttcgcacgtctgcccttgacaagaacaatcccgacaggtcgagcgcggcctgggtggcctacttccagaatctgggcggaaaggctgtcgaggccggggtcccctctctcgttgatttcatgcgcgacctgttggttgaggaggcgcgcgttacgccgctcgttgctgcggaagacagcaccgcagacgatagcgctgttgatgaaccggttgtggaacaaaccgacccgttccctgtcaaggacgcctacaggacgcggtatattgccctctgggagaaacttgccagcggacaggcgctggacgacacaaccctgtccgcgattgacccgaaatacatcaaggacggggccatcctgcccgaagtcagtgcgctgtggaaagcgatccgtgccggttccggagcgggctacgatatcctggtgacgatcacacaggatgccctcaacaaggatggtgtgctggccacgatccgttccggcggcggcctgtcgctggatgccgacagtatccgcaatgtttacggagaaatccgggccgggcaggacctgaaacttgcggcccggaccgtaaccaatattgcgttcggggccagccgtacccgtcacgaggttcacaaacgcgcctgctacagctgtcacgaaggcacccttgatttcgtcgagaccttcgggggggtgattgaggccggtggcatactggatatcggggcggaacaggtcaacaacctgacgatcggcagccgcggcgccgcagagatgctggctgagatcaacagccagacgggtaaaggtcatgtcgacgagcttcacgatcgacaggccgcgacaacgcccgggccgggacgggcccgtcccggtcaggaataccgtgtcaccagcactccgggggcagagacttccacattgctcaccctgaggacggagctggaggaaatcctgcaaattgccaaaagcgatcttcccgccgaaaaacccggtgacctgaaagccttcctgtcatcggcgtatcttcttgatcgcctcaattacggccccatggccgcacagcacgaaccgggcctgcctgaaatcctgtcgctggatcgtacggcatggccgggcggggcgggagccgacagcgttggtcccgcgcaaggcattacagccggtgcagaccgcttcctcagcgagaaccttgtgcaggccctggcatccccgccggtactggaaaatggaaccgttccgctttctgcggccatggccttcctgaaccgccggaatggtgcgctggtggccgggaacaccacaaccatcaccgccggtgacatcaggcagcgcgggggcgggcagatcaaaagcacgggcgatgcaacccttgcggcaagaaccattgatctggaacgtggcgagcttgcggccggcggggcgatgtctgtatccggccatgacaccgtccgccttgctggcaccagggtcaaagccgatggcaatcttgccgtcaaaagccaggccggtcatgtcgcgatcgaaggcctgaaggaagaaacccgttttacccgggcctcctatgccgagcggcgtgtgcgcaacccggactgtgccgcaggcaggagcgactgtgacgcatacaggaccgtccggacaaagattggcgggggatccggaacagcggttacccatcgtggcagtacggttgatgtgggcggcaccctgacggttgaggccggtggtacggtttccgttctgggctcgaaagttgaggctgccggcaatacgacgctgaaggccggcggtgatcttgttgtcggtgctacgcgcgatgagcacacctatgccgggaccatcggcagaagcacgcacagcgcgcactcccaacgctcccggggatcatccgtttccacgggcggtaccctgacggctgaagcggatggcgcggtttccgttctggggtcgaaggttgaggctgccggtaatgcgacgctgaaggccggcggtgatcttgttgtcggtgcaacgcgggatgtgtccagcgatgcgggcagcagccgcagaagcacgcggagtgcgtatgctgagcgccttcagggatcatcggttttgtccggtggcgatgtccgcctgtcgggtacggatatcggcatcgaggcctcgcgggtttcggccgacggcaggcttgatgtggtcgccggcaacgccctgtctgtggcagcgggtgcgcaggcctcgcgctatgcgtccagttcgacctcgaaaggccggggtcttttcaggaagaagaaaaccgggcatgtcaacgagagccggctgacctatgaaagcagcgtcctttcggggggacgcgccgtatcgctggatgccggcggtgacatggagattgccgggtcccggatccagagcggcggcaatgtcgacattaccgccttgggcgaactgcgtgttacatcactgcacgagcagtatgtgcatgaataccgggtcaagacgtccggggcctttggcggctttctggggggacgtggcttccgtacagagcagcatgcctttaccggca

SEQ ID NO: 3666 - DNA, 23315 bp, synthetic construct
  source 1..23315: mol_type = other DNA
  misc_feature 1..23315: note = Synthetic
gggtcaggatgatgtcgggcacgatgccggaggccgcgatggcggcgttcgcatcggacccggcgaaaaagccataacccgcaacaagggccgaggcgacgcccgcggcatgggcgccaagaatatcggtgtgcaggctgtcgcccaccatcacgatccgttcgcgggggatgtcaccgcccagccgttcaaaggccatgtcgaagatgttggcgaacggtttgccgaagaaacgcggcgcgatgcccgtcgcatcggccaggcggtgggcatagtgccccggttcggccgagaaaccggtctcgcgcggggccacgatgtcggggttgccgacccagacctcgcgcgggttttcgcgcagcgccgcttccagcaaggcgtgccgctcttcggtccaggcggcactgccgatcagtaagaacccctcggccgccgcataggcggccggatcctcggccagatacgtgacctcgatcccgtccagatcttcccgtccacgggattcggtcgccatgatcccccagcggcgggcgggtgcggcccgcaccgcggccagcagggtcttgcggctggaaatgacatcgtcgggcgcaaagtcgtaacccagccgggtgtatttctccatcaggtcgccgtggggaacgcccgcagcgttggagacgaccatcacccgcttgcccgcggcttgcaggtctgccacccgctccggcgtgccgggaatggcggtctccccgatattcagcaccccgaaggcatccagcaggaagacgtcgaagtcatcggcgatctcggccagtgtctcgacccgacgggcggtcccgccggcccgtgcgtctggcagccgtgcgcgagcagcctcgtaagccgcgaaggcctgttccgacgtcatcatcatctgttcgcttcccgcggctgacccgtgatgcgcccgctgataggcatccccgcccgccggggcgagggggtgcgttgtcccagccgcctatagcccgcccatgtcgcagacgatctgccattcctcttcggtcacgggctgcaccgacaggcgcgaattgttcaccagcaccatgtcggccagccgcggatcggccttgcacatctctagcgtcaccggtttgggcagcggcttgatcgccttgatgtccacgcattcccatcggggatcgtcggtcgtgctgtcgggatgcgcctctgcaatcacctcgacaatgccgacgatcgccttctctttcagggagtggtagaaaaacccccggtcgccgaccttcatcgcgcgcatgttgttgcgggcctgatagttgcggacgccgtcccattcctcgcccgcatcgcccttggcgacctggtcgtcccagccccatgtgttgggctctgacttgaacagccaaaaggccatcagccgaccaccttcttccatgcctcgatcatcacgctgtcgaacagcccggccttggcatagggatcgcccccggcccagccttcggcggcgatgcggtcggccacgtcgatgatgacgagcgagccacacatctcgcctatgtcattcagaaacgggcctgcctgcgcgacgacgccggtgtccgcgatataggctagatgcgcatcgcgattggccttgcggatgtccagatggccgggcttgtcccggcagatcagtgcgaaaagggccatgtcattcctccttgagcgggcggctgagcaggatgcgcacagcctcttcgatactgcggcggccgtcgatcacatgggccacgctttgggtgaccggcatgtcgatgccccgggcggttgcgatggcggcgacggcgcgggcggtggccgcaccttcgaccgtgatatgcgggtcgaaatacgcgttctgccccagcgccatgccatagcggaagttgcgcgactgcgccgaggtgcaggtcagcaccagatcgccgaaccccgacaggcccgagagcgtctctgcctctgccccataggcgcgggcaaagcgctgcatctcggtaaagccgcgggtgatcagggcggcgcgcgcgctttcgcccagcccggtgccgatcacgatgccagaggcgatggccatgacgttcttcagcgccccgcccagttccgccccggcggtgtccgtggtccggtacagccgcagggtcggggtggacagcccgtcttgcaggcgcgccccggtgtcgggatcggcgcaggccagtgtcagcgccgtgggcaggccgcgcgcgatatcggcggcaaagctggggccggtcagcaccgccgggacggccgcggggcaggtttcggcgatgatcgcggtcggcccgcgcccggtggtcagatcgacgcccttgcagcaagccaccagcgtgccgcggttcaggcgttcgcgatgggcggtcaagacgtccgacaaggtttgcatcggcaccgcaagcagcaccgggtcgcacgcgcccagatcggcaagttcccccgatacggtgatggtgtcgggcaggatgatgtcgtctagatagggggtttcccgcgtcttgcggatctcggcggcgcggcccgggtcccgcgcccacagcgtgacctgccgtcccgcttgggcaaaagcgatggccagcgccgttccgaacgcgccggcccctgcgataccgatgcggctcatcccttggctcctttctttcccgatccgacaagcgccgggctttggctgtcaagcggccagcgcggccgcgcggccagtgtcatgtcatctgcgtgcccaaggcgaaaccgttccagcccggcccaggcgatcatcgcggcgttgtcggtgcaaagccgcaagggcggcgcgacaaagggcaaaccggcctctgccgccacctgctccagcgcgtcgcggatgctgcggttggcggccacgcccccggccacggccaaggcggtcagcccctcgggtgcggccgcaatcgcgcggcgggcctttcgggccagaacgtcgcgcaccgccgcctgaaagctggcgcacaggtcggcccggtcctgcacggtgatgccgcccttttccggtagaatggcatcgcgcgcccgcaaaagcgccgtcttcaaacctgaaaaggacatgtcacacccgggccgatccatcagcgggcgggggaaggcaaagcgggccgggtcacccgcctctgcctcgcgctccaccgccgggccgccgggttgcggcagggccagcagcttcgcggtcttgtcgaaggcttcgccgggcgcgtcgtcgatggtgccgccaaggcgggtgaagtcctccaccccgtccacgcgcaggaactggcaatgcccgccagaggccagcagcatcaggtacggaaattccaacccgtcggtcagccgcggggtcagcgcatgccccgccaggtggttcacgccgatcagcggcagccccgtggccgccgacaggccctttgcgcacatcacccccgccagcaccccgccgatcaggccggggcccgccgtgaccgcaatggcgtcgagatcgtgcaggtccacgcctgcctcggccagcgcctgttccacggcaaggtcgatcttctcggcatgggcgcgggccgcgatctcgggcaccaccccgccgaagggcgcatgcagcgccgtctgccccagcacgatggaggacaggatttcgggcgccgcgccgtcggcctgccgcacaaccgcggcggcggtatcgtcgcaactgctttccagccccagtatggtgagcatctgccccatgtccttgccgttgcacgcgcgtcggcaggcaggtaacaccacgcagaccacaggcacaatcccgcgaggttaagccggccgtgaacgatgctctccctctgttgctgctgacccgcccacggatgcaatcggaccgcttcgcccgcgcctttgcggatcgtttcggaacgggctttcaggttgtaaccgcgccgatcatggagattgcgctgttcgataccccgatcccgctcaccggggttggtgggctggtcttcacctcggaaaacggggtggcgggctttgcgaaggtgtccgaccggcgcgacctgcccgcctattgcgtgggggaccgcacggcgcaggcggcgcggatggcgggcctgaccgcacggtcggccgccgggacggccgaggatcttgtgaccgcaattgccgctgatccgccggatgggggcctgttgcatctgcgcggggaacatgcgcgcggcgatgtcagcgcgacgctggcggccaagggcctcgccgcgatggaacgtgtcgtctacgcccagcgggccctttctctccccgaggaggtgttcgccgccgtggcgcaggcgccgttgacattgcttccgctgttttcgccgcgctctgcggttctggtgtcctaccagcttgccgggcggtcagggcgcctggcgcttgtcacgatgagccccgcggtgacggaagcctgggccggtcccgaaccgattgcgttgcacgaggccgagcgccccgacgccgcggcgatgatggacgggttgggtgccctgatcgggggcctcacagtgccttgaggccgttaagtcgactcattatggtgcgctacggcgcagcatgcgccatcggtgtcgaagcgaatcgaaaggcggggtcccgtggctgaaaacgacgagaagaaagacccggaagaagtcgccctgccatggggcaaggccggggacgcatcggccccgacagacgccaatcccgaagaggtcgtcgacgacgccgaggtcgtgcaggaccagccggccgaggcagagcaacctgatcccgaaccgcaggacaagcccgcgcccacaccgccgcaggcagcgtcggcgcccagacggggcggtgggttcttcggccctgttctggggggtcttctggcggccgggatcgggtatacgaccgcgcaatacatccagcccgagggctggacctttcccatgttgcaaggcgacagcggcgatgccgccgcgatctctggcgtgaccgaggggctttcggggatcgaagaccggcttgccgcgcttgagacccgtctggccgacctgccccagggcgacccggtggcggacctgaccgcggcgttgacgccggacctggcggcgctgaagacgcaggttgcagagcttggcgacgggatcacctcgcttgacgagcgcgtcaccgcgatggatgagcgtctcagcgacattgcccgttccagccttgccgccgccgatggtgaggctgccgatgtgatcgcggggctggaacgcaagatcgccacgcttcaggacgagaacgccaagctgaaggaaacggccgccgtgctgacggacgaggccgaggccgagatcggcgccgtcaaatcgcaggcggaacaggcgcaggcccgcgcggcgatgatgcgcgtcaacgcggcgctcgccagcggcaacccgttcggcgacgcgctgtcggatttcggcagcacgcaggtgcccgacgcgctggtcgcggtcgcctcgggcggggtgccgacactggccgaacttcagcgccgcttccccgatgttgcgcgcgccgccctggacgtggcgctggccgagaaggccggggccgcgaccaccgaacgccttggcgccttcattcgcagccagcttggcgtgcggtcgctgcaaccgcgcgagggcgacgatcccgatgcggtcctgtcgcgggccgaggcgtcgctgggcgacggcgatctgcgcgccgccctggccgaactggacgcgctgtccgacagcgcccgtgcccagatgtcgggctggatcgaggatgcaacggcccgtgccgacgcggtcgaggccgctcaggcgcttgagcaaagcctgaacacaaactgaggacgcgcgcactatgctttggtctctactcaagatactgatcttcatcgccatcgttgcggcgctgaccttcggtgcgggtctccttatggaaaccggctccggcattcggctggccgtggccaataccgaattcgtgcttggcccgcttcagtcggtcatcgcggcgatcctgcttgtggtcggggtctggctgctgttgaaactggccgggcttctggtcgcgttcatccgcttcctgaacggggatgagacggcgctgtcgcgctacttcacccggtcgcgcgaacgtcgcggctttcaggcgctggccgacgggatgatcgcgctggcctcgggcgaggcgcggttggcgatgtcgaacgcggccaaggcggaacggtatctgcgccgcccggaactgaccaacctgctgagcgcgcaagccgccgagatgaccggcgacaagtttcgcgccaccgagatctacaagaaactggtggccgacgaccgcacccgctttgtcggtgtccggggcctgatgaagcagaagctggaagagggcgacaccgataccgcgctgaaactggccgaaaaggcctttgccctgaagccgcgccacggggagacgcaggacacgctgttgcagcttcaggccaatgtcgaggactggggcggtgcccgccagacgctgaacgccaagctgcgccacggcaccatgccgcgcgatctgcaccggcgccgcgatgcggttctggccctgtgccaggcccgccacgccatggtcgacgggaatgagccgcgcgcgcgcgatctgtcgatcgaggccaacaagctgtcccccgatctggtgcccggcgcggtgatggccgcgcgcgccctgatcgaacagaacaagcccaaccttgccacccgtgcgatcaagcgggcctggtcggcgcagccccatcccgaactggccgccgcctttgccgagatcgaacccgatgaaaccccggcggagcggatcacccggttcgaggcgctgaccctggccaaggaaaccctggacgaccccgagaccaagatgctgcaggcagagctgtgcctggccgccgaagatttccccgccgcccgcaaggcgctgggcgatctggcggagaccgatcccacggtgcgtgtgctgaccctgatggccgcggtcgaacgcggcatgggggccgatgaaagcgtggtgcgcggctatctggccaaggccatcaacgcgccgcgcgggccgcaatggatctgcgacaagtgcgggacggtgcatgatgtctggcgcgcggtttgcagcaactgtcagggcttcgacacgctcagctggaagcgcggccccgacaccccggcggcgctgcccgggtcgggcatgctgccgcttctggtggccggttccaagcaggacaacggccaagcgtaaccaagggcgaaaaagggtctacacaccgtcttcggagggtgctaaagaccccgccacagtgccggtgtagctcagctggtagagcacgtcattcgtaatgatggggtcgggggttcgagtcccttcaccggcaccagtaaaacaacgtagatagttgtatttactgagtaaatttaattcaggtggcggaatatccacccgaatggccccttatgccagtcgatcagcagtggcgatcgacggctcggcagctaatgactgcatccaccggctttatccgatccccgcaagaggtgacactacgcctaaagcgcgagcaacccggcgcagagaggaatcggtcgcgcatctcttcgagagatagccgggagagcggtggcggcgtttcgtcattcgtgcggcttgtgtcgacgtccttctgcgatgacccgagtcgtctttctatccaatgccaccgcgagggaggccacaacatgtcctgcagcgaagcccgtcaggaataccagtttcgatccacgcccccgtgagggggggcgaacggaggactgagtgagttatccggccatacggatgtttctatcgtaagcggtgcatccaacgccctatttgacctttctcatttcgtctccacgtcggacaggttgtcgcaagctgagtgatcgatgcacgtggcttcgcgggaatgttcgttgaagggggagacatgctggacggtacgccgacacggacggtctgggggtacgaggtggcgacgtcctcgacaggacgaaatgtgtggccggaggcgttgaagcaggtcgtcgccgcgaaagtcctcgacgaagggctcaaggcaagtgctctcgcccgtgagatcaaagccaacgaaacgatggtttgccgctgggtcaatgatgagcgagatcgccgcgagagacaggaaggcggaagccctgaatttgtcgaggtcgtcatctccgaacctcaagctgatgaaacggcagacaatgcgcaatcggagggggtggaagatcatcagcccgctttctgcttggaactttggggcatcagggtcacgctctctgcaagcgtgagcgaagctgacatcgcgaaagtcatacgcggtatcagggctgcacgatgatcttccctcagaatgccttcagggtctatttggcgaccgagcccgtagatttccgaaaaggaatggatgggttggcggcccatgtcatgaacagcctggaacgtgatccgttcagtggcgaggtcttcattttccggtcaaagcgcgcagatcgcctcaagatgatcgtttgggacgggacgggtctggttttgatccacaagcggatcgaagggcggggatttgtgtggccatcagttcgccatggcgtcgtgcaggtgtcctcgacccagttcgaggccctttttgagggtttggattggcgcagaatcgcgacggcccgccagcaccgccccgtggccatatgactgagggacgcaagcggcctgacggaatacaaaacggcatgcggccagcgcctgaatccgcgcgggtcattcctcatcggtactctgccgtacgacgtcgggaagcggtcgccgcggggcacgcgctttggaccaaggcgcgatcagccaggcttcccactctgcggggtcgtcaggatcaccggcatcgcgttggggtgcaccttggccaccccggggtcggttgcacgggcaggtgagaaatccgaaagggcgtccgtcgtttcgccatccttctgatggatgtcattcgccgtcgcagccaatgcggtgagcgggtgttccggatattggtcactccgcgatccgtcttctttccctcgaggtatttcggcggcgtcggcatgccccagcgcgccatcgctagttcccggccgtcgtcagtcgtgcgaacgatgggggccagctggtcggggtagatcgccgactgctcctgaaggttccccagtcggtcgagctccggtctgatgtcgaagagctggcgcatggcctcctgcgcattggtctgtgaatagagattgcacacggtgatgttctcttcgtggtggccgagcggaagcatcggcgaggtgtaagtctccaacagtgtgccatcggccaggaccaggggaaatgccgccagcagggcggtcccggctgccggatcccggaaataaagcgcaacggtatccgaaagactgacccgaccgccggaatgccaagcatagtcgcctcgcccgacatgcgtttccaaccacaagtgcatgtcgttcagcatgcggcccagaccgttctcaggcacctcgacacgaacccgtacgggaaacgccttgtcgtcgatcttctgttgaggggtcgagcggcgagacatgggccagaacattgcgcgaacgccgaagtctgtcaacgttggctatctgcgcaactctgccttcagtaggcccctcagaagcccgctaggcgaccttattcttcctcaccgcgcgggcgcaacacttcgcgggtaaagcgaaatgttgatggtaaacccggctctttgcggacctttagcgttcggttcaattgccgcagccgcagcctgcatagctgccgttcgcgaagacgacgagactatgcgcattcgggcaatatgtgatcgctttctcaagaatatttcgatccaaatgtcaggcgccaataaaggaaacgcaccccgtagggcgcgcttcaatgtggtgctacttcgagcttgttaacggctcgaccgcgaattctgaacactatatttttggcacacaccagctacgctttcaagttgcatctcattcgagtgcaaggaatcctgttcgagatcgtaatttggatggtgaatatgcgtttgggtctcgatattggaacgaactctatcggctggtggctttacgaaactgatggtgccaaggctgacgccccgatcacaggtgtgataggcggcggagttcgcgttttctcagacggtcgggaaccgtcctctgagacaaaaattggtccgcctttggcagttaaaaggcggacagcccgagccatgcgtcgccgccgtgatcggtacctgcgtcgccgcgctacgttgatgaaggttctggccagtgcggggctgatgcccgccgatccagccgaggcgaagaggttggaggcgttggatccctacgagctacggacaaccggcctggacgcggctctgccgctgacgcacctgggccgggcgctgtttcatatcaaccagcgacgcggcttcaaatccaaccgcaggacggatcgcggcgacaacgaaagcggcaaaatcaaggacgcaaccgcgcgactggagcaggagatgctgaccagcggtgcccgcacctacggcgaattcctgcacatgcggcgccggcgtgctactgacccgcgaaatgtgcccaccgtgcggacccgcctctccattgccaaacgggatgggccggacggcaaggaggaagcagggtatgatttctaccccgaccgcaaacatctcgaggaagaatttcacaaactctggtcggcccaggcgagctatcaccccgagctgaccgatgaactgcgcgacctcgtgttcgagaagatattctttcagcgcccacttaaagaaccgaaggttgggctttgtctgttcacggccgaggagcgtttgccaaaggcccatcccttgacccagcgccgcgtgcttttcgaaaccgtcaatcagttgcgcgtgacggcagacgggagggagaaacgccctctgaccctcgaggaacgcgacctgatcatccacgcactggacaacaagaagcccacagcttcgttgaaatccatgaccatgaaactgccggcgctggcgaaggtcttgaaactgcgcgacggagagcggttcaccttggaaaccagcgtgcgcgacgccatcgcctgcgacccggtccgcgccagtctctcccatcccgaccgtttcggctcgcgctggtccgttttggagcccgacgcgcaatgggaggtgatctcacgaacccgaaaggtgcaaagcgatgcagatcacgctgcgttggtagagtggcttatgcaagagcatgggctcgagcgcgaccacgcggaggggaccgcaaaggcgccgcttcccgagggctatggccgattgggcctgacggcgacgactcgaattctggacaggctaaagaccgatgtcgtgacttatgcccaagcggtcgccgcctgtggctggcaccattcggataagcggacgggcgagtgcctagaccgcctgccatactatggcgaggtgctggaccggcatgtcattccgggaacctatgatgaaaacgacgatgacatcacgcgctttggccgcataaccaatccgaccgtgcatatcgggctcaatcagcttcggcgggtggtgaataagatcatcgaggtttacgggaaacccgatcagatcgtcgtcgaactggcgcgggaactgaagcaatccgagcagcaaaaaaaggatgcaatgaagcgcatccgcgacacgactgaggccgcgaagaaaaggagtgaaaagcttgaagaactcgggatcgaagacaacggccgcaaccggatgctcctgcggttgtgggaggatctgaaccccgacgatgcgatgcggcggttctgtccctatacgggcaagcgcatctctgccgccatgatctttgacggcagctgcgatgttgatcacatcctgccctattcgcgcactctggatgacagtttcgccaatcggacgctttgcctacgtgaagccaaccgcgaaaagcgcaatcagaccccatggaaagcctttggtggcaccccgaaatgggacgccatcgaagccaacctgaagaacctgcccgaaaacaagcgctggcgctttgccccggacgcaatgcagcggttcgaaggcgagaatgattttcttgaccgggcgctggtggatacgcaatacctcgcccggatatcgcgcacctatctggacacgctctataccaagggcggccatgtgtgggtcgtgcccggacgattaaccgaaatgctgcgacggcattgggggctgaactccctgttgagtgacaaggatcgcggcgcggtcaaggccaagaaccgcaccgatcaccgtcaccacgccatcgacgccgccgtggtcgccgccacggaccgcagcttgctcaaccggatcagccgcgccgccggcgagggcgaagaggccggccagtccgctgagcttatcgcccgtgatacgccaccgccctgggaaggctttcgcattgatctcgaggttcagctcggcaggatcgtcgttagccatcgcgcagatcacggtcggatcgacaaacaggttcgcaagctggggcgcgccagcacagccggtcagttgcaccaggagacggcctattccatcgtcgatgacattcatgttgccagccgaagcgatttgttgagtgtcaagcctgcgcagctgctggatgagccgggccgaagtggccaggtgcgagacccccagttgcgaaaggcgttgcgcgttgcgaccgcggataagaccggcaaggactttgagaaggccctacgcgaattcgcagccaagccagggccatatcaaggcatccgccgggtacggatcatcaagccattgcaagagcaggcgcgcgttcctgtgcccgcgcaggacccgatcaaggcctaccagagcggcagcaaccacgtgttcgagatctggaggcttccacacggaaagatcgaagcgcaggtcatcacgaccttcgaagcccataccctcgaaggcgataagcggccccacccggcggcaaagcgtctattgcgtgttcacaaaggcgacatggttgcactggaacggaacggacgaacggtcgtcggacatgttcagaaaatggacattgcaaacggcttgttcatcgttccgcataacgaggcgaacgccgatacgcgaaacaacgacagatccgacccgttcaaatggattcaaatcggcgctcggcctgcggtcgcatccgggattcgccgcgtatctgtcgatgaaattggccgccttcgcgacggaggcgccaagcccatatagaccggagtcgcccgaatcggtaaaacatgccaaccttccaatggcttggagggtgaaggtatggatcagatcgtggatatctcgaccgacggtcggcatctctcgcgcgaccgtggcttcatgaaagtcagcgaaggctcggaagaaatcggtcgtatcccgctcgaccagatcgccggggtaatcgtgcacgctcacgggaccacatggtccacctcactcttgaccgaactcgccgatcgcggagctccggtcgtcttgtgtgggccgaaccacgcccccaaatctgttctcctccctctcgaggggcatcatgcccagggtgcccgtctacgtgcccaatggcaggccaaagccccacttctgaagcaggcttggaaacaggtcgtgatctgcaagatcgccatgcaggccgccgctctggaggccatgggcgaggctcacgcaccggtcgccatgctcaaacgcaaggtgacgagcggcgacaattccaatgtcgaagcgcaagccgcccggtactactggccccgcatgatgggtgaggagtttcgacgggatcgcacggcacccgatctaaatgcgctgttgaactacggatacaccgtactgcgggccgccaccgcccgtgccgtcgtagccgccgggttgcatcccaccatcggactgcaccattcgaacagggggaacgccttcgccctagcagatgacctgatggagccattccgccccctggtcgattgctgcgttcgcgggcttgcggaacgaaatggaccagaggttgatagcgaggccaaaacggcattggcccggcttatcgcccttgatctgcccttgggcggcggcttgacaccagtgtccgtagcgcttggcaaactcgccgtttcgctgggccagagctttgagaccggacgcctgaaccttgccctgccttcgccgcccgatgctcttacccttgcggggttggggtcatgaccactgcacctgtctacctgtctggataccgaatcatgtggattctcgtgatgtttgatttgcccaccgacaccaagccgcagcggaaggcggcgacggacttccggaacttcctgctggatgaagggttcgagcgcagccagttctcggtctacgcacgcttcgtcaacggcaaagaggcgttccagacgcgcgtgaaccgaattgagcgacatctgcccgacaagggcgacatccagatcctcaacttcaccgaccggcaatatcgtgatatcgttcacttctccgatcagggccgcagggcggcccggaagaatccagaacaactggcgctgttttgatgaagactcttcggtttgccttacccgtcccctcccaaagttcctttgatttcaggagcttggaagaggaacaagtttagctgttcagaattcgaggtccagccgcaacgctcgcgacgcgcagcaacagcgcgtgaaagtttagctgttcagaattcgaggtccagccgcaaccgaaatgatcgggttcgctgaaatgggcatagtttagctgttcagaattcgaggtccagccgcaacgatcacggacaggaaggcattgcggacgacagtttagctgttcagaattcgaggtccagccgcaactcgaccacgtcgtgacgcacggcgcccgggagtttagctgttcagaattcgaggtccagccgcaaccatggacaacgatttcggtgggctgcctaaagtttagctgttcagaattcgaggtccagccgcaactcgcggtcgcggcggacgatatctcggacgagtttagctgttcagaattcgaggtccagccgcaacagcaactggcccaggtgccacgcctgatcgagtttagctgttcagaattcgaggtccagccgcaacgcaacggggcagagagcgagggggacggaagtttagctgttcagaattcgaggtccagccgcaactgatccacgatctgttcacggcacaatcagagtttagctgttcagaattcgaggtccagccgcaacaccttccggcccaggcgcgcgccctcctacagtttagctgttcagaattcgaggtccagccgcaaccgcgcatcgtcatagatctcgcgctgtgcagtttagctgttcagaattcgaggtccagccgcaactggcccgaacgcgtcgcgcgcgccccttgagtttagctgttcagaattcgaggtccagccgcaactggcccgaacgcgtcgcgcgcgccccttgagtttagctgttcagaattcgaggtccagccgcaacttagcggggggcctgcacccccatcatggcagtttagctgttcagaattcgaggtccagccgcaactccggacaggatgaaatcgacggccgcggcagtttagctgttcagaattcgaggtccagccgcaacagaggtcggtgccttttgccgcgctctggcagtttagctgttcagaattcgaggtccagccgcaactttttcgtaccggtgacgaaggtgaagaacagtttagctgttcagaattcgaggtccagccgcaactcaggcggatgagcttcgacccgccctcgagtttagctgttcagaattcgaggtccagccgcaacgaagcccttcagtgtggcgtccagcagatcagtttagctgttcagaattcgaggtccagccgcaaccgtctggcgaacgacttccccgaggcctgcagtttagctgttcagaattcgaggtccagccgcaacgtggccgaaggcaacccgtttggtgacctgaagtttagctgttcagaattcgaggtccagccgcaactcccggtggacgcggccgaggccgacgatcagtttagctgttcagaattcgaggtccagccgcaacgcccaccccgcatgggtcagcgcgccgcccagtttagctgttcagaattcgaggtccagccgcaacgatcagcacgccaacactgacggtgaccggagtttagctgttcagaattcgaggtccagccgcaacccgcaaaggcggccatcgctgcctgcacccagtttagctgttcagaattcgaggtccagccgcaactccgtgaccggccaacccttgtcggcatcgagtttagctgttcagaattcgaggtccagccgcaacgcgccagcaacaggcgcgcgatccacttctagtttagctgttcagaattcgaggtccagccgcaacgccgcaggtcgccttctggacggcagggcgagtttagctgttcagaattcgaggtccagccgcaactgtcaggcttgtgatgcgtgttggtcatttagtttagctgttcagaattcgaggtccagccgcaacaacgccgcgcgacagtgtcgtgaggcaaggagtttagctgttcagaattcgaggtccagccgcaacccccttacgcacaagaaccaccacccccagagtttagctgttcagaattcgaggtccagccgcaacggtgcggccaatgaccccgtccgaggtgcaagtttagctgttcagaattcgaggtccagccgcaactggccggtccatccctgtcgccagcagcttagtttagctgttcagaattcgaggtccagccgcaactgtcgaggggcgcgttcgcgtcaacggtggagtttagctgttcagaattcgaggtccagccgcaacgctgccgatacactccagctcgaccgcgtgagtttagctgttcagaattcgaggtccagccgcaacacatccagcaacttgatcaactttacaagagtttagctgttcagaattcgaggtccagccgcaacgtaccttttggccgtggtttatgtgggggaagtttagctgttcagaattcgaggtccagccgcaacgccgacatacggttcgtgttgcaacgccggagtttagctgttcagaattcgaggtccagccgcaacgccagcggcctgccggacatgtccgaccccagtttagctgttcagaattcgaggtccagccgcaacaaaagtccgccttcatctggctgacattcaagtttagctgttcagaattcgaggtccagccgcaactggccaaggccgatgcgggtgcggggggtgagtttagctgttcagaattcgaggtccagccgcaacgccgacatacggttcgtgttgcaacgccggagtttagctgttcagaattcgaggtccagccgcaacgccagcggcctgccggacatgtccgaccccagtttagctgttcagaattcgaggtccagccgcaacatttccaggcccgccctgagcttccgagagagtttagctgttcagaattcgaggtccagccgcaaccgtgcggtcatccgaaacggctgccttgtaagtttagctgttcagaattcgaggtccagccgcaaccgcagcagttccaccatctcggcgtcgaggagtttagctgttcagaattcgaggtccagccgcaacgaggagcatgcccgctttcacgatcatatcagtttagctgttcagaattcgaggtccagccgcaacggcttccttcatgccatcatcatccaccacagtttagctgttcggaattcgaggtccagccgcaaccgccatagccaaccgtcatcgtcgcgcggaagtttagctgttcagaattcgaggtccagccgcaacggctcgagcgagaacgcttcgagcgtgagagtttagctgttcagaattcgaggtccagccgcaacgaagggcatcggggaaatggtggccaacgagtttagctgttcagaattcgaggtccagccgcaacatcagcggcccaggccacgatatcgtccacagtttagctgttcagaattcgaggtccagccgcaacatgcacgacaccatcgtcgccatgcgcgagagtttagctgttcagaattcgaggtccagccgcaactccccaccgcccgtcccgctgcccctgcccagtttagctgttcagaattcgaggtccagccgcaactcaccgcttcgctccatccagcaggtggtcagtttagctgttcagaattcgaggtccagccgcaacttcaacgaactgatccttgaggcgcaggccagtttagctgttcagaattcgaggtccagccgcaacgacatgcgcagctatttccctgagcatgggagtttagctgttcagaattcgaggtccagccgcaaccggtaggggatgcctatgaagcggtccgaagtttagctgttcagaattcgaggtccagccgcaacttgcggtcatgccgaaaacccgctccgcacagtttagctgttcagaattcgaggtccagccgcaacaagacgggatgacggtgcttgagggggctgagtttagctgttcagaattcgaggtccagccgcaacgcggaatatctgcggtggtggcgggcgctgagtttagctgttcagaattcgaggtccagccgcaactcttcgtcctgcgcccaccgaccggcgccgagtttagctgttcagaattcgaggtccagccgcaaccgtgccggtcgagaccctggaccgcatggaagtttagctgttcagaattcgaggtccagccgcaacttcttccagtgcttgagccctatcagcgcgagtttagctgttcagaattcgaggtccagccgcaactccatcgcatcggagagcttgctggtcgctagtttagctgttcagaattcgaggtccagccgcaacatcgaggcaaagtggggcccgcagccggtcagtttagctgttcagaattcgaggtccagccgcaaccagcccactcatcggcttgtcatcgaccatagtttagctgttcagaattcgaggtccagccgcaacggaaggaagccgaaaacggcagtcctgaacagtttagctgttcagaattcgaggtccagccgcaacattccgccccttacacggccaccagatcggagtttagctgttcagaattcgaggtccagccgcaacccttcgaggtctccgaccatgccgtgctgcagtttagctgttcagaattcgaggtccagccgcaaacccgcggcccgcgccctctacatgggctgtagtttagctgttcagaattcgaggtccagccgcaacagacgacattgccatcatcgacacccgcgagtttagctgttcagaattcgaggtccagccgcaaccaggcccaccgcgccgagtttcgcaggcctagtttagctgttcagaattcgaggtccagccgcaacgccccgactggcaagatcagcgcaatcggcagtttagctgttcagaattcgaggtccagccgcaactctgcgagaagttggccgcaaaacggcggcagtttagctgttcagaattcgaggtccagccgcaacggccagcagcacgtcgagcgcggcctcgttagtttagctgttcagaattcgaggtccagccgcaaccgtagtggttgtgcttcgcggcctcgaaaagtttagctgttcagaattcgaggtccagccgcaacgaactgcacctccacccgttggcggaacccagtttagctgttcagaattcgaggtccagccgcaacgcacgcccgcgaagccgtgggcgaggaaacagtttagctgttcagaattcgaggtccagccgcaaccgtgccggggcagatgtcctgcgagtgataagtttagctgttcagaattcgaggtccagccgcaaccttgccgagaacatgtccattgcgctggccagtttagctgttcagaattcgaggtccagccgcaacgggcagaatgggcgtttgagcggccgcaaaagtttagctgttcagaattcgaggtccagccgcaactgcgaaggttccacgatgcaggcatcttcacagtttagctgttcagaattcgaggtccagccgcaacgtcaccgccggtccgtgggcgcgaccggaaagtttagagcgtcggccttgaaatctgaatcggcggggttctcaggggacggattttgtgattcaccatatgttgaggtggatcatgggcaaatcgctatcactggacattcgtgagcgtgttgtggctctggttgatgacggcctttcttgccatgaagctgggcggcgtttgcggatatcagcagcaagcgctgtgcggatcatgcaacgcaagaggcgaacgggaggggtgaaggccgcgccccaggggcgcccgcgcggtagcaagctcgacagggtctcggactggctcaaatcgcgcgttgaagccgagccggacatctctatgcctgagctggccgaggcgttgaagctggaacacgacctcaccgccactccggcgatgctatcgcgccatctgatccatcgccttgggttcacatataaaaaaatcgctgatcgcgacggagcggctgcgcaagcgggtgcgcgccgccagatacgagtggcagcaccgccggatgccgaggatgcggtctgagccgcatcggctggtcttcatcgatgaaacagccgtcacgaccaagatgacacggctgcggggcaggtccgcccgcggcacccgactggaagcggatgctcccttcggccattggcgcgcgcaaaccttcatcgcaggtctgcggatcgacgaactcagcgcgccctgggtgctggatggacccatgaaccgggccgcgttcgatatctacatcgagacccaactggccccgaccttgcagccgggcgatgtggtgatcgccgacaacctgtcgtcgcacaaatcggctcacgtgcaggagatcctgaagtcgcaaggcagttggctgctattcctgccgccgtactcgcccgacctgaaccctgtatggatggctcctgcatggcaaggggtttgtgagcttccggcggctggtcggctgcggccatgtattcggcgtcccgttgcagcaaatttgctgcgcgccatgatgaatttccgcgtcggctgaaggctcccactcaatcgaacgcgctctacggcgcttcggattcatcggggtgttcctgttcgccgtttccgtcagttcgccatcacctcacgttgcgccttaccattccgtcagaccggtctcagccgggcatcgccccgagccgcggcctgtagctcgttccatcgcgcagaagcgcgtagatcgtccgcgccatgcggttcgccagcgcgatcgcgacgaccctggtttcctttgtcgccagcttccgcgacagccagtccgtcccagggtttcggagcctgcggcgaaccatgatttgcgccatagcgcccaggtacagcagccgtcgaatgtaacggttgcccatcttcgagataccgccgcttcggggctttccgcctgtcgaatgctgcttcggcgtcaggccgagccaggcggcgtagtcccgtgcggagccaaaattgctgacatcgggcgtcgttgcggcgatcgccgttgctgtcagcacgcccacgccagggatcgatgccaaccgtaggctcacctcgttctgccggtgcacctcctcgatctcgtcagtcagccggtcgatccgttcttgcgtttccgccagctgatcgaacagcgcctgaagcggaaggcgcgcgggctcgggcactttgaccagttcctctcccaggctcgcgacgcgcttcgatccttttgctgttacgatcccgaactctgccatgtgggcgcggatcgcgttgcccacctgagtaacttgcccgaccaggaaatcccgcgcccggtgcagcacgagcgccgcggagtccgcctcgctcttcacgggaacgaaccgcatcgacgggcgcgtcaccgcctcgcagatcgcctcggcatcggccgcatccgtcttgttgcgcttgacgtagggcttcacgtaggacggcggcatcagccgcacttcgtggcccatctcttgcaactgtcgcccccagtgatgggccccggaacaggcctccatgccgatcaggcagccttggcggccctcgaagaatgccagaaattggctccgccggagttggcgccgcactacgaccttcccgtcgttatcgacgccatggacctggatgacattcttggcgagatcgatgccggctgtgttaacttcgaacatggatggctcctcaagttgggacaatgacaccccatcatggcgcatcgcgacgccgggagcaggagccatccacaccatcaatcgaaatggcatactcgaagctcaaggcacacctgcgacggctcaaggcccgaactttcgacgcgctcttccaatccgttgcccaaacctgcgacctcttcccaccagaccagtgccgaaacctcttcaaggctgcaggatatgttgcagattaaatggacgatgctctagctgttcagaattcgaggtccagccgcaactggcacgaaagacgccaccgctgcgatgcaagtttagctgttcagaattcgaggtgcccattccggggtgacccgccccgggattccgggccatccgcccacccccgtgtgcgttgctgcgaggcgatctgcagcgggctaccgttccggactttttgaccgggaaggagccatataaagggattgtaccgacccagtgaaatcctgctcatgctacaaggaggaaaacgtagcgacgagtggacaattggacgacaacatcaagcgctggacggcgaagcgtaaatctgcactggtcatcgagatcattcaggggaagacgacggtagcggaggccagccggacctatgatctggccccctccgagatcgagtactgggtggacgatgcccgcaaggggatggagaatgcgctgcgtgccaatccgctcgatgtgcgccaggaatacgagaagcagctccgcgatctgtgaggcaagcctatggcgaggcgatgctggaactgcgtgctcgaaaaaagttccaggccctcatggtgaggcattgagccgccaccggttcgaggccaatgccgaacggaggacgacaattgatccggacgcttcatgagggcctgcttgctgacgggattgccgtgccgctgacca

SEQ ID NO: 3667 - DNA, 23285 bp, synthetic construct
  misc_feature 1..23285: note = Synthetic
  source 1..23285: mol_type = other DNA
gtatgacagtatgcgccgcgggcgcggcacggcgaaccttattcaggcgcagcgggatttctttggtgcgcacgggtttgagcggctggacaaagacggtaaattccacgctgaatggccagctttggcgcgcgagcaaagctaagttccgcgcggtttggcccttaacgttggatcggcggcgcgggggtcatcaggccacgggtggcgaggatattttgcacgcatgtccttttgcacatcgctgtatgatccgtcccaaaagcgcggcacatccattgttacttgaatagggcgctgggcgggggagagcagggtgacctgaataggctgccctgcaacggtagggtggcgcgtcacgccaaacatttcttgtaggcgcacggcgattttgggcgtgtctccgtcatagtcgatcgcgatgcgccgtcctaatggggtttcaaaatgtgcaggggctaggcggtctagctcttgttgttggttccaatccaatcgggcgcgcagcgccggcagcaggtcgaaccgcttccagtcggcggtgctgcgggtattgccaaggtgcggcagcagccaatccttcagcgttgccaataggtgctcttcggaaaagtcgggaaaatcgggttgatccaccagtaacgtggcacggcgcaggaaacgtgctgcggctttgtcagggcgcagacccagttgcgcgacaccctccagcatcgcctcggcgatcacctcttggggggcatcgttccacgtgcggtcatctaataccaaagcgcccagccgctcttggcgtcgggtttcgacccgcccatcgcggcgcgaccagacgcaatgatcaaaccaagcgatttgatcggggaaagcttcgcgcagggcgctttcgctgatggcggtgccttggcggatgcgtgcctctcgtgggtcgccgtccagatcggtagcaacgatcaggcgggccgaggccagcggatcacccccctgaatgaccgcgcctttgccaccagaaagtacaaaccgcgcagcatctcccgcgcggcgcaacccgatcctgtcgggataggcgagggcggcgagggtgccgatatcttcggggccgttggggtttgtggagcgcgcaagccgctttgcctcttggcggatccgcgcaagggtggcgtgatggacctcagcgggcacgcgctctccctttgcggcgcggatgcggtggctcaggtctagcggtgcgttgcgcagggggtcgcgttcggcaaggatggcggcaagggttgcagcggttgcgccgccacgggtcaccatatgcccaaggcgcgggtgtaggggcagttttgccagctgtcgcccatgcccggtgatcctatcgtgatcgtccagcgcgcccagcatccgcagcagcgccttggcctcttgcaggcggccctcatgcggtggggtaacaaaggctagatcgctggcctgcgccccccaaagcgcgagttccaatgcaaaggcgctcaaatcgccgctttcgatttcggcaggggggtaggcggccaatgcgccatcttcacctttggtccatagcttataggcgacaccttcgctcacgcggcccgcgcggcctgcgcgttgggtggcttcggcctgtgtgacgcgggttgtgaccagacgtgacatgccagaagaggcgttgaattcagcgcggcgcgaacggcccgcatccacgacgatctggatgccttggatggtcagggatgtttcagcgatagaggtggcgagcacaatcttgcggcccgatgcggcagggttgatcgctgcgcgctgtgccttgaaatccatggccccaaacaggggggcaacggtgcaatcgccgggcacctgccgtgaaaggaggccttcaacgcgccggatctcaccctcaccaggaagaaagaccagcgccgagccttcggcgttttccaaagcatgtaaaaccagatcggcaaccgcttgctcaaaacgcacgctctttgctagcggcttgtccagccaccgcgaggtgacaggaaagctgcgcccctcagaggtcacgacaggcgcatccatgagcacgccgaccggaccagcatccagcgtcgcggacatggccaccagcatcaggtcatcgcgcaaagcgctggcgatttccaaacacaaggccagccccagatccgcattcagcgagcgttcgtggaattcgtcaaagatcacagcgccaattccaggcaattcggcattgtcctggatcatgcgcgtcaggatgccttcagtcacgacctcgatcttggttgatttcgaaatggcagaggcaccgcgcacacggtagccgacggtttggccagcctcttcgcccaaagtttgggccatgcgttccgctgcggcccgtgcggcaaggcgacgcggttccaacatcaggatacgaccagttgtcacctcagcctctaacatggccagcggcacgcgggtggttttacccgccccgggaggggcttgcagcacaaggcgcccatgggtgcgcagggcatccagaacttcgggcatgacgtcatcaattggtagcgttgcgttcataggcttcttatctgcgcagatcgagaggggggcaaggctggacattcgcaacgcttggcgtgaaaaacgctgtggaacggcacggaggacctcatggacatcaccgatatggcgcagcgcatttgcgcaggcgagcggcgcgcgctggcgcgggggatcactttggtcgaaagcggacgcgaagatcaccgcgcccaagcaaccgagctgctggccgcggtgggcaaaagcaaggaagcgttgcgcattggcctgtcggggacaccgggagttgggaaatccacgttcatcgagagctttggcatgatgctaacggggcagggcctgcgggtggctgttttggcggttgatccaagctcatcccgttctggtgggtcgatcttgggcgataaaacgcgcatggatttactgagccgcgacccgaatgcatttatccgcccctcacccagccagacccatctgggcggcgttgcacggcgcacgcgtgaggctgtcgcgctgtgcgaggcagccggatttgacgtggtcttgatcgaaaccgtcggggtggggcaatcggaaaccgttgtggcgcagatggcggacctattcctgttgctgcttgcgcctgcgggaggcgatgagctgcaaggggtcaagcgtggcattatggagatggctgatgtcatcgtggtgaacaaagctgatggggatctaaaggcgaccgcaatccgtacccaagccgattacgcgggcgcgctaaggctgatgcgcaaacgcccccaagatcccgatggctatcccaaagcgatgacagtttcagcgttagaggaacaaggcctgcccgaagtttgggaaacgatgcaaaccttgatcaactggcgccgcgaaaacgggttttgggatcaaacccgcgcagcccaagcgcgctattggtttgaagatgcagtgaaaacagcgctgttagctcagttggagtcgcccaatgcacgcgcagcacttgccgccctcagcgatgcagtagcagctggggcgcaggaaccgggggcggctgccgcagcgtttgtgcgcgaattgcacgaacaagcctgagaaagaaggcttggcgggttgacctgccgcgcgattccccctaaagcctgcgaaccaatttacgggtcgctggtgatgtggcctgattagctgtggtgccgcccgagaggcatcgcgccgaaaccaagaggatgaacccatgtcgcgccgttgcgaattgaccggaaaaggcccgatgtcgggcaacaacgtatcccacgccaagaaccgcacacgtcgtcggtttctgccaaacctgaacgaaacaacacttcagtccgaagcgttgggccgtggtttcaaactgcgtatctctgctgccgcattgcgcagcgttgatcaccgtggtggtctggacaagttcttggcgaaagccaaagacactgagctgtccgacaacgcgttgaagatcaaaaaagcaatcgccaagtccggcgctcaggcagaagctctgtcctaagcgaccgaacggttttgatttagcagccccgacctgattgcaggacggggctgtttgcgtttgcgaaccctgtagagcattgcgccaaagaagctggggcacgagaggagtttttatgagtaagccaaaagcaaacatgggcattgtcgtactttttgcggccattgcagtggtgatcgctgttgtctctgtgaaaatgtcacctcttgataaaagcaaggtaggttttcgggttgaggaaccctatctgcgcagcagcttgccaacatccaaatcggctgcggcgtttttggtgctggggaaccaaacaggggaagatgaccgcctgatcgccgctcgatccgagctgtcaggccgtgttgagctgcacaggcatacccaagatgccaatggtgttatgtccatgagcaaaattgaagagggcgttgcccttgcggatggtgagagccatgcctttgcgcgcagcggtgatcatttgatgttcatcggcttggacgcacccctgacccaagggcagttggtgcaggtgacattggtctttgaacaagcaggcgagatcgagataaccataccggttgatcataaccgctaagtccaatcacccgccatttaggatttgttcaacccatgctgggacagtttgggtcgcaggccccataatggcgtcttcaaattgtgatccaacggctgaaggctccagattgatttccaaagtggcaacaccgttacgggcggcttcggcaacaaagccggcggcagggtagacgttgccagaggttccgatggatacaaaaatatccgcaacagaaatcgcatctatgatccggtccatctgatagggtatttcgccgaaccaaacgatgtctggccgcgcaggcgcagcgccgcaggacgggcagctgtctgtgacatgcataaccagtggcgcaggccagcgatgatcgcatgacgcacaaagagccgagccagcagccccatgcatgtggatgacgttttgtgacccacctcgttcatgcaggtcgtcaatgttttgtgttacgatcaacacagaaccatcgttttcagcttcaagctttgccaatgcaagatgcgctgcatttggttcggctgcggcgatgcctgcgcgtcgggtattgtaaaatgccacaacgcgttcagggttgcgcgcaaagccttctggggtcgcaacgtcttcgaccttgtgctgcgcccaaaggccggtgtctgcgcgaaaggtttcaatgccgctttcggctgagatgcctgcgcctgttaagatgacgatgtcgggcatggccgcctccggttaaagaatgtggaatttaccttcgagccaaggcatcaggtccaaggcggggtttaccatacggcgttccatcagattacgcatggtctttgtgatgtcaccgggcacctcgccgctccattcggtactggtaaagagcgaaatttgccttgcatctccaccgccgggcaagggatgtgccgtaagcttgtcatgaaaccgtgcggcccgcatgaacccgagcggggtggtgatggtccagccggtgccatgggccaccatcgacataagggccaaatggctgccgatttcaaagcgggcaggcagctgcgttgcttcgcgccgcaggtagctttcgatttggcgggaaattaactggtcttgggtgtagcgcagaaagggcaggtccgagaccgcgttcagcaaaacgtctggcgtttcgtcccgttcattcggagtgacaaggatgaaaggatcacgcgcgagcgggtattcaaccagtttttcatgggtttcatggctgctggccgcgatgaccatatgtaattcatcttcactgaccatccgcaccaaatctgtgctgctggccgatgtcaggcgaaaccggcaccctgcgaggctgtcggctaacatcaatgcaaggcggggggttagatcatcatcaaagtcatcaatcacgcccaaggaaagatcactgaggtgtgcaaggtccatcacagacacctcggcagtggcgatgcgcaattcagccaaggccgccgatgcgtggcgcaaaaatccacgccctgccggtgtcagccgcatagggcgccgcgaatgatcaaccaatgttgtagataaagccgtttccagattgcgcatctgctggctgaccgcaggttggcttaggcctgtgtctactgccgcttgggcgactgagccgcttcttgcgagtgcttcgaacacttccaggccgcgcaggctgatgcctttaatttgcatgtaagttcctctttaaggggatggttctgagggcgcagctcggaagggtcaaggtcgcgggtgtcccactgggtactcggttttccacttttaggctttctcgcggtgcttttgtctgaatgacttctcgtctcttagcatagagtggaatcatctgagcctagtttattaggaatatcgaattagtgaattgatgcttttacctatgctttagccggaaatcgcgctttgagggcggctggctggctataaattgccctttgagccgcttctcctcttgaaaaatcaggcagatggcctcatttaagcccctgtccccgattggggggcgtttttacaggagagaccatggccaaggaagatacgctcgaatttcccggtgtcgttaaagaactcctgccaaatgcgacgttccgggtcgagcttgaaaacggccatgagatcatcgcacatacggcaggtaaaatgcgcaagaaccgcatccgcgttctggcaggtgataaggtacaggtcgaaatgaccccttatgatttgaccaaaggccggatcaactatcgtttcaagtaacgaaaacccccgcccgccccgcaggttgggcgaggagtgctcatgaaatttatcctcggatcaggatcaccgcgccgcaaggaattgttggcgcaaataggcgtttttgcggatgatattcgcgcgcctgatattgacgaaaccccgaacaaggctgaactgccgcgcccttattgcacgcgtatggcgcgcgaaaaggtggcggctgtgcccgctgacgcggatgatatcgttctttgcgcggacacaaccgtagctttgggtcgccgtattttgggcaagccagctgatcgcgccgaggccgaggcgtttttgcgttccatgtccggtcgccgccacaaggtgatcaccgctgtcgccattaaacgcggcagccagatatgggaacgcgacgttgtcagcaccgtgcgcatgaagaacctcgccgaagatgagctgaaagcctaccttgatacaggcgattggaatggcaaagcaggcggatatggcattcaaggccccgctggtgttctcattccttggatttcaggatcgtttacaggcattgtgggcttacctcttgccgaaacagcaaatctgctgcgcgccagcggttacccgatttatggagaaggctcatgaaaggccgtacaatcattctggaccacctaggtgacatcgaagcggcggctttggttgttgatggcaagctggaagacttgctggtggatagctcggatgcgccacgggttggcacgatctatcgcgcgattgccgaccgtccggtaaaggggcagggcgggatgttcctgaaaacccctgatggctctgcgtttttacgccagatcaagggccttgcaccggggcagcccattttggtgcaggtcactggctttgccgaggatggcaaagcgattcccgtgacctccaagattttgttcaaaagccgctatgcgatcattacgcccgatgcgccggggctgaacatttctcgatcgatcagagaggaactcgagcgggaccgccttttggagatcgcccatgacgctatggatggcgccgactatggcctgattctacgttcatgctgcgcaggggctgacggcgaagagattgccgaagacatcgaggcgatgctggctcttgcccagacggtgctgaacgatgatgattcttctatggagaccctatcggaaggggatggcccccatgttctggcatggcgtgactgggttgagcaggcagaagttgtgaccgaggcaggcgggtttgaagaacgcggcgttttggatgatttagatgcgcttgctcaggatcgcgtaggcctgtctggtggcgcatctatgtatgtcgaatcgacgcgcgccttggttgccgtagatgtgaatactggggcagatgcctcattggctgctgggatcaaggcgaatatggcctgcgcacgtgctttgccccgtgcgttgcgcctgcgggggctaggggggcagatcgtccttgatttggctcccatgcccaaaaaggaccgccgcccctttgagacagcccttagggccgcatttcgcgcggatgaagtggaaaccaccttggtgggttggacacctttgggccactatgagttgcaacgaaagcgtgcgcgcgcaccgctaagtgagctgctggcatgagttgcccgatttgcgacggcgaaaccgaccaaaaataccgcccgttctgttcacgcaggtgcgcagacatagatttggctaaatggctgtcaggttcttatgcaaccccatccagcgatcctgaagacatagaaaaggcctatgaagccttagaaaacagtcccgtttccaagccgcattagggttcctgtgaaactagttgctctgctttgcaaaatggggctggacacccgcgcgcagagcccctagaacgcgctcacccgaccagttcgctggtcccggtgcccgggtagctcaggggtagagcagtggattgaaaatcctcgtgtcggtggttcgattccgcccctgggcaccatttaaataacgtaaatcattaaaaatcagtggcttgctgaaattcagatgatttgtgcccacctatttgcacacccttttgttttgtctcgatcttgatcccctcgcgtggcaatcccgccgcgttgtgatttggagaagcaaacatgaccagactgaaccccgaagtttcaaagccgaaaatgcccatgcaggacgtggaacgggagagcgagatcgttgcggctgtcctgctcgaactgaacaagtggctgaaaatctcacctaagagccgccatgggggcatttgcaaggccatgcacgtcgaggtgtccggccacaacagcggcttggggccagttatgctggatacgcgcagtcgtttgcgcaagcgtgccaaggcactgggcataacgccgcccgtggaactgctagacaaggatggggcgctgactgtggaattgctgtgcttctgcaagcagaccgacacgacactggaatggctctttgacggtgaacctagcggatcgacccatagtcggagcatgtaggcaaccatggtggcggactgaggtaacccaatgaccgccgccacacatcactgaggggccaaggggcagggcaaggcacccccaccccgcccccaaaaaacgcgggggctttggttgctacatgccttcatccatgcgtgatgcccaattgagaaattttgtttttcagaattttaggattcccgaatgtagaaaatgcctgacaggcagctcataggggcctgcaggggttagggcggaaagcggtcgttcgctgcggggggcatgcaaagggaaaatgggctcgtaagcggacctcggatactgtccaacggcaacaatgcctaattattccgcctacaatcccgaaatttagtaatcaccgaagaccatagctgattgtgtcggcgaccttggattggcaccgtgatgcttctggtctcggcgcaaatgtgcaaactggacagacaaacatcaaaaagaaaacgcgggccgtggcccgcgttttaatgtggtgcaatcgaatgcttgttaacggctcgaccgcggattttgaacactatcaaaaaacacctattgatgtttgaagtcaacactggctatcgcatcgatttcaagtttaggttgggtaattgaactaggtgagaatagaataatgcgtttgggtttggacatcggtagcacgtcaatcgggtggtggatttatgaaacgacggacggccagataacatctgtcattgatggtggtgtgcgtattttctctgatgggcgtgaccccaaatccaaaggatcactcgccgtggatcgacgcgtggcgcgggcacaacggcgcaggcgagatcgatatttgcgacgtaaagcggccctgatgaaacggatggcggaagttgggttgatgccgtcggacccgaagcaagccaaacagttggaagcactcgatccttatgaactacgggcacgagggctcgatgaaacacttgaattgacagaactcgggcgggctttgtttcacctgaaccagaggcgagggttcaaatcgaaccgcaagaccgatgcaggcgacaatgaaagcggcaaaatcatagacgcgacagcgcgtctggattgggccatgcgggaccatagggcgcggacgtatggtgaattcctgcacatgcgtcgccagaaggccgacacacctcgtacgacgcccgccgttcgcacgcgccttacgattgctgcgcgggatggggctgaaaaggaggagtccgggtatgatttctatccggaccggcagcatctgcgcgatgagtttgatgcactttgggaggctcaggcggagtatcatggtgtcctaacagaggacttgagagatgaaataggcaccatcattttccaccaacgtcccctgaaaacaccgaaagtcggcaagtgcttgttcaccaatgaggaacgtgtggcgtccgcccatccgctgaaccaacggcgcattctagttgaaacggtaaatgcgcttcgcgttgcccagctgggcgaagtggcgcgtgctctgacgttggaggagcgcgacacgattttgcacgcgctggacaacaaggcacatacgaaatcgctgtcggggatgagcataaagctcaaggcgcttggaaaggttatcaagctgcggtcagggcaatatttcacactcgagactgccaatcgtgatgctatcgcctgtgatccggtccgcgcaagcctgtcaaaaccggatcgcatcgggtcgtattggtcgaccctggatcataacgctcagtgggaggtcgtaaaccgcatccgcgctgtgcaaagtgacgcggaccatagggaattggtcgcctggttggtgtcgcaacaccgcctggctgccgaacatgccgagggtgcagcctatgcaccgctgcccgatggatatagccgtttggggatcactgcaacaaaacggattcttgcagcgctggaagcaaacgttatcccctacagcaaagcggttgaaagttgtggttggcaccattcggatgagcgcacaggtgaggtgctggaccggttgccctattatggtgaaatccttgatcggcacgtcatccccggcacttacgatgacagtgacgatgatatcacccgctttggacgcatcaccaatcctacggttcatatcgggctgaaccaacttcgccggttagtgaaccggatcatcgaggtgcatggaaagccagacgaaattgtcgtcgaactcgcccgtgatttgaaactgtcacaagaccaaaaggcggacgttgaacgaaccatcaagaaaaacacacaagcggccatccggcgaggtgaaaagcttgaagagatgggcgtgcctaacactggcggcaaccgcatggttctgcgtctttgggaagatttgaacgacgatgatgtgatgaaacggttctgcccctacacggggcaacgtatcagtgcgggcatgttgtttgatggttcttgcgatgtcgaccacatcctgccgttttcacggacactggatgatgggttcaccaacaagacgctttgcctgaaagaagcgaatcgaaagaagcgcaactatgcccctcatgaagccgctgaaaagggcctgcttgatcgtgatgcgatggactcggtggcgaaatatctacctgacaacaaagcttggcgttttgcgcccgacgcgatagagcggttcgagggcgaacgcgatttcaccgcccgcgcgctaaaagatacacagtatctatcgcggctggcacgaacttatctagatgcgctttatgatggtggtgatgataaatcccacgtctgggtggtgccgggacggttgacggaaatgctgcggcggcattggggccttaacgggttggaagctctggctgacagtgatgagaaaaccgtcaaacgcaagaatcggaccgatcatcgccaccatgcgattgatgcggctgtggtcgctgccaccgatcgcagtttgatccagaagattagcaagatagcggccagtgatgaacaggcaggcgcagaggacacgctgaaatccacgccgccgccgtgggacagttttcgcgatgacattgccgcccaattgcaaaacattaccgtcagtcatcgcgcagatcatggacgcacggactcactggcgaagggcagaggcgaagacaccaccagtggggcgctccacgaagcgacagcgctcggtatcattgacgaaacccacgtaaccgtacggattcctatcgaatcactcaagtcaggccatctgatcgagggtagccgcaatggatatatccgcgacccttatctgcgcgaccaactgacacttgccacgaaaaacgggtctgacaaggatttcacgacagtgttgcaaaagttctttgaccggagcaaacggtacggaggcacgcggcgggtgcggattatcaaaacgctccaagataccgcgcggatttcggtgccgcataatgcccctatcaaggcctataagggcggcagcaatcatgcgtttgaaatctggcgtttgcccaacggcaagattgagtcgcaagtcatcacgacgtgggaacatcataatctgactgagcccaagcgcccgcatccagcggccaaaaggatcatccggctgcataagacagacatggttgcgattgaacgagacggtaagacggtcatttgttttgtacaaaagactgacccttccaatggtgcgtttttggtgccccacttcgaggcgaacgcggatggccgaaagcggaaaaacgaaccagtcgagtggtatcaaatgtcagccaactctttgatcaaggccgatttgcgtcgtgtcggcgtcgatgaaatgggccgcgttcgcgaccccggccccccgccgattaggtaaattcaaaaacttggactaaaatacaatgtgttacgattcgtgggggcgggtgggtgactattggatcagattgtagatatttcgacagacggacgatacctgtcgcgtgaacgcgggtttttaaaggtctccgatgacggcgatgaggtaggtcgcgtgccgtttgaccagatcgcaggcgtcattgttcacgcccacggtaccacatggtcgacatcgcttttggtagagctcgctgagcgcggtgtgccagttgttttatgtgccgctaaccatgccccgaaatccgttttgctgccgcttgaaggccatcacctgcaaggcgccaggatgcgtgcccagtggcaagccaaggcaccttttctaaagcaggcttggaagcaggtaatcatcgctaagatccaaatgcaggcagctgcacttgatgccgtcggcgagtcccccttccccttgcacatgatgacccgcaaggtgcaatcgggcgatcccacaaacgtcgaggcacaggccgcgcgtcactactggccccgattgatggggccggactttcgccgcgatacgggcggaagtgatgaaaacgcgttgttgaattacggatataccgtgctgcgtgccgcaacatcccgagctgtggtcgcggcgggcctgcatccgacaataggcctgtttcacgcaaaccgcggcaacgcctttgcgatggcggatgacctgatggaaccctttcgtcccttggtcgatctgagcgtgaggcgcattgttcaggaacatggcccagatgtagacagcagcgccaaaattgcgcttgcgcgactgatagcgacagacctgccgctgggcgatggcatcacgcctgtctctgttgccctctcgaagctcaccacgtcactaggtcagagtttcgaggccacgaagctacgcctcgctctgccaaacccgcctgacaaattgacacttgcaagtctggggcaatgcaatggcgactgaaacccacatattatcggggtatagactgatgtggatcatggtaatgttcgacctacccaccgacaccaaaccgcaacgcaaagcggcaacagcgtttcggaattttcttttggatgatgggttcgagcgcagtcagttttctgtctacgcccgttttgtgaatggcaaagaggcattccagacccgtgtgaaccgaatcgagcgaaatttacctgaaaccggagatatccaaatcctcaacttcaccgaccgccaataccgtgatatcgtccatttcgcggatcagggcaggaagagtgcccgcaagaatccagagcaattggtgatgttttgatgcgtaccacatcagaaaactcgaacgttaaccgtgtattttcttgtgaaaacaaggaattacacgggagtccagaatagctgttcaaaatccgaggtccagccgcaacaggaatacatctgccttgaccgttgtttcaagaatagctgttcaaaatccgaggtccagccgcaaccgcttgttacggcggggcttcttttcattcagaatagctgttcaaaatccgaggtccagccgcaacgatgtagcttgttcttcgtcaatcacgctaagaatagctgttcaaaatccgaggtccagccgcaactatcgctgcgttctctaacctcgaagacctagaatagctgttcaaaatccgaggtccagccgcaaccttgcagcttcacatcagtcacgttgattgagaatagctgttcaaaatccgaggtccagccgcaacgctgcggatgttgttgcggtgctcattgtagaatagctgttcaaaatccgaggtccagccgcaacagagaacggctctattcgggggcgcgattgagaatagctgttcaaaatccgaggtccagccgcaactgctgtggatatttgggcaagtgctgatgtagaatagctgttcaaaatccgaggtccagccgcaactcaccacacagcgcgtcaatatcatcctgcagaatagctgttcaaaatccgaggtccagccgcaactcggcgcaaagcgcggtggtgtttatcaaaagaatagctgttcaaaatccgaggtccagccgcaacacgcaccgaagtcgtgcatcgttgggacatagaatagctgttcaaaatccgaggtccgctttcgagacgctgcaccgcagcatccggtcagggtcccgaaggtccgcaatgggccgaacgggaaggtgcttctgataccgcctacccggttgctatgttcgacgaatgtcaaaatccgaccaaatcgccctcaattctaaggaatacccactctctattgggttgtttgaggcccttaatggctggaaaccggccgaaagccgtaccagacccgccacaattgccgccgcatgtgtgtcagttacaggggaggagacgacagggcgcgcagcagccaaggccgcagggatcaccgagcgcagtttttatcggtttcgctcaagcaggcatggtcagcagatcttcgccaagctcacaaagatgcaacgtaaaggcgctgggcataaggcaattctgcgcatgatcgagctatcagaacaggacgaaaacctcagtgtggccatgcgtgcgagtgtgtggcttgcgcgatttgcgggatattctcagccattgcaggcaacggcggcaccaatttccccagccgcaagagaggtgtccagtgttatccgctcaaaggagggcgccgaaaagttggttgctcaggtggcgagcacttcatcgctttgagttatccataagccgccgtgtgagccgtggcggttctccccagtcaatcaacaatcggccgcctagcgcctgtacgatcaagagcagggtatctacggtaggaatacgtggcctcgggggcctcttgccttcaattcctgaccttgtcgccaccatactggacattcggagaacgttatcctcggtcagaccctcctccaggacttgtgttagcaacgccataaccacatcagaggatatggtacggctttcacccaaattgcgcccagcatcctccactttctgtacgtgtcggtgcccgagacccgcgcagtcatcaatgtcgtccgatgttaggcccagatcatagcggcgatttgcaagagcaacgctcaattctacaagctgatcgacctcaacagcttcgggtgatggctgggcgccaccctgtacccccaagactaatccacatgaggcgttcgggcactttaccctgcacacccctgccgagccttttgatcgagcccctatgaaccgccagccccgatcgaggtaaccttgcaacgttgccatctataaaatatcccccgtgaggcgctttaggtctatagccccgtcaagctgctggataggcgctcagtggggctaaaatcgcggctggcgatcaaatcaggcgtagatgcccgatcaagtcacagacccttgcctgcttccctatcaaaattgcggtgatctgcctcggccttgcgctttacatcggccttgcgctgcgcttcgtaccgccgcgcgatggctttggcttgttttgcggatcgcttcctacgtgggattttgcggcccgtcagcaaggctttttgccaccccttcggcggtggccacggcacgccccaagatttgagctgcttccttgtgaagcctcccgcggccgatttccctgcttcaatctgttgctcggtaagcctaagaggtatccccgcgcactcagtcatagcaaggctcccagctcgcgtctcgctcttggctttgaaggtataacggatcgttgaggggcgatgtgaccttttctaagcaaatgccaaacgtagatgctggcgcaaagttgtcgttgaggtctataacatctgacacgctcggtgaagctacggccctagggcgcggtacgtttgatttggagtgctggctatcttggattaatgaggtggtttttccgcctatggatccatggtcggtttttccacctgcggcaccaaaggcggtttttccatctgcggtgagcctcgaaccgtcctcgaaggttccgcctggtttgcgtctggcttcctcaacgatccctagggcgcgcaactctttgaacgcggacttgattgatgcttcgctcacgccaagctcctccttgaggtaatagcgtttgatggtgaacccttgtttatgggtagccatgacggcccatatgcatctagcggtgtagggaatgctctttgtagccataatcttgcgtagaactcggtcatgcatggccaatagcctcgcggacctcttgcacctcacggtccgtaacagccttcagacctcgcacgcactcaacatctgtccgatatgcgccatcttgtgtcatggcttcacggtaaaggcagcgcggcaagcctagcgccaaggctcgcatagcttcatccacaacggcggcgcgagcgtcgatctcgcattgatcaatggaatagtgcgaggtaatcgccacgcagacttcgtttaaacgtctcattttcggctccaaaaaactggggccagcttgctgttagatcgcgcttgaggtatgggtcgaatgtggatgcgctgggtaaaagcaaaccggcaagaattgagccccgaccgtgtttgcgcacggcggggccttttcatttcaggcggtgtggcctgcctcggcggcttcatgcgctacgtcagcggctgctcgctccgcgtggtctgcaagccactgttcaacaacgctctttctccatctggtggccctccccagcttctggccgcgagggaagctgccctctgaaacccatcgccatagggtcgctttgtgcagttgcatccaatttgagatgtcgtcgatcgtgagtagaggatccatgcccaagttgacaatctgggcctgattaaattcattttcgttatttggttgaattggttgaagcgtcatttactacctcgtctatctaaggttttgggcttctcccgtaagtgccgctgccttgtggaaacgggttttgtgtggtcacattaatgaggccgcaaagtcaggtacagtaatttgttgtcgcgcggcgtatcagaacccgcccctgcgcctaaccatgcagcttcaccaactggcctgataggcctgttacatggctagcccatctctcaagcagggcgcggcgttgctccaacaggtcactgcgctggtatgctcggctcacactgttgcccgtggcgtgtgcaagcgtcatttctgctatctcgtgtggcgcatctgtacactccgctatccaagtacgcagggacgtgcggaacccatgaggccgcgcctctaggcttgctcgggccatatactgactgagggtcatatcgctaatcggtgagcggccgcgggagcccgaaaatagcaggttattgcgggaatgaggcaacgcttgttcgatcacgcgctgggcctcagtcgagagaggtacacgaaagtccgaggttttgccctttgcgcccttcatattctctgctgggatcgtccacgtatcgccgtcgagttggtccagtgtgagtaacctcaagggctgtgagcgcacgcccgttaggatcagcagtcgcaaagctagatgggtcactgtgccgtctgataggtcttcataaaaggctggaacctcctgccacggcatcgcgggtacatgttttgcaacatggcgcgtcttgcccaagagagccttggccttttcgcaagcctgcaaatcgacgtccaatccaagcgccgccgcatgtttcaggacaatcccgatacggttcatcgcttttcgtgccgtgtctgctttttcatgccagatgggtttcagcgcgtcccttatgtcgatctggtcaatttctgatactggaaccttgccgatctttggaattatgtgccgctcgagggggctcatccagcgtccagcattcccctcgtctttcaattcggccttgcgcgcttcaaaggcatccctcgccacatccgcaaactggtgaaggttgcgcagagcatcgcggcgctctttctcgcgtgccttcacggggtcaactcccgccttggccatcgtacgccagtgtgtagctacctcgcgtgccttcttgaggcttagggctgggtacccacccaaacccatctcacgccgccggccgtggaccgtgacgcgcaaaacccactgccttgatccgccatccctcacgttcaaccagagaccgccgccatcgccatgctttcctgatggtagtgtttcgatctgtctggcgctgagtttgtgaattgcggccattttctgcgcccccttttgtgtccacctttatgtttgcgcgtttaaatgatcttgcgcaactcagaaatagctgaaaatattgtatttatgggggatcgaaactgagagagacttaaagagataataaatttgtggattaatgtgccgcccctgggcacaatttaactttctctagatgttaaattttgaaggttgagtatgtttaggtatttcgcctcacctcgccaactctgtgccttaaacgcttagttgatgccattctctgatttcgtatcgagagggctcggtttggtgctggtaatatcacgtcagaaagccagccgaccctaagccgcgaaataggggggggcgcacgctctaagctttaatggggcgaatttctaacggtgcgtcgccgtctatgattttgagcaagcggtcaatgttggggtgcgctccggggcggtttttggcatcggctgtgtgttcggcaaaaacatcgaggccatgctctgctgctttggcgttaagggtaccaaaacactgctgaagataaccataaaccgcaagcgatccttgctgccctggtgcattttcaatggacccaacaagagtcccgtcttgatcaagaagatcgatgcgcgcgaggttttgcgtggagggcaataggtgcaaattttccttaaaggataaagttgggctaatcatctggatgtcctttagcaacggctttggattcgtgttgggcgacttatattcagggtttgaaaccttgggtagttcgaagcgctttgcaacccatcattcagacgggcgggtattcggctgcgttcaattgggatgttttggtatcagttggcaccttgggatatcaccttttgggccttcaaagctgccaatgtattttcagcggcctctaatgccccttccagaaaaccaccaaaatgaggcgccacctcggttcctgaaatctggagctgaccaccccaaaggttgctcaggtttgcgggcatcgaataggtcggatgggcatatagcggcgcgtggtcggcgctggttgcggtgtagggatcaaaagcccagtctttgatataaagctgtttggggttggcggcttgggcgccgaacagacgcacaaactgttcggtcacatggtcacgcagggtctgcccatcaacgcgcccttgcggtggtacgccaataaacccgaataatgcataaggcccgccgatgtcaggagatgcatcgtggatttcgaccatcggcccaaagcggctttgcgcatcccccgataacccctcatggcgccaaaacggtgtgtcatagacagcgacggacttggcgtgccccgccatccatgtcgggacgctctgcaagctgcgcattgtttcgtctggcaacgcgggggtaaaggtaatcttggccgcggtgcgcggaggcatcgacaaaaccacatgatccgcgtgaaatgtttcacctgtggtgagggtggcggtgatgcctgtttcggttttggtaatctcttttacagctgcattcagggattttcgggtctctggcaaagcgcccgatagggcgtcgatgagggcgccaagccccccgtgaagccgccaagacccctccatagacgaaaagccgcggttgcgttgcacgcgcgcagtttcgtcttcgaaaaccatgtctcctgatgcgaattgatcgaattttctcagccccagttgagcgatcagcgcagcaattctcggctggtcgggccaaaaccatgctggccccaaatcgaaatacccatctcccaagcgctcagtcttgatgcggccaccgtaccgtccacgtgcttcgattaggtgatagtcctcgccctgcgcctcaagcgcataggcaaggccgagaccagaaagcccgccgccaatgatcagcacagtcatcccttaagacccgatagcggcaggcggcaaagcgattggccaagacctgcattggcaagggcgggtagtgaatgcggatggttttgcatcaggttaaatccgcggtgcttgtgcataggccaaatggccggttttgagccataccttcgcgccagttggccccgcagtcacattcaacgcatggccttctggcaggcgcagccaagcaccttttccaagggtctcgcccccttcagaaacagagccatcaatgaccagcatttcgatgcctcctgtgccagaattgacaaggacagcatcggcatcgagatggctataggatacgatttcgcgggcatctcggtgcagctcagccgttgcgacaccattgactggcgttgctagttcctcggccatggttttgcgaaattgcgtgcggtcgtccatgtcaaactgccatagtttcacgaaaattacgcatccgtcgtcggacccaggtgtatgggaggtggtggggggattgcgcacataggttccagcaggaaagtcgccatgttcgtcctgaaacaccccctccagcacgatgaactcttcgccgccagtatgggtgtgggccgagaatttgctattcggagcataacgcacaatcgaggtcgcgcgggcgacttcatcaccgatccggtccaacatgcggcggtctacacctggcatcggggatgcaacccattcgatttggtcagagtgaataacaacacgagatttgaaatcggcattcagttccattgggttttccttttcgcagtcaccgttgggttgacaaattttcatactacctaccagtaggtagggggggtgatcaagtaacccctgatccgattttggccctttcagaaagggcgtgatcccaccgcgaacgaaccctgtccgcggtgggggtgttttaggatttcgggaataggaacagattctgaatatcaaccaaacctgccgcaagataggaagggtagcgatccagaatagcccctttcagctcctcacccgtggtcgattttgcatatgcgtcttgggcgtaatcaagatagactaacgcatcatcaattgcctgacgcgaaccggctgttgggccgtgacccggcaaaaccagatcaaaagatgtgtctttttgcatctcgatcagacctgctttccaaccgtcaaagttaccgtggccacagaacaggtggcaattgttgtacaacatgtcttgggcgatcaggaccttttgatcaggcagatagatcgtcatcatgttgtcggattccgcatccgtcacgtggcggaactcaaatgtgacgccatcaatcacttctgtcgccccatgttcgatcaggtgatttggcacaactttggctggggggacatgctcgcccaaagattcgatgctgatttcgataaagaagtcgcccaattgatcgatctcggcttgcgtttcggcaaaggaatagatcggcacatcgcggaattgatacgcgccaaaccagtggtctgggtgcaggtgagagatgatcatacgatctacaggcttgcctgtggcttcggcgtaatcgcggatttcttgcccgtaaatgacagagcgttgaccatccacaaagaccagacgttcaggcgtttcaattacgtgggtcgtcacgcaacccgtcaaatcagggctttggtagctatggattttgacgttgccaaagtcggccacggtcacaacgccatgtttaagcggtgttgtaccctgatcaagcgggccaccgccaaggatgttggcgcttacaatgcttggtgtggctaatgttgttgcggctgtgccgacaagaaggctgcggcgattc

SEQ ID NO: 3668 - DNA, 23273 bp, synthetic construct
  source 1..23273: mol_type = other DNA
  misc_feature 1..23273: note = Synthetic
gcagtggcgaattggcgccatcgcaggccaccagccaatcggcttcgaggctgtaggggccgtccggcgtcatcacctccagcgccacatgatcgtcatgcacctcgatcccgtcgacccggttcttgccacgcagctggatcggcgcacccgcggcctgcaactgccgcagacggtcgaccatgaaccgctcgaaatagggctgctgaaggttgatgaaggccggatatttgtggccttcctcgggcaagagattgaattcgaacaccttctcatcgcggtgaaagaccttgccgaggttccagaccacccccttgtcgatcatcggcccggcacagccatagcgatcggcaatttccaggctgcgcttggaaaaacagatggcgcggctgccctggccgatgccttcgtgatcgtcgagcaccagcaccggcacgccctgctggccgaggtcgagcgccgtggcgatgcccaccgggccgccgcccacaatcaccaccgggtggcgcaccgcgcttgccttgtcctgatcgggcgatcgttcatagggatagatcttgtgggccacggtgtatctgtcgtcgaacatgtttcttttctcctccgcaagaggtgtcttgcggtgccgcccgccggtctgtcgggcattgccgggcggcacctcgctgccggtcagtcttgcagcgcttcccacatcgcgacgtcgcgctcggcggtccagatccgcggcgtgtcgattccgcgggcctcgtcataggcgcgcgagacgttgaacggcaggcaatgctcgtagatcgcatagtccttgaacttcgggtcgcaggcctcgcgcaccgcatcccaggcgtccttgaggctgccgccccgggccgcgacctgtttggccggcagataggtggactcgacgaaatcgcgggtcgaggcgatggcggactccaccgcctctcgcccgatcagcgcaccgccacggcccggggcgatgctttgcggatcataggccttgaccgcgtccagcgtgccgccccaatcctcgaaatggccgtcgccgcaatagcaggccgagtggtcctcgacgatatcgccggtgaacatgcattgcgcgtctggcacccagatcacgctgtcgccggcggtatgggcgcggccgatctgcttgatctcgaccttgcggttgccgaggtagacggtcatctggtcgttgaaggtggtggtgggccaggtcaggccgggaatgctctcatgtccctcgaacaggcgcgggaagcgctggaattcgctgtcccagtcctcttgcccgcgttctaccaccatggcgcgggccttgtcggacatgatgacctgctgcgcatcgaaagccgaggcgccaagcacccggaccgcgtgataatgcgtcatcaccacatgggtgatcggcttgtcggtgaccgagcgcacgcaatcgatcaccttgttggccagccgtggcgtggcctgggcctcgacgatcatcacgctgtcgtcgccgatgatcacacccgagttcggatcgccctcggcggtaaaggcaaagagcccctcgccgatctcggtaaaggaaatctccttttcgctggtgtcgccctgggacgcgaatgccttggccatgtctctctccttgatcctctggtctgccgatgtcgtgccggaaccatgccccgggtgaatcgttgcagtcgaaacaaattctttatcgttgcaatagaaacgaatgtcaatatcattgcacatgaaacaaccctgaagctggaccatgcccatggagtcttttgacctttcgacctttcttccctaccgcctcgccatcctgtccgagcggatcagccggcgtctggcattggaatatggtcgatcgcacggcatttcggtgccggaatggcgcgtgctcgtgcatctggcgcgcagcaagcaggcctcggtccgcgagatccacagctatgccaatctcgagaaacccagggttagccgcaccgtggcgaaacttcaggccgcagggatggtgcgcaaggtcaccggtaagcaggacagtcgcctggtcgagatctcgctgaccgagaaaggccagaccgtgctgggggaaatcctgccggccgcgctggagttcgaagaccggctggttcaggcgctgagcgcggaagagcatgccatgtgcatcgagatcgccgaaaagctgcacgccgttctggacgacgacccgctggcgccgatgcggtcgcaactggacacgcccgactgaccggctgcgcccggtcagccctgttccacatatgacgtgccgatggtgcccgccgcggaaaaggccgatccgcatccggtcgatggcaccttcatgcaggcacggatgtcgcaggcgttctgcgacgacaccgcccggacccgggtgctgaccgcctgtatgggcctcatcaagcagctcgacgaccagatcggccggctgatggcctttgtcgaggatcagggcatcgccgatgacacgatgatcatcttcactccggaccatggcgattatctcggcgatcactcgctgggcgagaaagagctggttcacgacgcctcggcgcgggggccgctgatcgtcgtggcccccagccccgaggccgatggattttttttggcggcgccgcggtgccgcatatcctcgaaggccacgccttgcagcagaacacgcccggctgacgatgatctttgacagccggtggaaatacatctttgccgaaggcgtccggccgatgcttctcgatctcgagaccgatcccggcgcaattcgcaacgccagccttggcgaggccaaggccggtatcctgatcggatatcgcaaccaggaagagttgcgcccggtgctggatcccgaagccggaaccgccccgccgcatgacatcctgatctgcgggagcgaatagccgcaaaacgtgcggcattcgcggccgaggcaccggattgactgaaatgagatggtacccaaggtcggactcgaaccgacaaggccgttaagccgggggattttgaattatggcgattttgcattggcttaggtggttagctgaaaatcctcccacggacaaaacatgaacaaatcaggaaggtgggagttggttggtttggcggattttgtcgtcttttgaggcaggctcgtcggccgtgcggcgagattcgaaaacggcttcgcgccgggtgtgatatactgattttccatgaagcattcgggccgtaccgtgccgggctcgcagtttgaaggagcactgatatgacgccagttgtcttgttgatcggcaggctgccatcggtcgaggaaaccgtggcgcgcgaactcgaggaattcccggtccagtggctgggcgcgcacaaccgcgaagaggtgatcgcccagctcgaacgcgaaccgggcatcgcagtggtggtgatgggcgcaggcctcgacgaccgttcgcgtggcgagttgatcggcgtgattgcctcgcaccggcctgacctcagcattcacgtgaaggaccgcgcctccggtcccgcgggcatggcccccttcgtgcgccgagtggtcagggccgaactgttgagcgagccggcctgagcactaccacgtaggagaccatcgcgcgcccgttacaatgcaccaatgggcggaaagccgtctttcgcggcggttgcgaatccagagctccgccttggccaaagcagccattcaaaccctatcggaactgaaccatcttgctgcgctggatgccaaggtcagcgatgagcagggagccgactctaataagttgcgtctggttcccgacacccgacggtctgcgatctacgaccaggctaggccggcgtttgacaatcccggagccagcggcaaccggaaagcggaacagaacgatatcgccgggcgcgacatcggcggcccagccgggtagagacagatcgagcatagcgatcctccatgtcggtgagagaaaccgacacgacccaacccgatccggccccaccgtcccgtgtcaggtgcgtgtcacaaagacacgcgcacctgacaaagggacggtggggtacaaaccctgtaatctccgccaccgagatttaagatttcaaagaatctttgagttggctattctgcactaatgatcccgttggtaaatgctacgtcaagaagtttgctcgatccccttgattttactccacataaatgaagagcaaattttgcacgagaggcggccacgtaaagtctattgtgtgcaacgtaggatgaaaagctcctggaattggagtcaatggactctccctccttgggaacgcgccctttatcaacacccaccactacgacaacattgaattcaaggccgccaacaaaatcagcgtgccctaacaccacgtgtcctgacttttctgcctgtcgaacggtggtgtagtcaccacgtcgatcaagatatgtgatgggcttattccttgatcttgcatattcctgcatcttttcaatcagattgtcgtccaatgaagttatcaagacctgcgatttgctggactcagtctcagccatcagcatttccgctttctcaaaagcggaggaaatcaatgtatcgtcatcagcgtactctgagtagatgattggttgagaccttcgctcttcttccgccgtgaatgcgctttgagactggtttagagtatcagtaaagttggagaacagagttgctccagacgcgagtatcgagtggcaaaaatcacgtatagctggcgaactcctgaaaacagccgacaactcggttctttttactttttggttgggtacttcagacatgctatcaaagaaggattcaacgcttccccacccgcgatccccaaccgcttgggcttggtcgacagtaaatgagattggaagttggtcgtttgccctcgtgaaatgatgaaagacgtgtagttcattgatgttaaacagatgggtttcatcaatcgcgattagatcaaaaccttcccttgtacgtcgccttctccaaattggagtgtcaagttgccctaccgctgatatgacaacgtcatcagtatcaaactgactgttatcagcgagttgatcttgatagcgctcgaaaatcgcaaatacaaaccctttatcggcgtcattgcgaactggaaggccaaaggttagggccggacagtttttgtaggcttcaaaggaatcacctgctcttcctttgatgagaatgcttatctcgtgctgaaacaacggtgctaagctctcaacttcggcaccatccaaaaggtcccttagttcaacgctgaggtgcggattatatgcggcgtagtcaagttcacgagcgcgaacgattgcttcttctatgtaaaaccgttgaagaattttggaatcttgggcgtccctgtcgatgaattcgctctcactaatagtttgactaaggaacctcccacaaagggatgccaaagtttcgactgacaaagaaaccttctcggcttttctatcgcgatcttggaagttgttttgatctatcgcggacaaggaagcctttatggattgccgagtcgcttcactgtgggttacaattagcgcattacattgctctttttttctttcagcctgcctcaggcattcaactgttctcagcatcagcgccaaggtcttccctgttccggcagggccttgaagccggtgagcagatccaaatggcgagtgaacaaaactgcgttgttgagcagtcaggatcggcatccaatcttcaaacggtaggaaagcagaatgttttgcatttggcgcggcgtgcagtgctgttgatgccatttgaccatttgcgtgattttctgtttttctttgttcggacacagtttgaacgtggcggtaaacttccggaagtctttcgaataccttgcggaaatttgtttcatccgcagtctcggtggcggagtctgcgccaacggagccggatttgtatacaagcaggaattgtcctcgcatatcccgcttgctcagtctttcactatgcggatctctctcaatcgcaattctgaagcctgagtttgccgcataattcagggggaaaataatcgcctttgtcgttccagttatgattctttccgacttgttaaataggccgttgctccacatctttgagcagaatcgaagcattttttgaaatgatgtgagtgagtcggactttggaagctgattgaatagtttcgattgatcgcagtctataacaagatacttcttattcttccaggatccactcgtggtaagaaaaacaccatccgaatcttgaaagtgagttatgacgcggtcgccaatcaagaaggcgccaagacctgataatgatcttatcaatttttcgccatcgtcgaagtcgacagattgatactcccgtcccgagatgagttccgccacagctccgtcgtcaatacagatatatttcactttatgccccttctggctgttggaggcaagatttctccaatagttgtatcgtaggtttgtgcggatccgctatcccgattcttccgtacagaagggagaacgattgtagtatgtgctcaattacaggagacgcaatttcagataccggcatagccatatcgccatgatcaatcaccaacgaactgaccttgctatcagcttccgcgatcagttcagagtgcgtctgtgaatcaagcccctcagctatccgttcggcaatgaagcgagggatcgtacttacctctcgcaacaagcagacatatcccgacgcgttttcttcgtcatctgataaatattcaagcaagtaatgtccggcaacagcatgcttgctgagtcgtttgattagctctgagatctttgcaggcttgtttttcgcaaaccaagcgtagatatcgtcagggctgccgctctgaactcccaggaagctgtcgaaagacgttatcaattcgtgaaaccgtttagacttatctctctcttttttggacccttcatctaatgggaagtgagtgtttgcgatgattcttagtgaaaccgctttgggcatgctttctggaatagacgcatctctgagcatctttctaatatttccgtcttgctcgctcaattctgcttcaagcattatttcaaggccgtcgcacctgaaccagtcatgaagtgttacgattggcagataattcaagactggatacttgctctgagcgaagtcgcaacgagcggttattgttagtccatggactatcttgtgagggtagtttgatgctgtcgcacatgaaaaaatggtaccttgggttatctcaccgtatacgacaggtttgaataatggtcggtttttctttgccaagtttaacaccttgaattcgggatgcgaatagcctggaattcgtagaaagacgaaatttcttcaaacgtctctcaatgtattcagtttctacttggttaatgtatagtgcttcgtttggccagaggagaaaaagccttggggggtgtccagagggggcattgcgaatgcccctctttggcccgtgcgggtagcactcgatggagggggggggtgggggaggagagcgaagtctcctccgcccgggcgcagggggttcagggggagtgcagaacgatgcccctgatccggcggaagcctccggtcacgtccgtcaaggtggtgtaatttcccggatggcccgaggtcatgatcaggcggcctgggttgtgatgctgagaatggggtcggtctcctcggcgtcgatttccgcgaaagcctcgaccatcatgtagcggctggcggtctgccattcgtcgttctgctcgaacagcaccgcgccgatcagacggatgatagatgcctcgttcgggaagattcccacgacgtctgcgcggcgcttcacctccttgttcaggcgctcgatcgggtttgtgctgtgcaacttcgtgcggtgctggcgggggaagcccatgtaggccaggacatcgtgctcgctctcgtccatcaggtcggccagcttgggccagcgggtgcggagctgctcggcgacgtgccgccaggtttcgccggcatgcttgcggtcgggctggtcgaaggcctggcggatcgcggcggcgaccacggtgtgctgaccgcgcgacacatgcgccagagcgttcctcatccagtggacgcggcagcgttgccaagtggcctcgaagacccgctcgatggcggccctgagcccgctgtgggcgtcgctgatcaccagcttggtgccgtccagcccgcgggctttcagaccgcgcaggaagtccatccagaaggtctcggcctcggacggccccagtcccaggccgatgatttcccgccgcccgtcggtattggcggcgacggcgattatcgcagctaccgagacgatccggccgccctgacgcaccttgagataggtcgcgtccagccacacgtagggccattccccggaaagagggcggttcaggaactcgccgacgcgctcgtcgatgtccttgcacagcttggagaccgtgcttttcgagatgccctgcaaacccattgcctgcgccagttcgtcgacgcggcgcgtggacacgccaccgatccacgcctcctggatcaccgcgaccaaggccttctccgaggtcttgcgcggctccagaaagccggggaaatagctgccctgccgcagcttgggcaccttcaggttcagcgtgccaaggcgcgtatcgagcgcccgctggcgatacccgttgcgccaggtcgtgcgctggtcggcgcgctcgtgcttgccggcaccgatcaggccttcgacatcggcctccatgatcagctgcagaacggcctcggcgacggcacgcagaaaatcgccgccgtcctgcttttggagaagctcagaaaggtccatgttggtcttggtcatcggggtctccgtgtggtccgtggttgaagtcgccaaactccacctcgaccatacacctcgatggccacccggattacaccgttgaaggcgcagaaattacaccacgtgcacggacactaacaagcctccgcggaaggcgcgggatcccggggcagcgccccgggcgaacgacagaccgaacagaggcccccacgaggccggagtgcggtctggttagtgagtactttcacctgcaagacatcccggcctttcgtttccgggtgaagagcaacgacaacacatcgcctccggttttcatccggagcaaatgtcttgtcgtcaatacaacaccccatcgtctgccgctatgaactgcaccgactgcgcaaacagaaggattgtaaacgcgaaactactgcgcgatggacaaatagctggtctggtgaagctgcaccgccgcgttgagcaacagtgtgagtggcggatcaggggattccgcaccgcggcaaaagccactcaaacgaatgtccggagagggccgctccgcacggttgcgtcacggaatgtgctgggctgatactgcgttgaaacgttttggaggagaaccgtcttgagaagcattgatgaaatttggactcgcttacgttcccttgaaggcgaggagtttcatacaaagtctggaaagcccttctcattcaacatctcaggcaatgtcctcctagtgagtaggaccgactacaatttaagcaaaggcaactttgctaaatgcctcgaaattgtgccatttgatgggccaggcgctgtccaaaacgttgttcgcggaccttcttatgtctgggcgatcctccatgatgtcagggtgcgccaaggagaatggtaggtgcgaaattgcctcgtggtttcctcggtcggtacgaagaacgaccggtttggtgaagctgcaatgcagcgagggccaacgcggtaaacgtctcctacgggccgtttcgagaaatttaaagccaacgtcgccagagcgcttctccagctaaagcggaagccatggcttgtcaaatcttgaagaggaaacgcgccccgtaggacgcgtttcaatgtggtgctacttcgagcttgttaacggctcgaccgcgaattctgaacaaaaatatgtctcccacaagttcggatcagaatcaagttgcaaagtaaggcgccaccttcaagactgctcgcattggttgttatattggagcgacagatgcgcctgggtttggatattggtgcggcgtcgattgggtggtggctttacgaaacggaaggacaaggcacctcgacgcgaatcacaagggtgatcgatggtggagtacgaatcttctccgacgggcgcgatccgaaatccaaagcctccctggcggtggatcgccgtgcggcaagagcgatgcgccggcgccgggaccgttatttgcgacggcgggcgtcgctgatgaaggttctttcgaggtccggtttgatgccctccgatcctgccgaagcgaagcccctcgagttgctcgatccctatgcattacgggcccaggggcttgaccaagcgctgccactcacacatttcgggcgtgcgctgtttcacctcaaccagcggcgaggcttcaaatccaaccgcaagaccgatcgcggtgacaacgagaacggcaagatcaaagacgcatctcagcgcctcgattgggcaatgcatgaggccaaggcgcgcacctatggggaattcctacatttgcgccggcaaaaggctcctgatcctcgccaggttccgacggtgcgcacccggctgtcggtcggaaaacgcggcggcccggatgccaaggaggaggcgggctatgatttctacccggaccggcggcatctcgaagaggaattccatgaactttggtccgcacaggcccaattccatcccgagctgactcaggatctacgcgatctggtgttcgagaagatcttctaccaacggcctttgaaagaaccgaaggtcggcttgtgcctcttcacgtctgaagagcggctggccaaggcgcatccgctgacccagcgccgcgtgctatatgagacggtgaaccagcttcgaataacggcggatggccgttcggtgcggccactgagtcgcgagcagcgcgatcaaatcattcttgccttggacaccaagaaacccaccaagtcactcaattcgatggtcgtgacattgcaggccctgggaaaggtgctgaaactgcgtgaaggcgagcgcttcactctggagagcggtgtgcgagaggcgattgcctgtgacccggtgcgggccgctatgcttgcaacctttggtcctcgatggtcggcgttagattggccggagcaatggcaggtgatctcacgcgtccgcaagctgcaggatgacaaggacttcgcagagctcgttgaatggctgattgaactgtatggagttgataaagaggccgcggtcaagatcgccaacacgcatttgcccgagggctacggacgcctgggtctgacggcgacgacccgaattctggacaggttgaagtccaatgtcttcacttatgcccaggcggtcgccgcctgcggctggcaccattctgaccaacggacaggcgagtgcctcgaccgcctgccatactatggcgcggtgttggataggcatgtcatcccggggacctatgatgaaaacgacgacgacatcacacgctttggccgcattaccaatccgaccgtacatattgggctcaatcaacttcgacgtttggtgaacaagataatcgaggtctacggcaagccgaatcaaatcgtcgtagaactggcgcgtgagttgaagcagtccgagcagcaaaaaaacgatgcgataaagctgatccgcgacacgacaacggccgcgaagcaacggagcgaaaagctcgaagagctcgggatcaccgacaatggccgcaaccggatgctcttgcgattgtgggaggatctcaaccccgacgatgcaatgcggcggttctgtccgtacacgggccaacgcatctcggctgcgatgatctttgacggcagctgcgacgtagaccacatcctgccctattcgcgcactttggatgacggtttcgccaatcggacgctctgccttagggaagcaaaccgcgaaaaacgcaaccagaccccatgggaggcctggggcggtactccgaattgggaagcgatcgaaaccaatctgaaaaacctgcccgaaaacaagcgctggcgctttgcccctgacgcaatggcccggttcgaaggcgagaacgattttctcgaccgtgcgctggtcgacacgcaatacctcgcccggatatcgcgcacctatttggacacgctgttcaccgagggcggtcacgtctgggtcgtccccgggcgtctgaccgagatgctacgccggcactggggccttaactccctgctgactgacaaggatcgcggtgcggtcaagtccaagaaccgcaccgaccatcgccaccattccatcgatgccgccgtggtcgccgccacagaccgcagcttgctcaaccggatcagccgcgccgctgggcagggcgaagtggccggccagtccgctgaactcatcgcccgtgagacgccgccgccctgggaaggctttcgcaatgatctcaaatctcagctcggcaggatcatcgtcagccatcgcgccgatcacggtcggatcgacagacaggctcgcaagcagggtcgcgacagcacggccggtcagttgcatcaggagacggcctattccatcgtcgatgacacgcgggttgccagccggatcgattttttgagtgttaagcccgcgcagctgttggatcagcccgggcgaagtggccaagtgcgcgacttgcagttgagaaaagccttgcgagtggcgaccggggacctgacgggcaaggactacgaaaaggccctgcgcgacttcgcggcaaagcccggtccatataaaggcatccgccgggtgcgcatcatcaagccgttacaggagcaggcccgcgttcctgtgccagtgctggatccaatcaaggcctaccaaggcggcagcaatcacgtgttcgagatctggcatcttcccgacggaaaagtcgaaccgcaggtcatcacgagcttcgaggcccatgctctggaagttgagaagcggccccatccggccgccaagcgtctacttcgagtccacaagggcgacatggttgcgctgaaacgggagggccgaacggtcgtcggccatgtccagcagatgcatatcaagaatggattgttcatcgttccacacaacgaggcaaatgctgacgctcgcaacagcgacagaaccgatccattcaagtggatacagatagctgcacagccagcgatcgcggctgggatccgtcgagtcgcggtcgatgaaattggccgtcttcgagacggaggtgccaagaccatataggcggaagttgcccgcaacgacaaaaacatgccaataacttggagggtgaaggcatggatcagatcgtggatatcacgaccgacggtcggcatctctcgcgcgcccgcggctttctgatagtcagcgaaggttctgaagaaatcggccgcataccactcgaccatgtcgcgggggtaatcgtgcatgctcacgggaccacatggtccacctcacttttgaccgaactcgccgatcgcggagctccggtcgtcctatgcgggtccaaccacgctccccgatctgttctactgcctctcgaggggcatcacgcccagggtgcccggctgcgtgcccagtggcaggctaaagccccactcttcaagcaaggttggaaacaggtcgtgatctccaagatcgccatgcaggcggccgctctggaggcagtgggtgagacccacgcgcctgtcgccatgctcaagcgtaaggtggccagtggcgacagcaccaatgtcgaagcccaagccgcccgctattactggcctcgcatgatgggtcaggattttcggcgggatcgcacagcacacgatctcaatgcgctgttgaactatggatataccgtcctgcgggcagctaccgcccgcgccgtcgtggccgccgggttgcaccccaccatcgggctgcaccattccaacagaggtaacgccttcgccctggcagatgacctgatggaaccgttccgacccctggtggattgctgcgttcgagggctcgcggaacgaaacggaccagaggtggataccgaggccaaaacgacactggcccggctcatcgcactcgatctgcccttgggcggcggcttgacaccagtgtccgtagcacttggcaaactcgccgtttcgctgggtcagagctttgagaccggacgcctgaaccttgcccttccttcgccgcccgatgctcttacccttgcgggcttggggtcatgactactgcacctgtctacctgtctggataccgaatcatgtggatcctcgtgatgtttgatttgcccaccgacaccaagccgcaacgaaaggcggcgaccgactttcggaacttccttctggatgaaggattcgagcgcagtcagttctcggtctatgcccgtttcgtcaacggcaaggaggcgttccagacgcgcgttaaccgtatagagcgacatctgcctgacaagggcgacatccagatcctcaacttcaccgaccggcaatatcgtgatatcgttcacttctcggatcagggccgcagggccgcccggaagaatccggagcaactggcgctgttttgatgaatattcttcggtttgcctcacccgtacactcccaagattcctgtgatttcaggagcttgaaagaagatcgagtttagctgttcagaattcggggtccagccgcaacacgctgatgctcgactccgaagaggagtatagtttagctgttcagaattcggggtccagccgcaacggaaagttgcgcctcagcctcggcaagtgcagtttagctgttcagaattcggggtccagccgcaaccctggcatgctctttttgctgttcaagcgcagtttagctgttcagaattcggggtccagccgcaacgggatcggtgagcgggtcattctgagtgacagtttagctgttcagaattcggggtccagccgcaacccattttctgtcgcagcgcgtcacggcccaagtttagctgttcagaattcggggtccagccgcaacctgatgaggcgctggacaaggtgtcacccgagtttagctgttcagaattcggggtccagccgcaacttgcctcgctggcgtccagtcggcgcagctcagtttagctgttcagaattcggggtccagccgcaacggctgtaaccctgacctatgagggcgatacagtttagctgttcagaattcggggtccagccgcaacatcacgccagcccgcttgcagtagtccaggagtttagctgttcagaattcggggtccagccgcaacgacccgcatttccatgtcgcgcaccacgtcagtttagctgttcagaattcggggtccagccgcaacctggctgcactcgatccgatggccgcgcggagtttagctgttcagaattcggggtccagccgcaacctgcccgttctcgacccgtcaaacgcggaagtttagctgttcagaattcggggtccagccgcaacaccgtgcagtcgctgccgtagccagcgaggagtttagctgttcagaattcggggtccagccgcaaccttcaagatgtctgctagtttgtcctgctcagtttagctgttcagaattcggggtccagccgcaactcctgtgcattcttggtgtgggtgcccagaagtttagctgttcagaattcggggtccagccgcaacaaactccggcgtcaagctgtccctttcgaacagtttagctgttcagaattcggggtccagccgcaacctgcccgactgcctcgtaatagtcgatgaagagtttagctgttcagaattcggggtccagccgcaacgatcgctactatcagccgatggacccgcagagtttagctgttcagaattcggggtccagccgcaactggcagtcgcgtggcaggttccccagcatgagtttagctgttcagaattcggggtccagccgcaacatgatgaaccagggacacttgtcagggacaagtttagctgttcagaattcggggtccagccgcaactcgacgctgaccctggtcgccgatctcgatagtttagctgttcagaattcggggtccagccgcaacgtgatcggcgtcggggccatgtccgtagtaagtttagctgttcagaattcggggtccagccgcaacaccgaccgggtaacggtctgggtggccgacagtttagctgttcagaattcgaggtccagccgcaacctccgccggttcctcaaggcgtggcagaacagtttagctgagaggtggtcgccccgactgtttccgggccgccggccggggcggcgccggtggtggcataaacggcgaaggcctcgttgccgatgttctgcaccttgacggcgctggtgatgtcctcggcggcgggctgggtccaggccgcacccggcgcggtgaaaacggaatcgtaagccatcaaggccttctctcggtcagtgtttgcgatcgagcagcacgcggaggtcggccgccatgttttcggtgcggtggtcgatctcggtcatgcgctcgtcgatctgggtcagcgtggcattggcacggcgggtttcggtcagcacgtattcggtgcggtcggtgggcggcggacctgtgccgacctgtggcgggttcttctggacaccccggaaaccggcggcgatcgccccgccgatgcctgccagcaacccggcaagaccgacccaggcctccggttcaatcgaattgatgaactgcagcatcggcggcggacctgtaggcggcgaggatgtcgaaggccgccagcacgaaataggtgcctacgccggtggtcagcgcgcccgtctggccgccgaggaacggcacggcgaagagcacggccagacccatgaagatgccggcacccagcaccgcgccgacgcagcgcaggagcggcgaccggcgccagttgccgttgatccagagccccgccattcgcatcgcggcgatgaaagtcagcggcagcaccagcgccgcttcgtccgcccccagcgccacgaacgcaccgaaggtcgggctggtggccagcgtgtcaccgggcagcgccagggtgcaggcgaaggtcaggatgatgccgctggtcagccactcgagcgcccggccgttctgcagcagcgagtccgcgatcgagacatgcactgtcacagcatcagctccggcgcgggaagccccgcccgctgcatggcctcgcggtaatagcgcagtgcaagcgcatcgagcaccccctcgcccggcactagcgcgcggatcgcgcccggcacgctgcgatgggcatagtcgacggacgccgccttgatctcgtcgagaccggcctcgggcccgtcctcgagcgccgcctcgatgccggagcggatggccgagtgcagggcccggcgatggccctcatcaatgcgaagtccggtcgcggcctcgaaggcgccggcggcccggttgatcaggatggtgagcacgatgccgatggccgcaagcagcaactcggccagctcggcgttcgacaggatgatgttgagggtgtccatgcggggatcctttcattgggcggcagagcgccgcgaggaagagcgcgaggcgccagtcggtaagggtcatgcgttgccgagggcgcttgcggccgtgtcgcggatctccgccaggcgccagcgcagccgcgcggcctcggtcgcgcgctccgtcggcgcctcgagtgcttgggtgtcgcctcccgtcgccagccactgcggcagcaagaacccgggacaggccttcgcggcgtactggttgtgaccggtgaccctgagagcgccgaaacgcgcctggagcaaggcgatctgcgccttgagggccgcgttctgctggagcgtaaaattatcgtgaaaggcgtcggtctcggccgcaccatggccgccgatcaggcagaggccgatagtgccggtgttgcggcccctcacatgcgccccggtgcgctccagcggccggccagcggccaccgtgccgtcacggtcgatcagcaggtgataaccgatgtcggaccagccgcggtcgagcgtgtgccagcgcctgatctcggcaagcttgtcggtgatcggccggcgggctaaccaggcgggccgcgtggctgaagcgtggacgatgatctcggtgatcttgcgcatttggggtctcccatgaaaaagcccgcgcgacggcgggcggagggtccggtgttcggttgtggaggttctgctgcggctcagaccgccactcccaggcgggccatgaaggcctcggcatgggccacctcctcggcgatcgcggcgggcgtcagcaccttcccccagagccggatgatcgacaggtcgcagatgccggtgtactgcgcatagcccgagccgatccggaccatctggtcggtcggaaagcgcggcgcggtgctgtcgtcggaggcggtcaccccctcggtgtgatcctcggccgcgttcggtccggcctccgagaaggtcatggaatagatgtgcggcgcgctgacgtcgttggccagaagcgcgcaatcgccgttgacgtcatcggccaccgaggtgccccgccctgcccccatgcgcaccacgttcggcgaactggcgctggtgatccggctgtagaggccgaaagtggtcgaagccgtggcctcgccgcgcggcgtcccggtccatgtgccgaagaacatcggccggttggcgtcatcggccaggctgtcgacggtcgaggccaccatgagcaccgtgccgacgcgcggctcgagtatcttgctctggatgaagttgctgagaccggtgaaacgcgcggcggtgccggagagcgagggggccaccgtgccgtagatctcgctgtcgggttgtccgggcgcgaagttgcggtggaaatagccatccgtcaggtcgcagaatacatggctcagcagaagcccgtcctggtgcgggctgtcgatgccgtcaggtgcgatcacgttccccttggcgcgcagaatggtggacatcagatttctccctgaatggcgcaggcgatggcggctgcgacggatttgagggtggcaaaacgggtgccggcggtggggtggatggtgtcttcgatctgccgcagcaccccgccggtgtcggcgtcgacggtctcggtcgaggcgctcaggtcatagcccgcgccatgcgccgccatggcccaggccgggaccaccagcacttcgccgctgccggcattggcgacggtctcggcggtggcggcggcgatcagccccttgagcgccggcgcataggcattggtccagacccgcgaccgggtgaaatccgccgcggtgccgggcatccagacgaccacatgcttgctcggatagctggcgaaccagcgccggaacaccaggctgtactcgtcgaagaagtgatcgcggatcacgtcgatccccgcgtcgcggatatcgttcgtgccgtagccgatcaccagcatgtcgggcgtggccagaccgtgccgagagatatagttggcgaaatccagcacgtagccattgcgctgatccgcagccggctcgccggaggctactcggatcatggtgttgtagagccgcttgttctcgacggtctcgccgtcaaaggtggcctcggatcccggggccagcggcgagacccgcccggtgaagagataggtcaggtcggccagggcatggcccggcttgccctcgcccaaggtcgccggcagcgccatggcgccatcggccggatcggtctcggcctcgccggtcagcgtgccgatgaagctcgggacatagccccaggtgccgagccaatagtcgagcatcgccccggaaccgcggtgcgtgatgctgtcgcccaccagcagcaccgccggggcattgccagtgccgggcgattgcggcgcggcatggacggtgatgctctgctcgccgtagcgcgcccggcaggtggtcgcgcgcaggctcacggtcgccgagacgccgaggcccgagagatcgcagcgcagcatttcctgaccctcgagttgcagtcccgtggcgccggaaagcagcatccgcgcctcggtgtcgcggtcctccagcagcccgtcgcggtgcagcccgaactcgaccccggtgaccccgaagaggcgctgcggcagcagtggggcggtgacggagggcgctggcgcccggtcgtcgtactggaagccgcgcaggtcggtgatcatcgtgcggtcgccgccgcgctcggccagcattccggccccgacgatccggtcttcgcccgcgcggaagaaggtgaagccgttctcgtcggaagcgatcagctcggccttgccagtggcgtcatcctcgacctgttccatggcggtgatctcgagggccacacgctgcgcggcggcgtcagcggcctgcagcagcgcgcgccccgcggcggagctgtcgtcgatgtcggcggcctcgagggtcaccgtgcccgacttgccgccgatcgagaggacaccgacgtcgatccggatgcggttccagctactgccgtcggagaccacatagtcgccaacggcccagtcggtgatcccgtcgagattggtgctgcccgcggtcccgacccagtagagatagccgctgttcccggccgcggccgccggaatggccgggctgttggcggcggcgtcccagacaccctgccagctgagggcaccggtgaccaggctcaggtcggcggtgctggcggcaagggccaggatctcctcgagcagggccacgatccgctccgggtccggctgatgatcggattgcacgggattgccgcgccacaccgcgcgcggtgtttcggtggtctccagcatctctctgcctctcttaaactgtgtcgattgtctctggccccgagaccgggccggccacgccggaggcgttgatcggctcgatccagtaggcgtgatggcccgcagcaacggcgctgtcttcccagctgtcgacttgcccgggtagcccgtattccagccgaatcaggctggcgtccgcgatgtcataagagccgggcgcacttgcataatcggcgcgcaggatccgcgtcgcgtgatagggcgcatcgttgggcgcctcgaagcttacggtgacatcgccgccggtctcgctcagggcaaagctgccggacacatgcgcccccggtggcgtggtatcagcgatggccaccacctcgaccggcgtcaacggtcgccattcgccgacgcgattggagcggtggcgagaccgaatttccgcctggtaggtggcgccgtcgatcaggccggtctgcaggaagctgccggtgccggagggcagcgaaaccagctgccagtcgccgccttgttcgcgcaggcgcagatccgggctcaggctgctgtccggcgcggtccaggtccaattgatctgcgccacgccgccagtgccgctgaccgccgtgccggcgagatcgtcgatcgtgtcgatcggatcatcgccctcgacgtccgccgcattgtaggacggccgcgccggctcttcggtcgcggcgacgaactggcgatcctcctcggcggtcgagatcagctcgaccgtgaagctgttgccgccggccaggcgctcgaccttggccacctcgcagatcacctcctcgcccagcaccgggtgtgagacggtaacgaagcgatgcgcgaggcccgccgtaccgccggcgtcattgtcgcggccgccgatcaactcgtagccgatcagcccgatggtgccggtgatcttgaaccgcgcccgctcggcccgggccagcggcttgagcacccgcagcacctggttgtggctatcgatcggatagagcgccagctgctgcgcattgcgcccggcctcggcgtcgaccacccaggccgccgagggcgtctcgcgatagccgttgtccggctcgcggtactcggcccagtattcggtcctggggttgaggccctggttgccgtcgaccacctggcagctgaagaagtcgcgcgcctcgagcgccagcgtcggcgccaaccagcggccggcgtagaaatcgaccttgccgtcggggcgctgccagagatagccatcggcggcgccgaggaactgcgcgatgacagtctggaaatcctggtcatcggtgaaggtgtggttgaaggtccagcgcttctgggtgccgccgtcgccgttcgtcaccagcgcatcgcagatgtccgcctcgaccgccacacggtcccagtcgacgctcaggccccaaacattgaccagctcatgggccaggccgagcgcccagttgttcgaatatccggtgtcatcgatgcgtggatcatagatctcggaccagccgcgccagatgccggtgtagaccgcctcgcgccccgaggggtagacctcgaggaaatcctcctgcggcacctcgcggcagtagtaggccacgccgctgtgcccggcgaagtcatgcgcggcggtgaactcggtgaaggtcgagaccaggatcggatcggccgcctgccccgctccaccggtgaaggggcggatgctgacccggctgcgcgggggatcgtcgaatttgtagggcttggtgatgacctcgtgatccagcatcacgccgtcgaaggccgagcccttggccagtgtcacctcgcgcagatcgagaaaatgagcctgcggcccttcgcagggatgcgcggcgacagtaatcaccatgtgcttttgcttgtcccgtatccccgaacggaaggccaccacgccgcccttctttacttcgccatagacgcgctcgaagggcgaaatcggctgcacgtaattcgcaaactgcgccgaaggcctggggatctccggctgcggcgtgagcaggttgaccacggccgagagcgccagcgacagcagcacccgcccggccagcgtcccgaagaggaagccgcccacggccgccccggccgccgccgcgccgccaagcgcggtggccacggcgccacctgcggccccgtaaaacccggtcgccgccaggaagccctggaagaagagggtcaccggctcggccgcggcttgtgagggggcggtgagcgcggtcgagcagaccagtgccattgccaaggcgcgcttacgcagttgtttgatcggcatagccaactccccatgcggcaatgagtgtgcccggccgggctgccagcacgccgggatcggcgcggcaggcaaagagctgcgggccgacgcagattccggcggtgggcaggatgcgcccgccttgccccgggtatttgaagagcgccacgtcgccgcgccggacctcggccacccgcgacagaccggcgcgccgctcgaggtagtcctcggccagtggcagc

SEQ ID NO: 3669 - DNA, 23261 bp, synthetic construct
  source 1..23261: mol_type = other DNA
  misc_feature 1..23261: note = Synthetic
atgttgatggcgatgggcgcggcgatttgctgatcgggtcgaacagcggcgtcagctatcttgtggcgatcactgatctggccgcggctgatgcagcagatgggtcggttgacggcatcatccaactcgcaaatgtgagtgaccaggacaactcctacgagttcgaggagggaaccgggatcggcaatgctggtttctcggtctcctctgcgggcgacgtggatggcgacgggcttgatgacctggtgatcggagcgccagatggtggcgggggcggcggatacatcatcaacgccaccgatctggccgccgcagatgatgacggcacaggcgaggacggcattatcaatctgggtgccttgttctttgacggtgtggtcgagggcacctcgggcaacgatctgattgatggcgactacctgggcgatcctgaattggacctggtcgacaacaacgacaacccgttgggcaacaatgacgatgtgatccgggccggggctggcaatgacacgattgtcgccagctacggcgatgacgatatcgatggcggcgccgggcgcgacacctatgtcagtgccgatcttggcacgagctacacgttccttggtcagggctttctggcaaactccggcactagggcgtcgatgatcggtgacatcgacggcgacgggctggcagactttgcaatcgagtcggacaatatctttgcgacgctcccggacacacgtgaggtcttcattgtttctggcgccgatctggaagcagccgatgcggcggacggcactgtcgatggcgtgatcaatctcgagaatgtggatgagcaggcgaactcctaccagatcatcggtggcccggaccagttcaacccggtccaggacatctctgccgccggggatgtggatggcgatgggttgggcgatttcctgatcggaattacccccctaacggggggcggtggggcctcgagctatctggtgaccggtgctggcctgtcggcggcggacgcagcggatggctctgtcgatggggtgattgcatttgacaatattgccagccaggcaggctcctacgcgttcgtttcagctacaggggacgctcttggaaccgcggtcgggacggtcggtgatttcgacggcgacggattggacgacctgatccttggcgcccctttggccgacggggcggcggatgccggtggtttcgatgccgacggtgataattacctgctttccgccgctgacctgcaagcggctgatgccgcggacggtgtggtcgatggtgtgatcaataccgccaatatcggcgcacaggccaactccttcgtgatccagtctggtggcgccgccggcgccagtgccggctactccctatcgtcggcgggcgatgtcgatggcgacggtctcgatgacttcctggttgtgggtccggatggtggcccctccattggcgatgcggcgttcctgatatccgcggcggagttgagtgaaatcgacgcctgggatggcagccaggacagcgttctgaacctatccgaatactttgacacgttcttcgggggcgctggcggaccgggttcgaactcataccagttcacaccagatgatgtgacgagcaatggacgcggtttcgggctgcaattggccgggggggcagatctggacggcgatggcatcactgacatcgtgatcggcgaacccgaaaaccccagcccagtggcgggcgatccgggatcggtctatttcgtgagtggcacagatctggctgcggcggatgcggtcgatgggttcgttgatggcgcaatccaactcaaccaggtgcatacgcttgccaactcctatgagttccggggcgaaaacgcaggcgccaatgctggcataaacctgtcgatcgtggaggataccgacggcgatggtctcagcgatctgctgattggcgcctccggcggctttggtggaacggggaccgtttaccttgtcagcagcgaagattttgctgcagctgacgctgcggacgggactgtggatgggattgtcgatctgggcaatgtccatgatcagtccaactcgtaccagtttgtcggactgcgaggaaatgcggtttcaggtggcgatgatgtggacggcgacgggatcgccgattttctcatcggctcgtccgcaacaacgacaggtgttaactcgttcgagggcggggcaacctacctcatctcaggcaatgatcttgccgccttggacgcgctcgatggcaataccgatggcatcatcaatgtcggtcttgtcacgcggatcgacgacacagttactgttgatgtgaatgatgacggcgacgggacggtgacaggcacctatgttaccggcaccgataccatcacctcggtggagaactacgtcgcaggcgaaaaccccgatgagactgacacgatcaccattaccgataccggatccgggtatctcacatctgacatctctgggctcgacaacaacgcaacgggcacgtttacgcccaacaacggcgatccggtggtcagcttcgcgcctgggtccgggaccgagttcagcgatgtgcttcaggcgatcgaaaatggcccctatgtcagcggcggcaccttccagatcacaggtggcgatgaagacggccaggttggcaacatctcgttcgagaatttcgagacgatcaatttcaacatcgtttgcttcgctcgcggaacgatgatcacgacgaagaccgggtttgtcccgattgaggatctcgcggtcggcgccgaggtcatgacattggacaatggatatcgcccgatccgctggattgggtcgcacaaactcgatgcgatcagtctgaggcacaagccgaagctcaaaccggtccgtatccgccaaggcgcgcttgggcacggcctaccatactcggatttgtgggtctctccgcaacaccgggtgttgatccgctcggcagtcgcgcaacgcatgtttggccaatccgaagtgctgatcgcggccaacaagcttcttgatgtttatggatttgagatcgatcacgacgcgcaagatatggagtattttcacatgctgttcgatcagcacgagatcgtcttttcgaacggtgctccgaccgaaagcttgttcacagggcctgaggcgctgaaatccgttgcgcctgaggcccgggcggagattcaatccctcttccctgaactccttgagcctgatttcgtcccggttcccgcccggctgatccccgagaagggacggcggatgcggcgcttggccgaacgccatcaagccaatgagaggccattgctggcgatgtaacggctttttggcacgtgccgctatattttgtggtatggtcacgcataggcgctagaactgcaagccaacaacgctgtccatggagcccctggagggtcgggtctgctccggctctaagggggtcatccttggagccaggcagtgtcgggggcgcggtgtactgcagggcgacggaaaccgatcgagcggccggacaagaccaaaagcgagacaaagatttagggaaactcggactcttgaatgtgcatcttcaccacttttcggtcaggcggcgagatgagccgccggttatcgagactgcgcgatcggcatggcgatgatgccggatagcgcaccgcagatcccgtcggtctcgttcgatacttcggcttatgcgcccgagcatcggattgacgcgtggtgtcgcttcaatgccgggcttttcgagctgaggaaacacgagatccccgagcacggcttcgcggccagcgcccagtcctaccgcgttggtcaggctgtcctcggacgttacagcgttacaggcaacatcgtccggcgcgcagagaaccggttgaaggtcgaacgcgaggatctcttcgtcttgcggctgcaccgggccggctacaccaaaggcgtaatgagcgatgcgagcttcacaatgcaatcggatcgcttcacattgttcgatttccaccaagatctaaacgccgagaccgagaacgtcgattacatcagcgtgacgatgccctatgcagccatcggttatgacccgtcgcggcactccaagctgctccaactgccctatgcctcgccggtggggcgggttctgcggagcaatctagagatgatgttggagctcgcgccgaccctcacgcaaagtgaggcggctgtcttggctgacgggttctcgggtctgctcaaagggatcattaccagagacctgagggacgagtcggtcttccaaaagtctcaacagtctctcgaagtcgccgcgcggcggtttgtcgagtccaacctgcgggaaccatctttggatgccggaaccatttgccggtcggttggcgtgtctaggccaacgctttaccgcatgttcgcagacgacggcggggtcggtcgtgcaatcacaaagcagagacttgaacgtgcttttgaggatctggccgcatctgaacccgcgcgcggcgcaatcgcgcgaattgcccggtattgggcattcagcgacccggcatatttttcgcggctgttccgtgacacgtttggcgtcacgccaagcgaggccattggctcttcgatcggatcactgaaaccatcgccattgggccgacggcaccattcgcgcgcaagcgaacgaccatcctggtcattggtcgatctttacaacatgggtggcacagcatcggtctcttagatgcgacgggtttcgtggttcccgccgcgggcgtttttctcagcaccgcggcacgaacgctgccgccctgcgcgtgcggatcattgtcggctcagggcgacaagttccagaacagatttgtttcgctgacaagatttgcaccgaactgcaaagtcgcgcgaatggttgttccgttcgcatcataaagaagctaagggtttcggtctccagcaatccagacttgagaggagccgataataagcgccctggaaaagggccacagatccggctcgaacgaaccataagggtttagagattatggattcactggctctatttggtatagtaatctcaaaactacaacgggagtggcaaagggtcacgagaaataagctgacgctctgaccacggcaagcgcagcgcagtgcttggagcgcttcgcgatctacaccatctgttaacacttcaattggcataagccttcatagcaagaactctgatgcgccaagattcgacaacgaaacagattgcagcacgattgtattccctgagaggtcgtcaatgatgacgtctgagcccacttggctcaagtgattggctgtaaggtcagcaaagtctacaattgcagtcacaccggtgagatcaatgacgtcgccgctcgcgaagtccgagacgatgtcgccgccatccccgtctacgaagacaaaggtgtcatctccctcgccaccgaccagcacatcggcgccattgccgccattgagcgtgtcgttgccttcatagccatagatatggtctgcgaagccccagcctgtgagggtttcgctggcggcggtaccttcgatcatggtctgggcgacggtgtcttaagtatctccaggctgacgccatcggcgaactcccctgctatcgcagactatcagatcggccttcgtgcttaacgggcatccgccgcggcgcatacacacgagcgctcgcggccagttgagacaagcggccgcgagcaagctttaagcgatgcttagaacgagacgttcagaccaagccgcaaaccgtgatcagcgaagttgtctgccaagcggccagagtagctgacgttgaaagtcgagctgcccgacaacgcgatgtccagcccggcctcaatcatcaactcgttgcgcgcgaccggcatgccttgaacgtcgaacgcgttcccgaggagcgaggcactctgcaacgggtctgtatcaccaaatgcatggcgccagcccaacatcccggttgcgaccgtattgacccccaggccgtcaagcggtgttacaccacggaggccaagcgtcgcgaaggtggtgttggtcgaaacacctgaaacggtcaacgcactcgtgctgcctgtttcggtgaaatcatcgctgtcgtatgcgacatgggttagaccaaagaatggctcaagcgcgtagcgacccacctgatgcatgtagctggcttcggcaaagatcgaatagctgcgcgcatcatattcgcccaacgcgatatccgtcccgacggtcgacaggctgcgcatcgtctcaacatcatactcgctcatcagaacaccaccgctccactgcaggcccgggcggttctcgtccgtgctgaaatagaggccgaaggtggtgccatccgcatccgaactggcaccggcatcattgcggatagacgagtttgaatagcctgccaagatcccaacctgtaacccgttggacatttggtagtcgtatccaagggcaaagccgccagagtcacgacgggttccgacggtgttgccatccccatcgaaatccgaccaagacccgaacccttccatccagacaccttcagcgcccgaggtcccggcggggtccgcactcatgttattgcggctgacaaacctgttgcttggggtgttccgctgctctcgcagccggtgcaaaagcgtttcttgcatcacgacgacatcttgcacaaccgccgaggcgcgagagccatggatctctccggccagttgctcataggcctgacgggccgagcttggcgacatcgtcagaaccgtctgtatcagcggatcattctcatccaatcccgacagcacgctgctcaaactacgttgattggaggtaagcgcaatatcttctaagccgatgtcattgcgcgacagatccatccagacttcggtgcccgtgtaacttaactctggtgtcatgaaggccagttctgacgtcacgccatcaaactctccttgaacaccaccctccgctagagcgatccggtatctggatagcagattgaagtcggcagtgctttcctggtggcgcacggtgccgccatccacggtaagcgtgccggtaaccgacagaaagtcgctgccagttggatccgcatcgaccagatagaaagagccagcgtcaaagctggcatcgccttgaaccgtcagcgtgccgaccggggccagattgccgcccgtcgccacatcaaggctagacaccgtgccgctgccgccaaaggtcccgccattgagaacattaagcgtaccacccagagccccctcgcggagcagcaggctgccgccttcgacgttggtcgtgccggcaaagccgctgctgtcagcggtcagcgtcgtctcgcccgacagatgcgagatggtcccaatgcccgtgaaatacggggcgaactgataaccttcggtattgtggttaaacaccagctccgcagtccctgggccgaagcgcacttcatcaacagcgacaataccagcgccgacggctgcagcgccccgcgcagccccgatattcactgtcccggtcgagcccgcattttcggcgatacgaagggtcgtggtgccagccccttccgccgcctccaaggtcgccccatctgacagcgtcgcaacgccctccccgttaaagccgactctcatggttgtctcgaccgcaatacggctttcagcgccggatgcctccagatcgccgctgctgcccgcaaaccagccgagcatcacttggttcgcttgcagacggccgccgtcggtgactgaagcggtgccagaagcgggcgtagtggtgtggttgcccaggacgaacacttccccaaccgtcagagcactgccagcgccgtcgattgtcactgttgcagttgcgtcgtcgttacgcgtgccgacgaccatccgtgccgccgcgtccacggtcccaccgtcgcggatgttgagcgtgccggacccgtcccttaatgccaggttcaaagtgcccgtggtcactgtgaagttcgaaccggcaccgctgacttccattgtcgccgggccgtcttgaccgattgtcgccccaccggccgtgacccgcgcaccatttgtcacggaaacggtcgagccttcggtcgcacctgccaccaaagcgcccaatgtggcggtcgtgccaacaccatcgaaagacagagtgctgtcttggcttccctcagggccgcccatattgacgaaaccatccaccaccaaatcggcaccgtcagaaaaactggcggttccggagccatagaacccaacttccagcgaattggttgtgagaagactgtcgtttcccgttacattcagggtgcccgattgctcgaataaccggttgttgggattagcgttgatgatgttgacgccgatggttgtgctattgagggtcaactgggccccatttcgaatggtcagttcagcgcccgcaagcgaccccagaaacacgacgtctaccgcgcgcggatcgccgccgtccagaacgggctgattgtcaaccggctgaggttggttcggacttccagaaaccaacaaatcgcgcgagatggtgacccgatctgtctctcctggaacaccgtcactccagttggcggcgttgttccagtcggaatcctccgcgccggtccagacggtctgggcctgcgcggcatcggccacaaaactggccacgactgccgaaatgaccaagctggcgatatttatacgagattgactggccgatgaggctggcgaattaatcacaaagactactccctttaagtctgttttctgaagttttcgagatttgtttgacttcttcctcgccacccaaaggctggcgagatcacgtaacggtgtgtctgattgtccctgttccactcacgtactgcgatgggcagagggcgcgattgatggcgacgcgcggccaccaaatctgcgggcaagacgcccgggtccattggtgtatagattggcattggtgtgcggttcggtcgggtcaacgcgcgcagccgcccaggggcaaacaagcgccaagatcgctgcttcggtaaagtaggttccccgcacgatcaccagataccgcgcgcccatccggcgactgcgtccggttcttgacactcgtcgcgacggtcgttgcaaccaacaccgcccgcatcggcgctctgcgcatcctcgcaccccttcaccactgatctttgcgccgtcatgagcaagatattgccgattagttgcacatgaaaatgacaacctcatgtccgatgccgatcacccaagagctgttgccccagcgcaactaattgctgcaccagcaaaaaaaacgaacgcttgttcatcaattgttaaggccgccgagaatcatcccatgagcgcgggatgtcgtgattgacggggatggtgatggccgttcaaccggccaggctccaccggcgggcaagacaccagagaggatcgcgccaaatcacacctatagtgccgacccaatcaggcttatcttgagcggttcggcgcgacagtacgcgtggcacatcccatgctagacgacgcgccaattgagcctgcgtttggtaaggcaattcggatgcctcgggtccagacgcgccgagatgcctatggcattgggccgggtaaaacgggttggagcaacggcaatcagctaaaggaccgtccgctcacagcaagccgacacgccacaaagaaaaacgcgggccgtggcccgcgtcttgatgtggtgcaatcgagtgcttgttaacggctcgaccacgaattctgaatgtggaaatactgtaaccgatctcgcgatgcggtccaagcaaaaaaatcctcaatctgaaactacgcttctgtcagcactcaacctaccacttataccccggcaaacggcgccacacttgtcattgcgtgtcggtcgacggtggctttgaagtgctacgcgcattcttgcggccttgggcgtcgcaaaggacaagcatcaccactctccaaccgaatatctattaaatccaatggcccacgctctgatttgattgccaaagccactcatttttatgactaatgtgttgtggtaattggtttggagcattctctatgcacacgcgtctcggcctcgatatcggcaccaactccatcggctggtggctctatgaaacggatggcgaccggatcatctccgttctcgatggcggtgtccgcatcttctccgacgggcgcgacccgaaatcgggggcgtccttggccgtggatcggcgcgcggcccgctccatgcgccgccgccgcgaccggtacttgcgacggcgcagcgcgttgatgcgcaagctggcggaggccggcttgatgccgaagcaccccgccgaggcaaaggcacttgagtccctcgacccctacgcgctgcgggcacaagggctggacgaagcgcttccattgcaccatctgggccgggcgctattccatctcaaccaaaggcgcggcttcaaatcgaaccgcaagaccgaccgaggcgacaacgagtccggcaagatcaaggacgcgaccgcgcggctggatcaggcgatgatgaccaaaggcgcgcggagctatggcgagctcctgcacatgcgccgtgccgccgcgcccgatccgcggcagacgccctcggtccgcacccggctgaccgtcgcgcgccgcggccatgccgagaaggaagaggctgggtatgatttctatcctgatcggcggcatctggaggaggaatttcacaagctttgggatgcgcagggcgcgtttcaccctgaaaccttgaccgatgatcttaaagacgcactctttgagatcatcttctaccagcgcccgctgaaagcgccggccatcggcctgtgtctcttcgctggcatgggcgatgtgccggacggcgagcgccgcctgcccaaagcgcatccgctgacccagaggcgcacgctgtatgagacggtcaacaacctgcgggtcacctcggatgggcgggagcggcgcccgctcaccctggaagaacgcgatcaggtgatcgggcttttggacacgaagaagtccaccaaaaccttgacctctatggcgatgaaactcccggctttggccaaagcgctaaagctgccgcccggggcccgcttcaccctggaaacggccaatcgcgatgccatcgcctgcgacccggtgcgcgccagcctgagccatccagaccggtttggaccaaactggtcaaagctcgatcccgatcagcaatgggagatcgtgcgcagcatccaagcagtggaaagcgacgccgaacacagcgctttggtggattggctttgcgaagcgcacgggctcaaccgggaccatgcggaggccacggcacatgcaccactgcccgagggctacgggcggcttggggaaaccgcgacccggatgatcctgtccgtcctggagaacgacaaggatgaagacggctatccgctgacctatgccgaggccgcaacgcgatgcttcgggcaccattccgacatgcgcaccggcgaggttctggacgccctgccctactacggtgagactctggagcgccatgtgatccccggcactggcgaccggcatgatgacgacatcacccgctttggccgcatcaccaacccgacggtgcatattggcctgaaccagttgcggcgattggtgaacggtatcatcaccgttcatggcaagccggatcagatcgtggtggaactggcccgcgagctgaagatgtcggagaagcagaaaaccgaggtcaacaagaagaaccgcgacaaccgcgcggcggcagagaaacgcagcgagaagctggccgagcttggtcaagccgacaccggcgcgaaccggatggtcctgcgcctctgggaggatctggggcatgatgtgatgacacgcaactgcccgtatactgggcagcggatcagtgcggggatgctgtttgacggcgcctgcgacgtcgaccacatcctgccctattcccggacgctcgacgacagtttcgcgaaccgcacgctttgtctgcgtgaagccaaccgggaaaagcgcaaccagacgccatgggaagcctggggcgaaacggatcaatggcacgcgattgaagccaatctgaaaaacctgcccgacaataagcgttggcgcttcgccccagatgcgatggaacgcttcgaaggggaaaacgatttcctcgaccgggcgctggtcgacacgcaatacctgtcgcgcatcgccaagacctatctggaggcgctctacaccaaaggtggacatgtctgggttgtgcccgggcgcttgaccgagatgctgcgccggcattgggggctgaactccctgctgcccgaccacaacaaaggcgcgggcaaggccaagaaccgaaccgaccaccgtcaccatgccatcgacgccgccgtgatcgcggccaccgaccgcggcctgatcaaccggatcagcaaggccgccggacgggaggaagcggatgggaaaagtgccgaagacatcgcccgagacacaccggaaccctgggagcatttccggtcggacatccgcacgcagttggacaagatcaccgtcagccaccgtgccgatcacggtcgcatcgacccgcaggcccgcaaacagggccgcgacagcaccaccgggcggctccacaatgacacggcctatggcatcgtcgatgaccaaagcgtggtcagccgtgtgccgctccttgccctgaaaccaggcgatatcgaagtgacatcgcggggcaagaacatccgtgacccgttcctgcaaaagcacttggcccgggtgacgcgcggcaagacggcaccgaaggagatcgaggccgctttagtgcagtttgcatctgctgagacactgcccgatgggaaagacaacccctatcgtggcctccgccatgtgcgtctgatcgagagcctccaagcctcggcccgggtcgtgccgccaagccagcccttcaaagcctataaaggcgacagcaaccactgcttcgagatttggcggatgccggatggcaagccgaaagcccaggtcatcaccacgtttgaggcccatggcgcggatccgcgcaaaccccatccggcggcaaaacgacttctgcggttgtttaaacgcgacatggtggcgatggagacagacggtcgcacggcgacctactatgtgcagaaattcagccaggctggcaccctttgccttgcaccacaaactgaatccaacgcggatgcccgagaccgcgacagcgccgatgacttcaaactgatcaggaccagcgcaagttcaatggtaaaggcggggattcggcgggtctttgtcgacgaaatgggccgactgcgcgatccgggaccggcaggttagcggccagattcgcccgaatcggcaaaatatgccatgcttccaagctgttgggagtgtgaccagtggatcagattatcgatatcgccgtcgatgggcggcacctgtcgcgcgatcgcggcttcctgaaagtctctgaaaatggccaggagattggccgcactccgcttgatcagatcgctggcgttatcgtgcacgcccatggcacgacctggtccacatcgctcctgacagaactggccgatcgcggcgcgccagtagtcttgtgcgggtccaatcatgcgccgcgctctgtcctgatgccgctggaaggccaccatgcgcagggcggtcgcctgcgcgcgcaatggcaggccaaagcgacgctcatgaaacaggcttggaagcagatcgtggcctccaaaatcgcgatgcaagccgctgcccttgaggcggtgggtcagtcccccgcgcccctgcggatgatgatccgcaaagtcacctcgggcgacaaaaccaatatcgaagcgcaggccgcccgccactactggccacgaatgatgggcgatgacttccggcgcgacaccaacgcgccagacgtcaatgcgctcctgaattacggctataccgtcctgcgcgcgaccaccgcccgcgccgtcgttgccgccgggttgcacccttccattgggttgcatcattccaatcgcggcaacgcgtttgcgctggccgatgatctgatggagcccttccgccctctggtcgattgcgccgcgcgccgtctggccacacaaaacggcgcgaaggtcgacacagcagccaagcaagcactggcccgattgatcgccattgatctgcctctcgatgacgcgatgagtccggtttctatcgccgtgatcaaactcgccacctcgcttgggcaaagcttcgagaccggcaagctctctctcgccctgccgcgaccgcccgataccctgacgctcgcggggttgggtgcatgacctttcagcccgccattctttcaggataccgcctcatgtggatacttgtgatgttcgacctgcccaccgacaccaagccgcagcgcaaagcggccacggatttccgcaacttcctgctcgacgggggcttcgagcggagccagttttcggtctatgcccggtttgtgaatggcaaggaggcgtttcagacccgggtgacccgtatcgaacggaacctccctgcgatgggcgacattcagatcctcaatttcacggatcgtcagtatcgagatatcattcatttctcagatcaagggcgacgcgcggcgcgcaagaatccagagcaattggtgatgttttgaagataattgagcggatttgcgtaacaacaaaccgtgtatcctcttgtaaaaacaagaagatacacggcgatcgagtttagccattcagaattcgaggtccagccgcaacacggctggaggccagaagattggccagagtagtttagccattcagaattcgaggtccagccgcaactcgcccggataggggcgcagcttgttatggagtttagccattcagaattcgaggtccagccgcaactcctggccggacatccggttgaagagatcggagtttagccattcagaattcgaggtccagccgcaacgcgtcgaagccgcccttgccaaaaggcgcgagtttagccattcagaattcgaggtccagccgcaaccgttgcctgcatcccctcgcatggcccagcaaccggacgcacagactcggatgccgaacagctagtcgacatcccgtctctcgccccttcggcccaccgccatcgtcgccgatctacggcccggcttagccccgggatgggaatcgcttgacaactttgcggcacgcgaaccaaagtaaaattggttcggaccaaatccactttggtcccggttctggagaaagccgtgcgcgatacagctcagatcatgcaagacaacgcgtcgctcgctcgcgccaagattcgcgagttgatccgtcgtggcgcggtcgagaaagacggaaaacttccgacagaacgggagctatctgggcgcttcaatgtcagccgccgggccgtgcgccgggcactagatgcgttggaggtcgaagggctggtttggcgacgtcagggcaagggtacgttcatcggcgagccaccaaaccccaacgatcatttgatcgccgcgctcgcgcccgatatcgaccccatcggggtgatggaggcgcgcctggcagtcgagcctgaactggccgcgctttgcgcccgccgggcgaccgccgaggatgtcgcgcggatgcgtgacttggctgaccgagcatcgcaggtgaccgattccgatgctgccgagctctgggacggcgcgctgcaccgttttatcgcccgcgtcgccgataacccgatcttgcacgccgcatttggcctgatcaatgacgtgcgaagcgacgcccgctggcagaccgagcgccagatggcccgctcgaccaagctcgtcatggaatacgatgcgcagcacctggacatcatcgccgcgatcgacgcccgcgacgaagatgcggcgcgcaacgcgatgcgcgcccatctcaacgcgctcaagaccaacttggaatccgcccgccagaaagggccatcatgaccgccacacctgcacctcttttggaggttgcccatctgtcgatccggttgggacgtttgccacagaacatcgtcgatgatgtctctttcacgctgaatgctggtgaaaccttgtgccttgtgggggagagcggctgcggcaagagtctgaccgctctggcgctgatggggctcttgcaatctccgcctctggcgattgctggcgggaccgcgcgatttgagggggaagacctgctgacgatgccgcccacgcgcctgcgcgagacccgcggcggccggatggcgatgatttttcaagaaccgatgacctcgctaaacccagcgatcaaaatcggggagcaaatcgcggagtccgtccggcggcacaaacgtgtctcccccgccgccgcgcgggagcgcgctttggaaatgctgcgccgggtgcgcatcccggccccggaaaaacggcttgatgagtttccgcatcagctctctggcggtatgcgccaacgggcgatgatcgccatggcgctggccaatgacccgcaactcttgatcgcggatgaacccaccacggcgctggacgtgacgattcaggcgcagattctcgagcttatgcgcgacctgcaatcggaaacgggtgccgcgatgatcatgatcacccatgacctgggcgttgtggcagagatggccgataaggtcgccgtgatgtatggcggtcgcattgtcgaggcgggcacgaccgaggcggtcttcaccgatccgcagcacccttacacaatcggcttgatgagctcgatgccctcccttggggatcgtcatgaccggcttgtcaccgtgccaggtttggtgccgcaaccagccgagatgccctcaggctgccggtttgtcacacgatgcccctttgccgcgccgatctgtgccgatgtgccgccgttgcaaagctgcggcgaagatcacgccgtcgcctgcgcccgcgccccgctggaaaccctggccgccgcagaaatgcaggagacaggaacatgagcacggccctgtccgcgcgaaacctgcgcaaggaatttgttaccgcccgcccgcttttcggcgctccgacggtggttcgcgccgtcgatggcgtgtcgctcgacatcgaggcaggggagactttcgcgatcgtcggggaaagtggctgcggcaagtccaccttggcccggctgctcttgcggttgatcgatccgaccgatggcgaggtctggttcaatggcgaggacttggcccatatcgataccgcccgaatgcgggccctgcgaaaggacctgcagttcattttccaggatccgttttcgtcgctgaacccgcggatgaccgtcggcgcgctgatcgccgaaccgatggaagcccatgacatcggcaccgccgaaagccgccgtgaccgggtggccgaacttctgacccgcgttggtctccccacggccgccgcagatcggtttccgcatgagttctccggcggccagcggcagcggatcggcatcgcgcgggccttggccacaagaccgaccgtgttgatcggggatgagccggtctcggcgcttgatgtttcgatccaggcccaggtgatcaacctgttggaagatttgaaagacgagttgggcctgacccttgtggtgatcgcgcacgatctggccgtgatccggcacatggcggatcgggtggcggtgatgtatctcggggaagtggtcgaatgcggcccggccgatgcgctgtatgagcagccacgtcatccttataccgagacgctgctggccgcgatcccaatcgccgaatatggcgcgcgccgggccaggatcgcggttgaaggtgatccacccaaccccatcgcgccgccgcctggctgccggttccacacgcgctgcccctatgccaccgatctgtgcaaaaccgagcggccgacgctgagcgccctgcccgatggccgccaagtcgcctgccaccacgcccaagatttgacgcttgagggcttgaccagcatcgaacccgcccggagcgccgccgccgcagagcgcttcgccctttacgcacgcggatcaagcgcatcggccaccgaaaatccgaataacgactcgtaagtgagcacccaaatccgaacagatggaggaattccagaatgatacgaacgaaacatatcgcccttgcgctggcctttggggtcgcggcaacggcccttcaagcgcaggatttgcgcatcggcttgcaagaggaccccgacgtccttgacccggaccaatcgcgcacattcgtggggcggatcgtctatgcctcaatgtgcgacaagctggtcgatatcaccccgggccttgagatcatcccgcaactggccactggttgggaatggtccgacgatggcctgcaactgaccatgaccctccgcgagggcgtcgtcttccacgatggcacggcgtttaacgccgaggcggtcgcagccaatatcgaccgcagccagaacctgccggagagccgccggaagtcggaactgggctcgatcaccggggttgaggtggtcgatgactacacgattaccttcacgctcggcgcgccggacgcgaccctcttggcccaattcgccgaccgcgcgggcatgatgctgtcgcccacggcctttgaagcggcgggaaccgatttcggcctcaatccggtgtgctccggcccgttcagcttcgttgagcggattcagcaagaccgcatcgtgcttgatcggttcgctgattactggaacgccgatgcgatcaacgtcgacagcgtgaccttcctcccgatgcccgacaccaccgtgcgtctggccaacctgcgcgctggcgatctggatatgttggagcgtcttgcggccaccgatgtggcctcggttcaggccgacgatagcctgacgatggaacaggccgtgtcgcttggttaccaggggattacgatcaatgtggccaatggggcgggtgccgacaatccgcttgggcaagacgaacgcattcgccaagcgttgtcgctttcgatcgaccgcaacgtgatcaaccaggtcgtgtttgaaggtgcctttgcccctggaaaccagcccttcccgccaacctcgccctggtacaatgacgcctaccctgtgcctgagcgtgatgtggaggccgcgcgcgcgcttctggccgaagccggatttgccgatgggatcgacatcaccgttcaggtgccgaacaaccctgtccaactgcagatgatgcaggtggttcaggccatggcttcggaagccgggatcaatatcgagttgcaggccaaggagttcgccaccctgctcgccgatcaatccgccggtgactatcaggcaagccaggttggctggtctggccgggtcgaccccgatggcaacatccaccagttcatgaccaccgatggcggcatcaacgacagcgcctattccaacccagaggttgaccgattgctgaacgaggcgcggacctcgaccgacaccgatgtgcgcttagccagctacaatgccgcgcgggatattctgatcgaggatacgccgatcatctatctttaccacgtgacctggatctgggcgctggatgatgcggtgcaggggttcgtgccctaccccgacgggatgatccgcctggaaggtgtcaccctggccgaataatcggctgatctaaactggctccgcgcgacacccctcgtcgcgcgggccacccccacgccgccttcacccctgggagagcgcaatgctggccttcatcggacgccgtatcctcatcgcgatcccgacgatcatcctgatctcggttttcgtcttcaccttgcagcatctgctacccggcgatccgatcctggttttggcgggagaagagcgagaccccgaagtcatcgagttcctacgggagaagtaccgcctaaatgacccgatcccgatccagtatctggcctgggtcggcaatgcgcttcaaggcgacctaggcatttcgctcaggacaaatcagccggttctggaactgatcggtgagaagcttccggtcaccttacaattggccacgatggcgctgatcattgccatggtgatcggcatcccggcgggtgtcctctcggcctataagaaaggcacctggatcgactgggtcgccaatgtcgttgccctttcgggcctctcagtgccgaatttctggctggggatcatgatgatccttctggtctcggtgcagcttggctggctgcccgcctcgggctatcagccttttgctgatgacccgctccaatcgatcaagaccatgctgatgcccgctttcgttctgggaacggcgattgccgcaacgctgatgcggcacacccgctcagcgatgctgagcgtgctgaaatccgattatatccgcaccgcgcgcgccaaaggcctggcggagcgcgtggtgttggtgaaacacgccctccgcaatgcgcttgtgccaattgtcacggtcacaaccttgatttttggagagcttctggccggcgccgtgttgaccgagcagatcttcacgatccccggctttggcaagctcgtcgtcgatgcggtctttaaccgtgactacgcggtggtgcagggcatcgtgctgtgtaccgggatcgcgttcatcttcatgaacctgctggccgatgtggcccaacgcattctcaacccacgtatgagggacaaatgagcgctctgaccgattcacagacgcccgcagggacgctccccaaaaggcggagccgcttctgggccaagatgcgcaaaaaccccgcggcgcttctgggcggcgcgctggtcctgttttttgtcattgtggcggtaatggctccgctgatgccgatcgtcgacccaaccgcgacggactggctggccgtgcggcaagcgccgtcggccgcgcatcctttcggcaccgatgagattggccgcgatgttctctcccgcatgatctggggcgcgcaggcatcgcttctggccggggtggtctcggtcgcgatcgcggtgtgcctcggcgtgccgcttggtgttgccgccggttacatgggcggctggaccgatgcggtgatcagccgggtgaccgaggcgcttctggccgcacccttcctgatcctagcgattgcgctggcggccttcttgggccccaatctgaccaatgcgatgatcgccatcggtgtgtctgccatgccgattttcatccgtctgtcccgggcgcaaaccatgtcggtgatgaccgaagactatgtggaaagcgcccgcgccgtgggcctgaaaccccttgttctggtgcgccgctacatcctgccgaatatcttcccgcccctgctagtgcaggccacactcaccatcgcaaccgcgatcattgctgaggcctccctgtctttccttgggctggggcaacagccgcccgcgccgtcttggggctctatgctgaacgtggcgaaaaacttcctggaacaagcgccctggatggcgctttaccccggcgcggcgatcttcctggtcgtgctggggttcaacctgctcggcgacggtctgcgcgatgcgcttgacccgcgtgatcactaatggctcgactatgaaaggcgtgttcccaaaatgacgtttacgacccgtcccgaaatcactggcacctttggggttgccacgtcgacccattggatcgcctccgccattggcatgaaaatcctcgaaagcggcggcaacgccttcgatgcggcggcggccatgggctttgccctcaccgttgtggaaccacatctgaacgggccgttgggcgatatgccactgatgatccgcaccgccggggccgaggcgccgcaaatgatctgcggacagggcaccgcccccgcgaaggccacgatagcacattacaaaagcgaggggctaacgctgatccccggctcgggacttctggccacggtcgtgcccggtgcgttcggggcttggatgctgatgctgcgcgatcacggcaaactgtcgctgcgcgaggttttggaacccgcgatccactacgcccggcgtggccatccggttctgccccgcgttgcccataccatcgccggattggccacgttcttcgaggaggaatggccgacgtcgcacgcgacctggctgccgggtgggtccgcccccaagccgggcgaattgttccgcaatcccgacctggccgacacgtgggaccgcctgctgggagaggctgaggcggttgacggtcgggaagcgcagatcgaagcggcgacagacgcattctacaaaggcttcatcgccgaggcgatcgatgattatctgcaaaccgccagcgtgatggatgccgcaggcggtcgccgcaaaggcgtgttggccggccaagacatggccgattggcaagccacctacgaagacccgctcagcgttgactatcacggttggaaagtctggaaaggcggcacttggacccaaggcccgacgctgctgcaatctttgatgactctgtctggcctcgacatcgccgcgatggatctgaatggcgcagagttcgttcataccgtcaccgaggcgatgaaactaagcttcgcagatcgcgaggcctattacggcgacccgctccataccgacatcccggtggaaaccctgctttcggcggagtatgcggccacacgacgcgcgcagatcggtgcaacggcgtctttggaccaacgccccggccagattgcaggtcatgaggcctgggcagaggccgctatcgacagggctgggcgcgatatggccgcaggcccgggcatcggcgctggtgaaccaaccatggcgcatttgaccgagcggcgcggcgacacggtgcatatcgatgtgatcgaccaatggggcaacatggtttcggccacgccgtcgggcggctggctgcagtcatcgccggtggttccgggcttgggtatgccactcaattcgcgcgcgcagatgttctggctggacgaaggcctaccaacgtcgctggcgcccggccggcgaccgcgcacgaccctctcgccctcgatggcggcgcggacggatggctcactagatctgaccttcggcacgcccggcggcgaccaacaggatcaatggcagctgatctatttcctgcgcctggtccatggcggcctgaacctgcaagaagggatcgacgcgccgctgttccataccgggcatctccaatcctccttctatccgcgtggcgtgcggccgggtcacctgatggtggagccggcctttgacgaggcggtgatcgccgatctgcgtcgccggggccatgatatcgaactggccgagccttggaccgtgggtcgcctgaccgccgcctcgcgtgatcgggacgggctgctcaaagccgccgccaccccgcgcctcatgcaagcctacgccgccgggcgttgagacaggagaacc

SEQ ID NO: 3670 - DNA, 23258 bp, synthetic construct
  misc_feature 1..23258: note = Synthetic
  source 1..23258: mol_type = other DNA
cccagcttgacgtgggcaccaccgcccaggtcataggccgcggccaggccgtaaccggaggcacccgagtcatactccccccagttcacgtgaaccgcaaacggggcagcatcatagcccaggccgatgccgatgtgcgaatcgtcccgggtgaccagatcggcgggctcgccactgatcttggcactcaggacgatttcttcgggcagatagcacggactggtcgcacttacagctacaccttcgcaggtgcgattacctgtaggattaccatctgcatccatctcagccacatcgcgataaccagcatcccgcacaccattattgttggtatcaccttcgacaacccactccgtagtgagcgtcgactcgcgaacggtgggaatgccggaccagtcgctgtattgcagggcggcagagaagccgttggccatctcggccctgacgctcaggccatagatcttctgatcacccgtgacattgaaatcggtggattgatagcccgcaccaaaggacaggtccatgccggacagtgccatggcataggtggcaccgatggccatggagccgccgttggcgttgctgcccactttgccatcgtcgcccgcggcctgttccagcgacacggcaacgccgaagtcaccaaagttggtgtgataccgcaggatctggccgtcagcgtcggtttcgtcagatgcactatcgtcaaagccggacatcgtaacaacgtcatctttcttgaactcaaagccatccttggccagattcaagggacgaccattgcgttcggctccaaggacattgatggcagcatgtgtcgtctgggcgtgggccacggtggagtcgcggtagatgatccatttatcgtaatcatcttgattggacccgtcttcctccagatccacctctggcacctcgtcacccgtgtcaccctgttgtggtccgtcgtttttcctggcatgcgtgacagcgatattagcagtcccaccatcaacggcgatagtcggcctgccatcatcggtgtaatcagcagcatccttatcgacttcaaccacaaccgcacggcgggtgggcatcacaggcagcgcaacactcgtcgccccgtcaccataggaaccgaggtagcccgtgtggccagtctcggcatcgtcgatggagcccgggctgccggcggtgttggcctcaaacatcgcccagtctagggcaccgtcggtatcgcccatggtcagggtgccgaacccgcccgagatgaacacggtggtgccgccatcgtcatactttgaggtatcctcgatactttcatccagatcgacggacgcgccaaaggtcaggccgttatcggtggtccctgacaggccgaaggttacatcgacatcctgccagaactgcacctcgtcgttacggtcgtcgtcgtcgccaccgacaatgcccattttggcggacccgctcagcgagacctcggcctgggcggtgccagccagggccacaagggccgtggtggtgtaaagaacctttttcattggttcgtttcctttgctgtttgcgtgtgccggaagggattttccagccttgcgcgtggggggaatgtggcgcgccggggcggcccgtgcaagcactgcgaacaggcgggggaaagattgtgcgcaggtgttgcaaaatggccacagttgcgggggcgggggggggctgcggttgcggggtgatggcgggggtgcggtgtgtggcgggcgaggttttggcccgcggtgccttttcatggcggggtgccgcggttgcgggggccttgccgcgcttgcccgtcgggagattccgcgataggctgattcccacgggcggggatcccccctccgcgcttgcccaccggcggcctccgggataggctgatccccacaggcgagaaccccttccccgccacaggtaaagaaaggacaccgccatgcccgccgttgatacccgcaccgccagccgcaccgccacacgccccccggctgaatcaggcgttgaccaggaaggggccgaggccctgcgcccggatatggccgattttgccaccaagtttgccaccaagaaggatctggccgaggtaaaggccgagatcgccggcgtccggaccgatatgaaggacgagttcgccaaggtccgcgccgagatgaaggccgatttcgccaccaaggccgacctgcgcgccgagatcgccgaggcagaaaccagattggtcaaggaaatcgctggggtgaaggcagaattgcgcaccgagatcgccggggtaaaggagggcctgggcaaggaaattgccggggtcaggtccgatatgaaggaccagatcgccggggtgaaggagggcctgggcaaggaaattgccggggtcaggtccgatatgaaggaccagatcgccggggtgaaggagggcctgggcaaggaaattgccggggtcaggtccgatatgaaggaccagatcgccggggtgaaggagggcctgggcaaggaaattgccggggtgaaggagggcctgggcaaggaaattgccgaattccgggccgggatgaaaaccgacctccgctggataaagggcatcggaggcgcaatttttgcggtggtgctggtgctactgggggcctgggcccgcggtgcctttttctagtgggcggttatagcggacggcccccgcccccttgcccactggcggactccgggatatgatacccccgcaccgcgacagggattttgccaaggataccgccatgcccgccgttgatacccgcaccgccagccacccccaggaacaggccaaggccaagatccagaccaaagcccgccacccggagcaggccgatttcgccaccagggcggacctgacccccttggccaccaaggccgacctgcgcgccgaaatcgccggggtaaagaccgagatttccgaggcaaaggcggaattgggcaaggaaatcgccggggtcaggtccgatatgaaggacgagatcgctggggtaaaaaccgagatcgccggggtgaaagagggcctgggcaaggaaatcgccggcgtagaaaccagattgggaaaggaaatcgccggggtagaatccagattgggcaaggaaatcaccgatgtgagggccgacctccgctggatcattcgcatcgggggcggaatctttgcggtgctgcttgtggtggcgtggtttgccgcccgcagtgcctttttatagcggacggcccccgcccccttgcccgtcgatggcatccgggacaggctgatccccacaggcgggaaccccaccccgccacagatagagaacggacacaacaatgaccgcagttgatctccaagaggatctggccgacttcgccaccaacgtggatctacgcaccgaaatcgccggggtccgggcggatatggacggcctggaacgccgcctgcaccgatgcgaggggaacgcgatgaaaaaccggattaatggatcgccgcgccgggagctaatcatcctgtcggatctgttgtgtgttatgttgggtttcgcattagcaatactagttctgccgtggccatgaatgctggccggggcccggcgggcggttgccgttcgcactgccttttttagcgaactgcccccttccccgcgcacttgcccctcggcggactccgggatatgataccccccacaggcggttcccttcccgcaccgccacagggaaaggacacaccaatgaccgcagcccagacccggattgagacccaggaggatctggccgatttcgccaccagggcggacctcgcccccctggccacaaaggccgatctggccgattttgccaccaggaaggatctgcgcaccgagatcgccggggtccgggccgatatgaaggccgattttgccaccagggccgacctgcgcgccgagatcgccgaggcagaaaccagattggtcaaggaaatcgccggggtagaatccagattgggcaaggaaatcaccgatgtaagggccgacctccgctggatcattcgcatcgggggcggaatctttgcggtgctgctggtgctggtgtggtttgccgcccgcagtgccttttgatagcggacggcccccgcccccttgcccaccagcggactccgggatatgatacaccccgcaccgcgacagggattttcttgaacgacaccgccatgcccgccgttgatacccgcaccgccacccgccccgcggccgaatcaggcgttgaccaggaaggggccaaggccaaggccctgcgcccggaccaggccgatttcgccaccagggcggacctcgcccccttggccaccaaggcggatctgcgcgccgagatcgccggggtaaagaccgagatcgccaaggcagaaaccagattgggcaaggaaatcgccggggtaaaggagggcatgggcaaggaaatcgccggggtcaggtccgatatgaacggcttggaacaccgcctgcgcctatgcgaggggaacgcgatgaaaacccgggttgatggattgccggaccgggggggtaatcatcctggcgggtctgttgtgtgtcttgttgggtttcgcattagcaatactggtgctgccgtggccatgaatgctggccgggacagcccctgcgtccggctgctgtgcctggccgcggctctgccggcgattgaatacgcctgatcatcccgtgcaggcttaatcatcacggcccggcgcggcaagcaccgggggttgttcatggggggccgaaatggcattgcccgacatcaccgctgccatcgccagggcctgtgccgccgcgcagcgccccccggacgctgtcacgcttatcgcggtgtccaaggtgcagccggcgaaccgcgttgccgccgtgctggaccagggccatcgcgtctttggcgaaaaccgcgtgcaagaggccgcgaatcgctggcccccgttctgcacccgatacgataccatcgccctgcacctgatcggccccctgcagggcaataaggcccgccaggccgtcgagctcttcaccgcgatccatacgctggaccggcccaaactggcccaccgcctggccgcactggcccaggaacgggggcacagcccggacctgatgattcaggtcaacactggagaagaaccgcaaaaggccggaattccgcccgccggggccgacgccttcatcgcccaggtccgcgcgctggatctgccgctaacgggcctgatgtgcatcccccccgcgcacgaggacgccagcctgcatttcgcccttttggccaaaattgccgaacggaacggcctgcccaacctgagcatggggatgagtgccgatttcgcaacagcgatcagtttcggtgccacccatatccgcgtgggaacggcgatcttcggggaacgccccgtcctgccttaaccagcccgacagatcagccgcgccctgcggccaaggcgcgcgacaatccagcgcagatcgccccgcgcaagcgcaacacagcccgcggttggcgcacccggccaccgccattgatgcagaaaaatcgccgaccccgccccggggaccgcgcggggccagttccagtccgtcagcaggatcagatcatacagcgggtccgcccgccacagccgttcgtgccggccggaacagggcgcgcgcagcatgcggttgtactccgccgcgccgggatcatcggaccacagatttcctgggcgcaggggcaccgcccaggcgcagggccgcgccacgcggtccgggcgatacaggcacccgacaatccggtgcaccccggcgggggttgcgccatcgccctcgcgcttttgggcccgcaccccgccgcgcccgatgctgcagggaaagcaccgcccgcgaaaccgcagccccccgggcgtcagcaccagatccgcccgtgtcacagacggtgttacagacggcgtcacagaagatgccccgacttgcgccgctttacctgcagatactgcgcattgtgccggttggccgccgtgatcagcggcacccgcgcggcgacctcaaccccctcggcctgcatcatgcggaccttgcgggggttgttcgtcagcagctgcaccgaacggatgcccatgcgccgcagcagcccggcacctgtgcgaaagtcgcgctcatcatcctcaaaccccagccggtggttggcctcaaccgtatcaaagccctggtcctgcaacgcataggcccgcatcttgttggccagcccgatcccccgcccctcttgattcaggtacagcagaatgcccgcccccgccgtgcccatcctggccagggccccgtgcagctgcgccccgcaatcacatttcaggctgcccagaacatccccggtaaaacaggccgaatgcagccgcaccagaaccgggcccggccgcggcgggcggccgatttcaatggcgtaatgctcaaccccgccatcctcggggcgaaagatgtgcagtttcgcatcctcggacgcctgcagcggcaggtgcgccgccgccaccggggccagggggtgctgtgcctgcacatccgccgccgcggccgccgccgacagaagcgtcaggttcagggccgtggcctcggcccgggcatccgccaccggcaccacgacagccgctggcaaaagtgcggcggacttcgccagcagcagggccagccggtgcagcccggcggggccgtcgcgcaaactgtgcagggggcccttcatcggcacgcgcagatcatccgccggatcggcaatggcccgcacccaggcggcatcggcccccccgggcagggtcagccgcgccagatcgccgtcataggcccgcgccttcagcgtcgcggcccgccaggcggtaatggccagcaccaccgcgccccgcgcccgcaattctgccagccgcgcgtcccccagcacctcggcagcgatggccaggacgcccccgccccggtcatcggccagcaccaccggcagccccatgcgcaaatccgcctgcccacgggcaacaagttcggtcaatgtcggcagcaggcgcattcaaaggcacatcaaaaagcggtaacagggggccacccccttttaaccagtgccgcagacatgtgaaatacggcacccgtccccgcacgacccgttctaacaggggcgcggggcgtcatcccgccgtgttccgctttgttccgcataattccgcctgttcccgcatcccttgccaaacgcgtggccccggcgcatcctgggcccacagacacaccactgcataagggaacacacgtggccagtgcgcacaacatcctgctgatgggcgatgatacacatctgcgccacgccctgtccgacctattggccagaaccggggaattcaacgtctttgaaacaaggaccgccgcaaggccccgtttggaacaggcacaccccgatctggtgctcctggatgccggcccgcccgataccgatgcgcgggagctgtgccgcacgatgcgccggcagggtgttacctgcccgattctgatgctgatcagccggacctgcccggctggcccgattccggggatcgattccggggccagtgattacgtcaccaaaccctgcaaattcgcggtccttctggcccgtatccgtgcgcaactgcgcgggcccgtgcaatccgtgaatgccgtgttccgattcggaccctacaggttcaggcccgcgcggaacacgctggagaccggggataacagaacgatccatctgaccgataaggaaagcggcattctgacctgtctttgtcgcgcaccggatggcgtggtggcccgcgatgttcttttgcagaaggtctggggctatggcaccggtatcatcacccacacgctggagacgcatatccatcgcatgcgccgaaagattgaaaccgacccctcggccccgcagcggcttgtaacagaacgcggcggatatcggctggtgtcctgacggcggctgacggggggcttacgcggccggtgcctgtcaacgggaaaggcgcacccccaatccctggtcccgccgccccccccttggcctttgtggtgccagaccctatataaaggtgtcacgcagaacagcagggggacgccatcaatgttggaattgggccagagcggtggtgcggccgcccagggcgagctgatcaaaaacacgaccgaggccacattcatggccgatgtggttgaggccagccgcgcggtgccggttattgtggatttctgggccacgtggtgcggcccgtgcaagacccttggcccgatgctggaggatgcggtgcgcgcggccaggggcaaggtcaggatggtcaaggttgatattgaggccgaacgacgcctggcgggtgtgctggcgcagcagggcgtgcccctgcaatctgtcccgacggttgttgcctttcaccagggccgcccggtggacatgtttcagggtgcggtgccgcaaagccgcatcaaggcgttcatcgaccgccttgccgcgctgtccggtgcgggcggggccgaggccctggaggcggccgaggcaatgctgaccgaaggcgcggttgtggacgcgatgcaggccttcgccgcgatcctgggggaagaacccgaaaaccccgccgcctatggcgggctggtgcgcgcacagatcgccgggggcgagctggaccaggcccaggggtttctggacggagcccccgccgccatcgccgatgcgcccgaggtacaggccgcccgcgcgcaactggccctggcccggcaagccgccgatgcggggcccctgggcgacctgacggctgcggtcagggcggcacccggcaaccatcaggcgcgctttgattacgccctggcacttcacgcagcgggggacacgcgggaagcggttgagcagctgctggagctgttccgccgcgaccgggactggaacgacggggccgcaagggcgcaattgttcaccatcttcaacgcgctgaagcccgaggatccgattgttctggccggtcggcgcaaattgagctcgatgatctttgcgtagcgcggcagtgcatgacatgcccaccccatgatgtcagcggctgatcttcccggaaccattccggtctttcccctgccgggcgcgcttttgctgccccgggcccggctgcccctgcatatttttgaaccccgctatctggcgatgctggacgatacgatgaaaacatcgcaccggctgattggcatggttcagccgcgcgctgtgccggggtctggccacacgcccctgcacgccatcggctgcgccgggcggctgacgcaattttcggaaaccgaggatggccgctatatgattacgctgtcgggcatttcacgctatcgcatcacgcagaaggtgtcgggctccaccccctatccgcaggctgacatctcctgggacgggttcgcgcatgatcttggcccggccgagcacgatgcgcggtttcagcgaaaggcctttcttgatctgctttcgcgctattttaaggtgctgtcgctttcgaccgactgggacagcctgaaagacgccgaggatgaattgctgatcaacgcgctgtcgatgctgtgtccctttgaaccggaagaaaagcaggcgttgctcgaggcaccatcgctgaccgcgcggcgcgaaacgcttgtcaccctgatcgaatttgccctgcgcgggggcacgccccaggatatcctgcaatgaaggctgatcgccgaatgctcgaggggctggtctgccccgtcacccgcgccccgctgcactacgatgccgaaaagggggaactgatctctaaagccgcgcatctggcctttcccatccgcaacggcattccgatcatgcttgaggatgaggcccggaaactggactgaacgccagggcgtattccgggaacccttgccatgaacgggaaacgcggcccgcaggccgcgcttcgatttggtgcaatcgagttacttgttaacggctcgaccacgaactctgaacaggattgaccttgcacggcctgttcacctgttgcaagctaaaaaaacagccaggggaggcaaaaaagatgcaaacacgcctgggccttgatatcggcacgaattcgattggctggtggctttatgaactggaaggggaggagatcgcccgaatcattgatggcggggtgcgaatcttcccggacgggcgcgattcgaagtcgaaatcctcgcttgccgtggaccgccgcatcgcccggtccatgcggcggcggcgggatcggtatctgcggcggcgggaagtcctgatgcggcggcttgtcgacgcggggctgatgccaggcgattcggaattggtgaagaagaagctggaaaaggatccttacgcgttgcgggcgcgcgggctgcgtgaagagctcagcctgcatgaactgggccgggtgctttttcacctgaaccagcggcgcggctttaaatcaaaccgcaagacggaccgcggcgataacgaaagcggtaaaatcaaggacgccaccgcgcggctggaccatgacatgatggccaaaggtgcccggacctatggcgaattccttaatatgcggcgcagcgagacgccggaaaaaccagagtatgaaggaaaacctgaaaataaggacggaacccgacaggacgaccgccgcaccaaaccggtgcgcacccgcatgagtgttgcccgccgcggcgggccggatgctagggaagaggatggctatgatttctatccggaccggcggcatctggaggaggaattcgaaaaactgtgggccgcgcaggaaccgcaccatccccgggtgctgaccgacgcgctgcgcgacgcactgtttcggataatcttttaccagcgcccgttgaaagagcccgagattggcctgtgccaattcgaaaatgaaccccgtttgccgaaatcccacccgctttttcagcaccgggtgctgtatgaaacggtcaacaacctgcgcatcacccgtgacggggacgcctcccgccctctgacccttgcgcagagggacacaatcacgctgctggacgccaagaaaccgacaaagacgctggcctcgatgcagatcaaactgcccgctttggccaaagcgttgaaattgccgaagggggaacgttttacgctgcagaccgcgaatcgggatgcgattgcctgtgatgcggtgcgtgcaagcctggcacatccagaccgaatggctggtctttggtccaaactggacgaggatacgcagattgacattgtggcccgcatccgcgcggtgcaaagcgatgcggagtttaacgacctggtcaattggttgcaggacaagttttcgctacccgaagatcaggccagggaaacggccaatgccccactgcccgaaggctacgggcggctaggtgaaaccgccacacgccggattctcgacgtgctcaagtccgatgtggtgacctatgacaaggctgtcgccgcctgcggctggcaccacagcgacacacgcaccggtgaggttctggacaaactcccctattacggcgcggtgctggataaacatgtgatccccggttcgcgtgacgaatcaaaacataaccccgaagaccaggccgccgagtattacgggcgcatcaccaacccgaccgtgcatatcggcctgaaccagattcggcggctggtgaaccgcatcatcgatgtctacggcaaaccgcatcagattgtgatggaactggcgcgggaactgaagcaatcaaagaagcaaaaggacgcgtgggaaaacaccaataaaaacaatcgcaaggccgcggagcaacgcagccggaaactggtggaacttggccaggaggataccggtgccaaccggatgattctgcggctttgggaatatctgaacaaagacgactgtatgaaacgtttttgtccctatacgggggaacgaatcagcgcgggcatgctctttgacggttcctgcgatgtggatcacatcctgccctattcgcgcacgcttgatgacagtttcgcgaaccggacattatgcctgcgtgcggcaaacagagagaagcgcaaccataccccgtgggaagcctggggtggaaccgcccaatggtccgtgatcgaagccaatctgcaccacctgcccgacaacaagcactggcgctttgcccccgatgcaatggaccgctttgagggtgagcgggatttccttgaccgcgcaattgtggacacgcagtatctgtcacgcatcgcgcgggactatcttgatacgctgttcaccgagggcgggcatgtctgggtagtgacgggccgcatgaccgcgatgttgcggcggcactggggcctgaacagtctgttgccggatcatgataaggacacggccaaaaaccgtacggatcaccggcaccacgccattgacgcggcagtcatcgccgccacggaccgcgcgcttgtgcagaggatcgcacgggccgccggacgggatgagggcgacgggcaaagcgcagagcgcgtcgcgcgcgaaattgccccgccctgggacgggttccgcaaggatataagggaccgcgttgatcggatcatcgtatcccaccgcgcggatcatggcagtttgaacggcaccgtcggcgcattgcatgaggcaacggcaatggactgggtggacaaacaccatgtcgcaacgcgaatccccgtgaacaagcttgagccaagccacctgattgagggcggcaagagcgacacattgcgcgatgaatttctgcgcacaaaacttgcccgcgcgacggacaggctggaagggaaagcgtttgaacacgctgtcaccgagtggttttcccgcccgggtccttattacggaacgcgccgggtgcgggtactcaaggcactcggggaaaagtcgcgtgtgtgcgtgcagcataaaaacacggacaagaagaaagtgtatcagggcggcagcaatcatcgctttgaaatctggcggatgccggacggcgagattatcccccaggttgtgacagtgtgggagtttcacaacctcaaaacccccaaacgcccgcatccggcggctaaacggctgctctcggttcacaagaatgacatggtggccattgaacgcgacgggaacacccggatttgcagcgtgcagaagaccagcgttggagttggggcggtactcgtgccgcataatgaagcggatgccgatgcgcgcaggcgaagaaaagaggccgtcgagtggttccagatgtccgcaacctcccttatcaagggcggaatccgccgcgtctttgttgatggactgggccgtgtgcgcgatcctggtcgccccgtttgggcagggttgacatgacgcccattcgatacgttactgcaggggcgtgacgcataagaccccatggatcagatcatcgacatcaccacagatggcctccacctctcccgcgcacgcggtgtgctgaaagtatcgcaggatggcacggaaatcggccgcaccccgcttgatcagatcgcaggcatcatcgtccacgcccgcggcacaacctggagtaccgcgcttttgaccgaactgggcgcacgcggtgtccccgttgttctgtgtgacgctgcgcaccgcccgcaatccgtgctgatgcccttagagggccaccacgcgcaggggggccgcatacgggcgcaatggaatgcaaaggccccgatgctcaaacaggcctggaaacgcatcgtactgtgcaagatcgggatgcaggcggcggcccttgcaatgacgggtgcgccgaatgcacccttggacatgatggcgcgcaaggtgacctcgggcgatacaacgaatcaggaggcccaggccgcccgctactactggccgctgatgatggggggcggagtttcgccgcgacagcagcagggccggggacgccaatgccctgctgaattacggctacacagtcctgcgggcggctgcgtcgcgggcggttgtggcggcagggctgcacccttcggtcgggttgcaccattccaatcggggcaatgcgttcgcgctgtccgatgatctgatggagccgttccgcccccttgtggattgcacggtgcgcgggatcgtggccaaggctggcccccgtgtggatacgggcgcaaagcaggcacttgcccgcctgatctcgcttgatatgcccctgggcgacggggttacgccggtatcggtcgcgcttgtgaaacttgcccgttccctggggcagagctttgagaatggcaaattgcggctggagctgccgcagccgcctgcgccgcttgcgctgtcggggcttggcccgtgacgggcggcacactgctttcgggttacaggctcatgtggattatggtgatgttcgaccttccgaccgacacggcactacagcggcgggacgcgggcaaattccggcacttcttgctcgatgaaggctttgagcggagccagttttcggtctacgcgcgtttcgtgaatggcaaggaagcatttcaaacgcgggtgaaccgaatcgggcgtaacctgcccgagtccggagatgtacaaatcctgaactttaccgaccggcaataccgcgacattgtgcatttttccgaccagaatcgacaggcggcgcgcaaaaatccgggccaactggtgctgttctgatgatttatggcccgtttgcgcacctcgatccccggacaaaatcgcctgtttccagtgatttagccgaagatcgaggctagcagttcagagttcgaggtcaagccgcaacggatgctgaaggcggagtgtatagatttacaggctagcagttcagagttcgaggtcaagccgcaaccgataagcccagtatttggcacgcatggtcaggctagcagttcagagttcgaggtcaagccgcaactgttggcactcctttggttgttgtggccgtaggctagcagttcagagttcgaggtcaagccgcaactatgggtctcgcgggaggaggggtccacggaaggctagcagttcagagttcgaggtcaagccgcaacgtgctcgccttgttgagcgactcgaccatgaggctagcagttcagagttcgaggtcaagccgcaaccatctgttacaatattgtcaatatccagttaggctagcagttcagagttcgaggtcaagccgcaacattatctccccggccttcgtgccgggtgctaggctagcagttcagagttcgaggtcaagccgcaaccatctgttacattattgtcaatatccagttaggctagcagttcagagttcgaggtcaagccgcaacttaaaagattcttccctgcaatccacacagaagtgccggtggccgtgtcctgcacatcgttcccgacggattttacttcatttgacggcacggatgtgctggcctttaccaaccgcgaactgattgcccaggtgcaacagacaaccaaccagcgggtggtctatggcgactggggaacaaccaggccacggaactatggccagccgcggcaacccaggaaccgcatcgattaccccaccgacacgtcctgggtcttcgcccgcgaccgggataagagcgttgatttccaagaggcagcacagcgtatcacgggcagcccctactggtcgggcaaattgggcatatggggtgagcagcgcattgaggtcacggcagcgggccaggctttcgctatagactcgatgccaaagatgtatgccgccagaattaatattcacatccacagacaggcgttttatggccacctgccgttgcctgaggcacttgacgaagaatggtcggacgatttctagagccgagagaggaagatttcgaggtcaagccgcaaccagacaatcgtgcaggcattgcaggctaacaggtcagatttcgaggtcaagccgcaactacggcgcaaagcagcccgtgacgatccgcggcatcgactatgccctcgcaaattgccgtcgccagcgccatcacccgttcccttgcccgtggcaccctcaccaaagccgatcaggcattcggcaatgcgctggctgcggcccagcaggcccgctagcggccttggcctacccttatactacttaccccttatttttatataccccctgctgccctaccgctcgccggtgggccgcacaggggcctatctagggtatattatgcccaatgcatccctttacaatgtcccggcggtcatagccaaaggctgtccacaactcggtctctattgtgcggggtgctttgcccaccatggtccgcgcaaatttcagttcttcattcgcaagcacttgataatcgtgcaggcccttttggtgtgggtagagcttgcttacaacgcatctggcaaatcctgcttcccaagatgatgcgcttgcaggtgttgcggtgattacgatgattgcggcggttatgattgttttcatggcttccttccgtttcaatatcgactccgggctagcagttcagagttcgaggtcaagccgcaacggtggtgttacgggcgcacgtccggcagatgcagaacgcgggtttgccccatgcgccctgacctaaagcgggtggccctgcagcaggcggggcagatcgccggtcagacccgccgcttcgcggatgaaccgccgtcgcagcaccgggatcgcattgaccattcccatgcccaaatcgcggcccaggcgcagtgcgggattgtcgttggaaaaaagcgcgttgactgcatcggtcgccacggccagcgcagcggcgtcaaagcgtcgccaggtctgataccgctccagcacatcaagtgcgccgaagtcctctccccggcgtttcgcatcggttaagacctgtgccagtgcgcccacatcccgcaggcccaggttcagcccctggcccgcaatcgggtgcagcgcgtgcgccgcatcgccgaccagcgcaaggttgggggccaccaggcggttcgccagcgacagggacaggggataggtgaagcgcacgccttccagtgcaatcttccccaggaacgcgccaaagcgcggccgaagcgcggccaggtaccccctgtcgtccaacgcgtggatccgtgccgccgcctctgtcgtctcaccccaaacgattgcgctgcgattgcccggcagaggcaggattgcaagcggcccaggcggcagaaagacctgatgcgcaatgccgttatggggtatctcgtggccgatggcgcacaccagtgccgtctggccataataccgccccgtccgcgtgacgcccgcacgcgcagctgtgccgctgtgccgcccgtcggccccgatcaggaggcgcccggtcagcacctctccatcggccagagttatcgcagcacccgccccggtctgttgcgccacaacccgcgccccggcccggtgggtgacaagagggttcgccgccatcgccgccagcagcacctgccgcaaaaagcgatcctccagcatatggcccatcgggccgtcctcaatctcggcgtgatcaaactgcagaacaaagggcgcggggccttcgcccgcacggccatcgctggcgatgatcttcaggatcggctgtgccttcttttccaatgcgtcccacagcccgagtgccgccaaaagccggatcgaggcaagtgccagggcgtaagatcgcccgtcaaaccggtccgcggcccgcgccccgatgctgtgccggtcaaccacgagggatgagaacccgccctcggccagggccagcgcaaggcaggggccatttaacccgcccccgacgattagaatgtccgcatcccgtgccataagggggagtatgcagacacgccggggattgtccaatcacctgctggccgatagtctgccccacggtgccaggacaggggcagacatgcaggataattggcaaagcctgagcgcgtctgatctgggccgggccattggggcgggccggattgaccccgtcaccctggccgaggcggttctggatgccgccggggcgcatcccgcctgcgaccgcatctttaccatgctgacccccgcccgcgcccgggccgaggccgaagccgccgccatccgcgccaggaccggcgttcggcacggtctgcttgacggggtgccggtgtcctggaaagatgtgtttgacactgccggattgccgaccgaggcggggtcgcttctgctgcaaggccgggtgccctcagaggatgccgaggttctggcccgcgccacgcgcaccgggctcgtctgcatgggcaagacccatatgacagagcttgccttttcgggccttgggctcaacccgaacaccgcgacgccgcccaacgtgaacgatcccgccctggtgccggggggatcctcatcgggggcggcggcctcggttgcctttggccttgcggcggcagggatcggttcggatactggcgggtcggtgcgcttgcccgcggcctataatgatctggtgggccttaaaaccacgcatgggcgtctgagcttgcggggggtcgtgccgctggccgaaagctttgataccgtggggccgctgaccagaaccgtggaggatgcggcccgattgctggcggtgatggagggcacccacccccctgaccttgccggggccagcctggacgggtgccgctttctggtgctggccccctatgccggcgatgtgcgggaggggccgggcgcggcctttcacgcggcactggagcgtcttggccgtgcgggtgcgcggtttgacaccgggcgcgtgcccgccatagaggaggcgatggagaccacgacgatgcttttcaccggtgaagcctatggcacctggggagaggtgatcgaggccgcgcccgagaagatgtttgaccatattcgtgaccgctttcgccaggggcgcaaggtcagtgcccaggcgttcgttgccggatggcggcacctgcgctggctgcggcaggactggagcgcggccacggcggggtatgatgccgtgcttttgcccaccgcggccaacctgcccgccaatgccgggcagttgatgacggatgacgattatttcatcaccgagaaccttttgacgcttcgaaatacccgtgtcggcaaccttatgggcctgtgcgcggtgacattgcccacgggaacgccctcgaccggccttatgatcctgtgtccgccaatggccgaggcgcatcttctgcgtctttcagcggcagcagagcgggccttggcctaattgacccaaaggccacaatccgcccccggtctgtcccggtctgtgcacaacgccaccccccgggccttgaccgcacggactgctgacggtagcctgacagtcaatcggggcgtcatgatcccgaacatggggcaggtatggaatttccgaagcggttctcgacccttccgccgtatgcgttttcgcgcctgcgggccttgcttggccaccataaaccgggggccaggccgattgctatggccatcggagagccgcgccacgccttccccgactgggtggcgcgggtgctggccgacaacgtccagggctttggccaataccccgccaatgacggcacaccggggctgcagcagaccatcgccgactggatcgcccggcgctacggtgccagggtcagggcagagacgcaggttctgccgctcaatggcacgcgtgaggggctgttcaacgcgatgcttgcactgtgtcctgaaacgaaggcgggtgggcggcctgccgtgctgatccccaatccgttttatcagacctatgccgctgctgcgctggctgtgggggccacgcccgtctttgttcccgccacggaagcaacggggaacctgccggattacaccagcgtgcagcccaaggtgctgaaccgggtcgctgtggtctatatctgctcccctgccaacccgcagggggccgtagcggacagggaatactgggccgagctgctggccctggccgaacggcatgatttccgcatttttgccgatgaatgctactctgagatataccgcaatgcgccgccccccggtgcgatgcaggttgcggcggaatgcggtgctgatccggaccgggtgatgatctttcactcgctttccaagcgctccaacctgccggggctgcgcgcgggctttgccgctggcggggtggccagcatcgcgcggatgaaacagttgcgggcctatgccggtgcgcccctgcccctgcccctgcaggcggtggccgaagccgcctggcgtgatgaagaccatgtaacggccaaccgcgcattctatgccgcaaaatatgcgctggccgacaggattctgggcgcactgcccggctacatcccgcccgcggcgggattcttcctgtggctgccagtcgaagacggcgaggcggcggccctgaaactctggcgcgagacgggggtgcgggtgctgcccggtgcctacctggcgcatggcacgggcgaccagatgccgggcgcggaccggatccgcgtggcgatggtcgctgaacaccaggacatccagcgcgggttgcttcggcttcgcgactgcctgtatcgatgaggtaaagatcatggcgtatcaaacacggcaacgggatccgctgcttgacagccggatacaggcggcactggagcgacgtggcaaggagcttctgggcctgatgctttgcgccctgggcgtggcacttgggctgatgctggtcgcttacacgccgggggaatcgaattgggtggttgccactgatgcggcaccgcggaattaccctgaccagattggggctgtggtggctgcgatcctgatgtggatcatcggctacggttcccatgtgctggctgcgggcgcggtgatttggggtctgcgctttctgttccatcgcggatctgagcgggccctgtggcgggttatgttcctgccagtcgtcatcgccatcgccgcggtctatgccgcaagccacccgccgggtgccacctggacccacagtttcgggctgggcgggcactttggcgacacagtccttggcgcacttttgcacatcctgccgcttgattacgcctttgggctaaaacttttggcggcgatcagttttgcgacggcggtcacgcttggcctgttcgtctttggcgtcagcatggccgagctgcgcggcagtctgcgcttcatggcggtcgggctggcctcgagcatggtccgccttgcggcccttttcggcaaatccgcgcacgcggccgcgcagcgcgggaaccatgcggacccggggcagggccatgtcagggatgatacgccggaacgacccgccccccgtgccgtgcgtgcgcctgcgtccacgcgatccggtcttttgacccgtgttcccctgctgcgccgggtgcaagagcccgcgccgacattgcccaaaggcgcacccctggcgcatgagaatccggacgtgccctctgacgagcgaatccgcaaaaggatcgccgatgccatcaggaatcgcgtccgccgcccgcccgccttatcgcagtcggtcaccgcaccggagctcaccggtgcccaggcccccgccccgcattccgaacagcgcatcgcccatgaggccgaactgtcgtgcgccgcggtccttgccccgcccgcggcggaaccgcgcaaggttgtgcagcataatacggcgaaaaggcccgccccctcccgcgcggcaagggcggatgcccaaccctcgcttcccctggaggccacccatgagcaggcgtatgcggttccgcccctggcccttctggccaatccggcgaccgtcgcacgccatcaccttagcgatgaggcgttagaggaaaatgcccggatgctagagaatgtgctcgatgattacggcgtaaggggggaaatcgtcagcgtccgccccggccctgtggtcacgatgtatgagctggaacccgccccggggctaaaggccagccgcgtcattggccttgccgatgacatcgcgcggtccatgtccgcgctctcggcccgggtctcgaccgttccagggcggtcggtcatcgggatcgaactgccaaaccagcaccgcgaaaaggtcgtgctgcgcgagatcctctcatcccgcaattttggcgatggcaacgaccgcctgcccctggccctgggaaagggtatcggcggagaccccatcgtggccaaccttgccaaaatgccccatttgctgatcgctggaaccaccggttcgggcaagtccgtggcgatcaacaccatgatccttagcctgctttacaaactgaccccggaagactgccgcatgatcatgatcgatccgaagatgctggagttgagcgtctatgacggcatcccgcatctgctgtcccccgttgtgactgatccgaaaaaggctgtggcggcactgaaatgggttgtgggcgagatggaggaacgctaccgcaaaatgtcaaaaatgggcgtccgcaacatcgagggctataacggccgggtaaaggatgcgctgaaccgcggtgaactgttcagccgcacggtgcagacggggtttgacgatgacaccggcgcacccgtctttgagaccgaggagttcgcgcccgagacaatgccctttatcgttgtcatcgttgatgagatggccgacctgatgatggttgccggcaaggagattgaggcctgcattcaacgcctggcgcagatggcgcgggcctctggcattcatcttgtgatggccacgcagcgtccctcggtcgatgtgatcactggcacgatcaaggccaatttccccacgcggatcagcttccacgtcacctccaagatcgatagccgcaccatcctgggagagatgggggccgagcagctgctgggcatgggcgacatgctttacatggcgggcgggtccaggatcacccgggtgcatggcccctttgtcagcgatgaggaggtagaggagatcgtgcgccacctgaaatcctttggcccgccagagtatgccgccagcgtactcgacggcccggatgcgcaaagggaaggcgatatcgatttggttcttggtctgggcggggccaccgagggcgaaaacgcgctttatgatcaggcagtgcaaatcgtgatccaggatcgcaagtgctcgacctcatacattcagcgaaaactggccatcggctacaacaaggccgcgcgtctggtggaacagatggaagaaaacggcctggtctcggccgccaaccatgtgggcaagcgcgagattctggtgcccgaacaggattaggcggcaggcccccttgcgtcgtcatccccgggccgtcattgtcgtggccgtccgcagagggcacaggccaaggctttcagtgaggtttcacagtgacccgtcagcgcattcctgatgaatccggtatctgcaggggcatgatgttgcgccttgtccgcctgtgtttgact

SEQ ID NO: 3671 - DNA, 23255 bp, synthetic construct
  source 1..23255: mol_type = other DNA
  misc_feature 1..23255: note = Synthetic
accgcccggcctcgcggaaccatgtgttcaccccattcaacatggcaatcacagccattgccgcgactttcggctctgccgctacaaaatccccactggcgattccgtcccgaatgatcgtttccagttgttcctcataatcccggcgcaacgcctcgatcactccgaaattgcccggctcaagattgcgcagttccatgtaggaaacaaatacgtcatcgggtcgtcgcgaatggaaacgaatgtgaaatcgggtaaatgcctctaatgcctccagaggcgtacaccgccccggcacatcggcccacgccccgagcagttcatacatatggctttgcatcaggtcgaaaagcaggctctgcttgtctggcgtatagttatagagcgcccctgcctgcacccctacttcggccgcgatcttgcgcatcgaaaccgccgcgtagccgtgctgcgcgaatagccgcaaggcggcggcacgtacacgcggacgcgtcgtgccagaatgggaaccttgggtgcgggccatgcgccgaatttaactgaacatttgttcagatcaaagcccccgcttgcccagacatgcaaaagaatggcaagacatacccacaccgccctgatccggggccatgatcggaacctatcctatgcgccttgcgcccgccgccctgccctatgcgttgatcctgatggcagcccttgcatcgtgcagccagtttcccgaactggatgccgcggtcagcgacgacatccgtgatgcgccctatcctgaccttgtccccctcgacacgctcgatattcggactggaacagggcgcattgcgcccgacgctgcgcaaacgatggaatcgcgggtagcacggttgaaatcacgcgccgcccgactgcgccgcacagtgattgaccaggacacgcgggcgcggatgcaaggcgggattgcctcctgacaacgctatcaaaacccgcgttgcatggacgcggcgatccatgtacatcgcgcgcaaggcctatttttcagcggagacaaccacatgactgacccactgcgcctcggaatcgctggtttaggcacggtcggtgtcggaacggtcaagatcatccggcaaaaggccaacctgctggccgcccgcgccgggcgaccgatccagatcaccgctgtttctgcgcgcaccaaagacaaagatcgcggtgtgaacctgtcggattacgcgtgggagaacgaccctgttgccctcgcgcagcgcgacgacgtcgatgtgttcgtcgagttgatgggtggctccgaaggcgccgccaaggacgcgaccgaagccgcgattaatgcgggcaaggatgtggttaccgcgaacaaggcgttgctggctcatcatggtcacgaacttgcgctctcagccgaggccgcgggtcgcgtgatccgtttcgaggccgccgttgcaggcggtattccggtgataaaggccctgagcgaagggttggcgggcaacgacatcacccgtgtcatgggtgtgatgaacggtacatgcaactacatcctgacgcgtatgcaatccgcgggcctgccctatgcagaggtcttcgaggaagcgaaccaattgggctatcttgaggctgacccaacacttgacgtcggcggtattgatgcaggacacaagctgtcgctgctggctgccatcgcctttggcacgcaggtcaatttcgacgcggtcgaactggaagggatcgaaaagatcaccattcaggacatccaccacgccgccgacatgggctatcggatcaaactcttgggtgtctgccagatgaccggccgtggactggaacagcgcatgtcgccatgtttggttcccgacaacagccccttgggacagctggagggtggcaccaacatgtgcgttctagaaggcgacaacgtggaacagatcgtattgcgcggcccaggtgccggcatggggccaacggccagcgccgtgatgggcgacgtgatggatatcgcgcgcggcttccgcatgcctgtctttggccgccccgccgccgagctggaatgcgccaagccggcccgcgccgtgatgcctgccccatattacctgcggctggggctggaggacaaacccggcacgctggccaaagttgccgcagttctgggcgaggccggcgtgtcgatcgaccgcatgcgccagtaccagcacgacgacagcactgcgcctgtattgatcgtgacgcacaagacgacgcgcgccgcacttgattctgcgttagaaacaatgtcgcggctggacgtgatgacagccgaaccagtggccctgcggatcgagagcgtctgacccacccttgtgcgacctgatttgtgccgataaagctgattgcgcctgcgcgcgtacgccccgaaccccgataaggaacacttcgaatgaccgctgaaaccgatttcaacgaccgcatgctatcgctcgggctggcccgcgtttccgaggccgccgcattggcctgcgccgacctgatcgggcgcggcgacgaaaaggctgcggatcaggccgccgtgaacgcgatgcgcgaacagctgaacaggctggcgatcaagggtgtcgtcgtcatcggcgaaggagaacgtgacgaggcgccgatgctctatatcggtgaggaagtgggcagcggcgacggccccggcgtcgatatcgccctcgacccgctggaaggcacgacattgacggccaaggccatgccgaacgccctcaccgtgattgcaatggccccccgtggcagcctgttgcacgcacccgacgtctacatggacaaactggccatcgggccgggctaccccaaggacgtcgtatcgctggacatgtccccgcgcgaacgcgtcgaagcactggccaaggccaagggctgtgccccctctgaaatcaccgtttgcgtgctcgaacgcccgcgccacgaggacaccattgccgagttgcgcagcacgggtgccgccgtttacctgatccccgacggcgatgtggccggcgtgatccattgtgccgaggcacgcctgacgggtatcgacatgtacatgggttcaggcggcgcacccgagggcgtgctggctgcgtctgcactaaagtgcatgggcggccagatctggggacggctgttgttccgcaacgacgatgagcgcgggcgcgcgaccaaggcaggcatcaccgatttcgatcgcgtctacagtcgcgatgagatggtcacgcgcgatgtgatcttcgccgcaaccggcgttactgatggctcgctcgtcgccgggataaagcgacgccaggaatatgtagaaaccgaaaccgtgctgatgcggtccaaaaccggctcggtgcgccggatgctctaccgcaatcccatcgcctgagcctctctgccagacaaagcgttttgcccaaccaaaggacaggatagtgccaacatttctgaacgttgcgcactctctgactggtcggcgttgggtcggcccctcggtagaaatggatcggcaggccgaggcgctggcacagcagaccgccctgccccgtccgctctgtcagatactggcgcgacgtggtgtggatgtcgcaggcgccgagagctttctcgcaccgcaattgcgcgatcttctgcccgatccccgtagtctgaaggatatggagcgcgcagccacacgcctgctgtcagcggtggctgcgtccgagcggattgccatattcgccgattacgacgtcgatggcggcagttctgcggcattgctgctcgactggctagggcagatggggcgcaccgcaacactctatgtcccggaccgtatagatgaaggatacggccccaatgacgaggcaatggccgcgctcgccaaagagcatgacctgattgtctgcgtggattgcggaacgctgagccacggccccgtagcagccgccaaagacgccgatgtgatcattctcgaccatcaccttggcgcagaaacgctgcctgacgcactggccgtcgttaaccccaaccgacaagacgaaaccggcgatctggcgcatctgtgtgccgcagccgtcgtgttcctcgccttggtcgaggccgggcggcaactgcgtgaagcaggcaaagccgggcctgacctgatggcaatgcttgatttggtggcattggccacggtcgcggatgtcgcccccctgattggggtcaatcgcgcgttcgtgcggcagggcctgcgcatcatggcgcggcgcgatcggcccggtctggtggcccttgcagatgtggcacgactggacactgcccccgccgcctatcatctgggttatttgctgggcccgcgcgtgaacgcagggggacgtatcggcaaggccgatctgggcgcgcgcctactggcaagcaccaatcccgcagaagcccgcgcaatggccgaacggctcgatcaattgaacacagagcggcgcgaaatcgaagccgccgtacaggccgcagccctcgatcaggccgaaacacgagggctcgacgccccattggtgtgggcctccggggagggttggcaccccggcgtcgtcggcatcgtcgcaagccgcctcaaggaggctgccaaccgccccgccatcgtcatcggtttcgatggtgagattggcaaggggtccggtcgttcaatcagcggcgtcgatctgggagcctgcattcagcgactggctgccgaaggattgctgatcaaaggtggcggacacaagatggccgccgggttgaccgtcgcgcgcgaccagttgcaagcggccatggaccggctgtctgatttgctggcgcgtcagggcgccgaccgcgcaggtgctgccgacctcgccttggatgggctgatgatgccgggcgccgcaacgccagagttgatcacacaggtcgatgccgccggtccgttcggggccagcgcacctgcgccgcgctatgcgtttgccgacatgcggatcacatttgccaagcgcgtcggtgaacggcacctgaaactgcgctttggtgacggtacgggcccacagctggacgcaatcagctttggcgcgttcgacggcccactcggccctgcactggaggcccacggaggtgcgcgcttccaccttgccgggcggctcgaaatcaaccgctggcaaggccgcgaaagcgcgcaactaaggctggaagacgccgcacagcccggttgatcgccgccgccgccccgccaaaggctccgttgccctccgaatgcaaattgctgcgaccacgaggcaactttcctcttgcacatgaaaccggatttgcctaggaaacggctcacgccaacgctggcccgttcgtctatcggttaggacgccaggttttcaacctggaaagaggggttcgattcccctacgggctgccacgtacttcctggataaatgcgtctctcccgtgaagtcagataactctttatgtttcagagggttgtgagcctgttcgttttgcataaacggttttggtgagaccaatcgggccacaacaggtcaagcgtctcacttgggctttttcgtcttgccagtttggggactgaatcagagggacgcgatcaatgcccgctgcgcctgccattcggccgggacctcatgtgtcatgcaccaggtggaggtgaggccaataggctgtttgcccgcgatgatgtcccgaacgatatctggtgccagaaacgcaaactcgatggtttgctgaacccgcttgcgggtcgtggacgccgacgtcgcaatctcatcaaaatcttcacccgccttcaaccggtcgatccaacgatgggcgcgggccacattgccgatcaacgcgggatccgggttcgatgacacatcggacataatgaaccgggtttcgacgccgcgccgcttctggatgaacggaacatcgaagctcaacacctgctcgtcaatgttggcctgcttcgtgtggcaaatccgggccaactcattgctgcccaaacaaagttcgatggttctctcacctatccttgcacggctcagagtggaaagaagggtagcgtcatcgcctttcgtcagctcattcagcagcctcactgtttcgacatccggatcaaggatcagatctttccctgggccacagcttaaatgcgtccggatcgcatccgcgacgaaccgctcgaacgtctcagcaggcagtcgccatcctttcgcttgcaggtcgttcttccggcccgtcacatagccgcgagagatgtaatatcggtacctccggttacattttcgcgtatggcttggcgacaatcgctcaccgcgttcatcgaacagctttcccgtcagaggtgacgattgggtcaggcgcgtctcgcacacggcttcgaccggggccttgttcgcgaggcgctgctgcacgctttcccagcattctggatcgacgatggccgggtgttgcccttcaaagaccttgcctttgtgtgggatacgacccgcgtagatcgggcttttcaatatgtaatggacatgcccccgcgacagaatgttgccgccgcgccgcgcgccgtcctgtgtcgatttctgacgcgaccggatgccaagtttcgccgcttccgccgttaccgcgttcaaggctccatgggtctcgtagagatcgtagagcgcccggatcgaagtggcctcatcctcattgatcttcaatgtccgaccatccgcatcatagcccagcggcacgctgccacccatccagagccccttgcgctttgacgccgcgatcttgtctctgatccgctccgccgtaacctcgcgctcgaactgggcgaagctgagcagaacgttcagtgtaagccgccccatgctcgacgatgtgttgaagttctgcgtcaccgacacgaacgaagcctccgccgcatccagccggtcaaccagctttgcaaaatccgccagcgagcgggtcagccggtcgatcttgtagacgacgatctgatcaacctgcctgtcgtccacatcctgcatcaggcgttgcagcgcgggccggtccatatgcccgccagatatgccaccgtcatcataggaccggtccagaagctgccaaccttcatgccgctggctggcaatgaaggcctcgcaggcctctcgctgggcgtccagcgagttgaactcctgctcgagcccctcctccgtggatttgcgcgtgtagatggcgcagcgaacccggcgcatctcaggcgctccttttggcggtgagcccgaagaacctcggaccgctccagcgggcccccgtgatatgctgcgcgacggcactcaaggatttgaacgtcttgccgtccagagaatagtggtcggaggcgacatcaacccgatacatgcggccgttccattcacgtatcagcgtggccccgtggcgtaccgcctttgaaccggtcgctgcgtccgctggtgtcagcgcaatccgcagggcccgatttgtcgctgccgaagatccgccgagcagttggcattggacatggtgcacaagcacgcgttgcatgaactttaccgaagcgtattttgggggcctcgatttgaaagcccgcgcccaggcgtcacagcatgtggcgcgatccatcgcgtcgatctcccgaagacgctcagggagatcggccttcctacgcgggcggctcatcggcctggtgcaggctcaacaatgcgatagaccgcaccggactttccggtcgatcgctcaatggtactcccggacttccttagcccggagatcgccgcacggatggtttgcggctgccaaccaaactgcttctcaagcgcgccaacactcgccccgcttttccgctgcaacattgccgtcaactgcgccttcttcgtcttttgggtcgggaacttcttgtcggtgttaccagtagattttgcgtcctttgcgccggcgctggttgcagctttggtattcgatactgtgaccatgatcgggtcctctcaatgcaggggctggccaatccaaccccggtactgagcagagcccgtgcattcgggcgcaaaacgggtctcaaacagtgacgcctacggcaagctggaagtccagtcaaaacttgagagtttcgacacagagggcgtattttgttgaaaaactcctccttgattgcggcctgaactactgattcaattcccgcattgggcgggaggatttgcgatgatgggaccaaggcaggcggcgcagccgtcgctgttctacgagttctcgctggaagatcatgtccctcaggatcaccttcttcggtccatcgaccgcttcgtcgatttgactgacgtccgcgcctatctggcggatttctacagccacacgggccgtccatccgtcgatcccgagttgctgatccgcatgcttctggtcggctattgcttcggcatccggtcggaacggcggctttgcgaagaggtgcatctgaacctcgcctatcggtggttttgtcgacttgatctgagcgaccgggttccggatcactcaaccttttccaagaaccgccacggtcggtttcgagaaagcgaactgctgcggcacctgttcgagacgactgtcgcccggtgtatccaagaaggtctggtcagcggccagcgcatggcgattgatgccagcctgatcgaagccgatgcgaacaagcagaactccacgccgaaggagaactgggacgcgggacaaatcgatcccgccgatgcgccccgcgccgtgcgcgagtatctcgacaccctggacgaggccgcttttggcgccgccagcgaggtgcaacccaagttcacctcgcgttctgatcccgcaagccaatggacagcggcccgtaaaggccctgcattcttcagctattccgacaattatctcatcgacacggatcatggtgtcatcttggatgtggaacccacccgctccatccggcaagccgaggtcgggtcgacaaagaccatgttgaagcgggtcaaggagaagttcgacctgcatcccgaacgcctgatcgctgacacggcctatagcaccggaccgatgctgggttggctggttgaacgcaagattaacccgcacatccccgtcttcgacaaatctggccgcagcgacggcacctggagccgggctgacttcgagtgggacgcagagaacgaccaatacatctgccccgagggccaagagctgaagcagttccggcgaaactattccgatccgaaccgagggccgaccggacagggcagaaccaaataccgtgccctaaaactgacctgccagacttgcccgtccaaggcgaaatgctgcccgaatgcagacgccagatcgatcacccgcgaagaacacgaagacgcccgccaaatagcccgagacatcgctaagaccaagcaatacgatatctccatgaagctccggaagaaggtcgagatgctcttcgcgcacctcaagcgcatcctcggcctcggaaggctccgattacgtggcccatgcggtgcaaatgacgaattcctcctcgccgcaaccgcccaaaacatccgcaaattggccaagatctttcctgcaccgcagcagacgcgcacagcctgataggaaaggcgctcgcgcccaactcaagcaacgaaattctgcgcccgcgaacgggtgtttttccacggaatcggcggaaagcggaagttcgctgcggtatgcgcaatgtaacacaatcttccaaaatgcggacattgaggcatatccaaaagaaaaaacgcaggccgtagcctgcgtttcaatgtggtgcaatcgaatgcttgttaacggctcgaccgcgaattttgaacactctcagattagccattcagaccaatcagtcaagccgcaactgaccagcttttcactgtcgattgacactgaagacggtcgtctatggcgcgaggtgtggacccccgcttgtcctggtgatatacttcacttgtcacagtcgattgccagcctgtcctcaggcgtcttagtgtggacccaagcagcaatctcgcagataccagcgcgccatagattgaccatgaatcgctattaatgcaaagtaaacccctgaccagctttaagaggaaagatgcgcttaggtttggatatcggaacaaattccatcggctggtttttgtatgcgaccaacaacggtcaaatctctgacgtggtcgatggtggcgtgcggatattctccgatggccgggacccaaaatcaaaggcctcccttgctgttgaccgccgtgcagcccgggcgcagcggcggcgacgcgaccggtttctgcgccgcaaggccgcgttgatgaagcggatggctgaggtgggcctgatgcccaccgacccggcacaggccaaaacgctcgagttgctggacccctatgcgctgcgggctgaggggctggatcaggcgctgccgcttactcatttcgggcgggctttgtttcacctcaaccaacggcgcggtttcaaatcgaaccgcaagacagatcgtggcgataatgaaagtggcaagatcaaggacgccaccaaacggctggacgaggaaatggccatcaaaaaggcccggacctatggcgagttcctgcatatgcaccgctctgaaaaaccagagaaaccgtcccttcagcctcgcatgaataaggatggcagccggaccgatgatcgtatgaccaagactgtgcgtacgcgcctctctgtcgcccgacgcgacaatgccgaaaaggaagaggcagggtatgatttctaccctgaccggcgccatctgtccgatgaattcgagcaattgtgggcggcgcaggcaaagtaccatcctgacgcactgaccgatgatctgcgcgacgagattgcgctgatcatattccaccagcggcccctgaaaacgcccaaggtcggcctgtgtctgttcaccgatgatgaacgtatcccatctgcgcatccgctaaaccagcggcgcatattatttgaaaccgtgaatgcccttcgggttgccgtacgaggtgaagctgcgcgcgaactgacccgtgaagagcgcgaccagattgttcatgcgctcgacaacaagaagcacaccaaatcaatgtcgggcatgtcgatcaagctaagggcgcttgggaaagtgatcaagctgcgcaccgatcaggtcttcactctggaaacggccaaccgcgatgccattgcctgtgatcctgtacgcgccagcctgtctcatccggaccgctttggtccgcgctggcctcagcttgacgccggggcgcaatgggaagtcatcaagcgtatccgcgcggtgcagagtgaggctgagcatgaggcgcttgtagcctggctgatgaccacccacgcccttgaacgcggccacgctgatcacaccgcccgcgcccccttgcccgaagggtatgcgcgattgggtctgacggcgacaactcagattttggcggcgctggaggcggatgtgatcccctatagcgccgcagttgccgcctgtggctggcaccattctgatgggcgaaccggcgaggttctgacggaactcccctattacggccagatcctcgaccgccacgtgatccccgggagctatgacgagcaagacgatgacgtgacccgttatggacgcatcacaaatcccaccgttcatatcgggctgaaccaactccggcgcctggtgaacaggatcatcaccgtctacggcagacccgatgagatcgttgtcgaactggcccgcgatctcaagctgtcagaagaccagaagcgtgacgtgcagcgcgatatcaaaaagaacacagacgcagcgattgcgcggggcaagaaactggaagaaatgggggtaccgaataccggggcaaacaggatggtgctgcggctttgggaaggtcttggcgatgacgtgatgacccgcaattgcccttattccggacggcgcatcagtgcggggatgttgttcgacggttcctgcgatgttgatcacatcctgccttattcgcgcacgctggatgacgggtttgccaatcgcacgctttgcctgaaagaattcaatcgtcagaaagccaataagaccccttgggaggcgtggggcaataccccgcaatgggaggccatcgcggccaacctcaagaacctcgcaccgaaccgagcttggcgctttgcgaccgacgcaatggaacggttcgagggagaaaaggatttttccgaccgcgcgttgaaagacactcagtacttgtcgcgcatcgcccgcacctatctggatgcgctttacgacgggcaggataaaaaacgccatgtctgggttgttcccggacggatgaccgaaatgctgcgccgtcattggggactgaacaatttgctgaccgaaggcaaggccgccgtcaaagcaaagaaccgcaccgatcaccgccatcatgccattgatgccgccgtggtcgccgccacggattacggcctgatcaaccggatcagcaaagccgccggtcgtgacgaaaaggacggcaagggggccggagaggtggctcgcaccacgcctgagccgtgggaggggtttcgcgccgatatcggggctcaactggacaagatcatcgtgtcgcaccgcgccgatcatggccgcattgaccgggagggccgcaggaaggggcgcgacagcacaaccggacagcttcataacgacaccgcttatggcattgtcgacgatcagaccgtggtcagccgcacaccgttcctgtcgctcaaaccgggagatatcgagctgacaacacgcggcaagaacatccgggacgctcaattgcaaaaagcactggctgtggcgaccaaaggcaaggacggcaagccctttgaagaggcgttgcgtctgttcgcggcaaagcccggcccctatcagggcatccgccatgtgcgcctgatcgaaaccctgcaagcctcggcgcgggtggaaatcctggatgcgaccggcaagcctgtcaaagcttataagggcgacagcaaccattgctatgagatctggcgcatgccggatggcaaggctaaagcgcaggtcatcacgacctttgaggcccatggtaagattgcccgtcggccacacccggcagccaaacggctgctgcgagtgttcaagcgcgatatggtggtaattgagcgggaatgcgaaatgttgatctgttatgtgcagaaatttgatcctgcaaatggcgtgtttctcgcaccccacatagaagccaacgtagacgcccgaaaccgagataaaaatgatccattcaggttaaggcaaatgggcaccggacccgccatcaaagcgaagattcgccgtgtctacgttgatgaaatgggccgcatgagagacccgggcaccgcctcttaactggcgagattcgcgcgaatcgatagattatgccatgctcccaaagggttgggagtttggtgtgtggatcagatcatcgacatagcgacggacggtcgccacctgtcgcgggatcgtggctttctcaaagtgtccgaagatggcgtcgaaatcggacgtacaccgctggatcagatcgctgctgtcatcgtccatgcccacggcacaacatggtccacatccctgctaacagaactggccgaacgcggtgcccctgttgttctgtgtgccgcaaaccatgccccgaaatccgtgctgatgccgctcgaaggtcaccatatgcaaggcgctcggatgcgggcccagtggcaggccaaaatacgattcatcaagcaagcctggaaacaggtggtgaccgccaaagtcagaatgcaggccacagcccttgaggccattggcgaaccgcctgcgcctctgttgatgatggtccgcaaaatcacctctggcgacagtaccaatatcgaggcgcaggccgcacgccactactggccgcgcatcatgggcaccgagtttcgccgcgacaccggagcagcggacgaaaacgccctgctgaattatggctacaccgtcttgcgggccgcgaccgcccgcgcggttgttgccgctggcttgcaccccactatcggcctctttcacaccaatcggagcaatgccttcgcacttgctgatgatatgatggaaccattccgcccgctggtggactgtgccgtccgttccatcgttatcgcccatggtgctgaggttgacactgaggccaagcagtcacttgctcaattaatcgccaccgacttgcccttgggaggcgggatcacaccggtttcggttgccttgatgaaattggcgacctctcttggtcaaagctttgaggccgggaaattgaccctcgcgctaccagaaccacccgatgcgttgaccttggcggggttgggcaaatgagcgcaaccgtaacccatttgtcaggatatcgtcttatgtggattcttgtgatgtttgatctaccaaccgacaccaggcaacagcgaaaggcggctggcaccttccgcaatttcttgctggatgaagggtttgagcgcagccagttctctgtctatgcccgtttcgtgaacggcaaagaggcttttgcaacgcgcatcattcgaatcgagcgtcatttgccggatatgggcgacattcagatcctgaacttcaccgaccgccaatatcgtgatattattcatttttcggatcagggccgccgtaaggcccgtgagaatccaaagcaattggtaatgttctgatgcgattcgcgctggaaaaccacaacggccctctgactaagccctttaatttcaggcttttaggcagagaactattgtagctgttcaaaattcgcggtccagccgcaacccaacagacggaagctggcccggtgagggtattgtagctgttcaaaattcgcggtccagccgcaacccgccaaaccggctcgtgctggcggcaaaaattgtagctgttcaaaattcgcggtccagccgcaaccctgtgagcataggaacgcaatcgccacgaattgtagctgttcaaaattcgcggtccagccgcaacggacagaggtggggttccacgcgcctcctaattgtagctgttcaaaattcgcggtccagccgcaaccgaagtcgggcacgcgggatgaatcgtcagattgtagctgttcaaaattcgcggtccagccgcaacccagcgcccgcgcaatcctgttgatcggattgtagctgttcaaaattcgcggtccagccgcaaccgacgatgaggacggatcaaaagcaaagcgattgtagctgttcaaaattcgcggtccagccgcaactaccattgacctcaaacattcgttttgaaattgtagctgttcaaaattcgcggtccagccgcaactgcccacggtccccctaacggacgctgagtattgtagctgttcaaaattcgcggtccagccgcaacgatccgatgcagcaggccatgcagcaaatgattgtagctgttcaaaattcgcggtccagccgcaaccacttcggtgtcgcaacgacagcggaaccaattgtagctgttcaaaattcgcggtccagccgcaacattgtagttacacgagatttgcggttggtattgtagctgttcaaaattcgcggtccagccgcaaccccggctcgcgatcggctaccaacgccggaattgtagctgttcaaaattcgcggtccagccgcaacgatgatcgcgcgcgcgactacatctggcaattgtagctgttcaaaattcgcggtccagccgcaactcttgcagcaggagtaacgccctgcccgcgattgtagctgttcaaaattcgcggtccagccgcaacgacggagatgtatggaaatatcgtagaaccattgtagctgttcaaaattcgcggtccagccgcaacactccggcagattggcctccaccaacgtaaattgtagctgttcaaaattcgcggtccagccgcaaccgccagcaacaaagagcatgcgctctatctattgtagctgttcaaaattcgcggtccagccgcaacggccatacccaacgttacaaaaggatgcagattgtagctgttcaaaattcgcggtctgaaccgctccgggttttccggagcggttcaggtggatcgttcctgaaggcttttatccaggccagttggcattcggtacggctcagctctgcaatctcccggaggagctccgggagatctgttttcgacttcactgcgctcattgcgctgcctttgtggctacaatcctgtaaactgaaccggattttcccgtgatgcacacaaccgtgtttccggctttacgcacgcccgatattgcggcgcgaacggtatgcggttgccaaccgaattccttctgaagcgcgtcaaggcttgcgccgcctttccgacgcaacagggcctgaagacgttgcttctttgttgtgtgctgttttgaggctttccccgtcaccagcgcttttcggtccgccgcatcgttcgcggtcctgtttgatgttgttgtactcgccatgttctggtcctttcagcacaggggctggccgatccagccccccgtactgaccggaacccggaattccgggcagatcattcggcgcacccacagtcacgctcgctcaacgcaagaaatccagttcaaaaacgaagaaggagccgttagttgacattgaagcggcacctacgaactacggctttgctccgctatctggtattcattcaaatcgcagagaaagaccggtttgagccccatggcggtcattttgatttcatgttgcgcgcgctcgcagcacgaatatcgccgcaaccacatcttcatcgctgctgctgcgcggcgggaaaaccagccgttcgcgaggtctcgcgcttgttagtcgcagcagacttattcggcgtcatctacagacctcatccggtgagggacaatcccgtcattgagctttggaaggttgtcagttcatagcggcctccaaagatctgtggcggaatttggtattctcggcccacatgcggtgcatgacgacggccagttttctgtcgaaagcaacgacggcgcgacgacggccctttcggcgcatcaggcgcaggccccagcttttgatctcggaactggcgacggattgcatcatcattgcaatggccgctgcatagagcgttgagcggacatctcggtcgcctgctttcgagatgtggcagggattgtccaatccgccggactgataccggcggggcgtcaatccaaagtgcgccgccactgtgcgagaactggtgaaccgcgccggattatctaccgcagcacggaatgttagggtggcaatacgtcaaggctctccaaaaagcgcgacatctgatcgaaaacttctttggaaaaatcaaacattacagggccatcgcaacgcgatacgacaaaacagcagttatctttcttgacgcaatctatctcgccgcatcagtcatctggctcaattgatgacaacgcctagaatatgcaactaacaattattcaatcgacctgtctaataatacgtattggtccaatgacttcctgattgcctttgcgatcaaacgcgccagcatgggcggcttttcacttgcaaaacggaaactcaggccgaagcgcggtagcgctggtaagtccagtttgtgtgtgaacaagtttgaatcgatgttttcatcttccaaaaccgcagcaacggtcaggccagactgaaccatagcaaggacgccttgcagactggtacaggaaaccgtgcttttccaagagattgcacaggcgctaagtgtatttgttgcttctttgtaatagcaacacggcttgttgacatgtgctaggggcaagacaccgtcctcagggagtgtaaaatcgggtttcgcaatccatgaaagttgggaaacacagattggatcgccttcagtgtgaacatcccgcacaaccgccaaatctagtaaaccagatgcgaggcttacgttgaggtcatcagctaagcccgcgacaatttcgatgttcacatcgggtcgttttcctatgaaggaacgcagcccgtccgtaatcaattgaaagagatatccatcatcaggcacgccgactttgaccttccctcccagcaacgtcggacttagcgcatcatagatgcgatctactgcctccaaaactacttcagagtattcgaaaagctcgcggccttcaggggtcaacctacaactgcgtgtggtgcgaacgaagagttggacaccaaggtgatcttcaagtccagagacttgaccacttacggttgactggcttttactgagcagttttgcagcggcagtaaaactgccggatgtcgctacagtgcgaaaactgcgcagatgatctgtgtgcattctggcatgattaaccgtaaatccgatcaattcaacaaaaattacacgtaattattccgcaatgagttcgttatcgttctgaggaaatccagaatcacagcggggccaaagtgaaagatacacattccttcgacgttgcagctttccttcagaagttgatcgagatccccagttgtgatcctccgggcgatgaaagtgcggttgcgcatctggtgcacgatagcatgacagcactgggcataccttctcagatggatgagttcttgccgggtcgcatcaacgtgcttgggcgggtgaagggccggggtgaaaagaagccgctgctcttttcggcacatttggacacgacgccgatcggggcgcaggattggtcatttccacctttcgcaggagatgtcgttgacggccacatccgtggccgcggcgcatcggacatgaaaagcgccgtagctgcctttgtcgcagcggctgccgatatcgcgggccgtgacacgccgctggcaggtgatattattctcgccttcacggcgggcgaaagttcgaactgtctgggcgcgaaacgatttgtcgaacagggactccaagacgaaataggggcgtttctgtgtggtgaacccagtacgctggacatcatcactgtcgaaaaggcaatcctttggcttgaggccaaggcggttggaaaaattggtcatgtttccggtgagttgggcataaacgcaatttcactgatggcgaaatttctgactgaacttgaatccctgacgctggacttgccccaacatccgctgttgtccgacccaactatcaatgttggccggatcgagggtgggtctgccgtcaacgtgacgccggacgcctgccgagcagaggtggatgtgcggtttggccccgggatcgaagtaagcgaggtcatccaccagatcgaactgatcatgccggaaggcatctcgcttgaggtttcggatttcaagcccgctgtcgaagagaatccagaaagcgaatttgtcagtatctgtaagtcagcttgccgaaaatctacgggtagcgaccccgaagtaaaaggcgtctcgtattacagtgacggtgctatattattggatggcatcaaggcaccatttgcaatcgtcgggccaggatacctgggcatgagtggccaaagagacgaaacaatcctggttagaaacctgcgcgattccgtcgatatctatcgccggatagctgaggagtggttggcatgagaaagttgcgccccctcatcggtctgaccgccgacgttgaaacgcgagacgcgggatcaacggaaacggaatatgtcctgcgcgcaaactatgcgtcggccatcatagacgccggtggcttgccggtaatcctgccacatgaccccgatctcgcggcgctttatgtcgcgcagattgacggactcatcgttaccgggggtttgttcgacattcatccaatacattacggcgaaacactgacagccccgctcaaactaaaggaagatcgaacagatttcgaacttgctatgttggatggcgggttgatggtggatatgccaatcatgggcatttgcaacggtatgcagctcttggccgtcaaacttggcggcaaactggtccaggacatccagagagatatcgaaggtggcattgagcatttgccaagcccggttccggacaaatctgcgcatggggttgcgctccggcaaggttcggttctctcagatttggcgggcgtgaccacagcccgcgtcaatagcctgcatcatcaggcggtcgtgccggcgaacggttacgacgtttccgcgacatcagtcgaagacggcgttgccgaagccatagaagcgaaggggcgcagattctgcgttggcgttcagtggcatcctgaataccacaccagcactttggatcgggctctgttggatggctttgtcgcggcggcggcgcaatatacttcgcagaaaaccgatccgactgcccagagaagctccgcaaagaaacgggcggtgggcgtatgaccattccgacagcaaatctcgtctcggtaccgttggcgcacaagacagtggcgtggcgcatcgggcttgttgtcttgtcgagcgatccgacgattgagcacagctttcagcgcatgctagcccaaacttccgatatcgcactgcactgcaacaggatcgcattcgatggggagatatccgttagcagcctttccacgatgatggaccggatcgaagcagtcgcagcagagataatgccaggacaggaactggatgccattctttacggttgcacatctgcatctgctgcgatcggcgacgacaaggttcgagcatcattgatcaagggcaaagctgttgcatcggggtcggcccatactcctgtttcagggctggtggcggcgttggaagtcatgaagtcgaaaaagatttcactcatcactccctatccggtcgatgtgacggaaatggtcgctcagtatctcggctcaatgggtgtcaatgttgtagccttgacctgcttgggtttgaaacaagattggcagaacggccagatatcggcagatcagatcgtcgatctcgctcgcagtatcgatcacaaaggagcagatactctagtgctttcctgcacggcgcttcgcggcgctgaggcaatcgacgaggctgaaatagcgactggcatgaaagtcatctccagcaatcaggcgttgctctggcacggcctgcgtaaagctgggtgcgacattcgcctcaacggattcggagaacttctacggacacattgagaccattaatcatggcagctcgattgagcggccagtaaacgaccggggaccgcatggtgcggaatttcccggcatcacgaactgataacaaagggaaacaccatgaaaacgacacgacgcatacttcttctcgccacctgcgcgatgatggccggtggctcagccgcgatggcagatgtagaaacccgcaaacctatcaaggttttgatgatcaacagcgcggatggtgacttcatggccgccgtttacggcgaaatcctgcgcgaagtcggctaccgtgtggattacgtacaagcagactatgccgcatcctttaccgccgtcgcatcaggagacatagatgtgtcgctcgcggcatggcaaacgaccggggtcgaactgaccaaggcagcagtcgattctgggcaggtcacagattacggtccgacaggtgtcctggtgaccgaaggctggtggtactccaacgcgctcaaggaattctgtccaggcctgccagactggaatgcgttgaaagagccgggctgcgtcaaggcgttggaaaccgccgaaacggcacccaaaggtcgctatctggatgcccctgcagattggggaaccttgtcggacgcaacaatcgaggacctagacctcgaactcgcggttatcaactctggatctccaggaacgcttgtcgcggcagtgaaaggcgcgcttgatcgtcaggaacccatccttgcgtgggggtatctgccgcattggctctacaacaccgaaaacggcgaatttgtcgaattgcccgggttccaacgcgatctggacatcctaaaacttggctacgatcagacttttgatcgcgcaaagatggcaggcgaaattctgtcagcctacacgatctctaccgaggctgtcgcggttggcatggatgccatcgacaacaatggcatgaccgcagaagaggcggcgcaggcctggatgtcggagaacgaaagcacatggcaggcctgggttcccgaataaaccccagtaaatcgatcggtattgccaatgacaagaggatttagagatgcaacaagacagaataattgaagcgtcaggtatctggaaagtctttggcgataccgcagccatcaattgtgccaaaagcacagacccgacagaggaagatgtgttggcatccggcggagtcgctggcctgatcgacgcaaatatcgatgtgtaccgcggcgaaatatttatgattatgggcctgtcggggtcaggaaaatcaactctcctgcgttgcctgacaggcctttactccagcacacggggcaagatcaccatcggcgatacggagctcacctccgcaaccaaggcggagatggtgaagttccgccgcaagaaaatcagcatggtttttcagaatttcgcgttgctgccgcacctgaactctttagacaatgtggccttccccctgcgtgtacaggggacgtccgtcgcagaacgccgcaagatagcgcgcgacacgctcaagctggtaggtcttgaaggcaaggaaggtttcttcccaagcgaattgagcggcggtcagcaacagcgggtaggcatcgctcgatcactggttacgaaccccgatgtatggtttctggacgagccattctcggccctcgatccactgatccgccgagagatgcaggatgagtttcgaaggctgcaagagcaacttcacaagaccatcatctttgtcacccacgatcttgaagaagcagtgcgccttggcgaccggatcgtcgtgatggaaaaaggcaggattgtccagatcgggactcccgaagaactaatcctgaagcctgtcaacgattatgtccgaaaatttgtcgccggactgtcgaaagacaccgtcatcaaggttaggtccattctggaaccgcttgagaaagatgcagtggacggtcagcacgtaaaagcggatgcaacactttccgaagtgacgcgacagattgtcgagagcgttcaaccgctgaaagtcgaggatgcggctggcaaaatcatcggacaggtgtcccgtcaggggctggcacaatggctgacttgagctcctcacaaaacccgccgtcgcgactgcttcaacctcgtgccatgctcgcgattgcggctgcagtcctggttgcgacgattatgtttctaaatcccgggaatgttctggcagcctacccggacgcatgggtcattgatctggcagaaccattcgaccgagggctcaagtatatctccaaggatctttcaataggtgccttgtcggtcagcgacattacgcgg

SEQ ID NO: 3672 - DNA, 23249 bp, synthetic construct
  variation 7590..7689: note = note, n is a, c, g, or t
  variation 21290..21394: note = note, n is a, c, g, or t
  source 1..23249: mol_type = other DNA
  misc_feature 1..23249: note = Synthetic
ttcggacatcggcgccagcagcggcagcccgccgcggtcgtcggttacggtctcgtaggcgatggcggtcacgccgctgtcgatcaactcgcgggtctggtccgggtcgggggccagatgcagataggtgaacagcacctgtccctcgcgcaggcgccgccgttcctgggccagcggctccttgaccttcaccaccagttcggcctcggcaaagatctcgtcggccgaggcggcgatcctggcgcccgccgcgatgtaggcgtcgtcgtcaaagcccgcgcccaacccggcgccggtctcgaccagcacggcatggccgtgggcgacggcctcgcgggcggcatttggcgtcaggccgacgcggaattcctggggcttgatctctctggggcatccgatctgcattggggtctccttctcctggcggcagaatgccgcagatcgggccgaagagggtggattttctcgggggggagctctgggcctcggccgaagatccatgcatgatgccgccagactgtcgaaggatcatgcgggaaatgacgctggacgaaaccgatcttcgccttttgcgggtgttgcagaaacaggggcgcatctcgaacgcggatctgagcgaacgggtgaacctgtcggcctcggcctgccaccggcgggttcagcggctggaagaggcggggttcatccgcgactatgtcgcgcttctcgatgcccgcaagatgggccgccagaccacggtctttgtcgagatcacgctgtcgggccaggctgacgaaacgcttgccgccttcgagaaggcagtggcgcgggtgccggacgttctggaatgccatctgatggcgggcagcgccgactatcttctgaaagtggtggccgaggacagcgaggatttcgcccgcatccaccggcaatacctgacccggctgccgggggtggcgcggatgcaatcctcctttgcgctgcgaacggtgttcaagaccaccgcgctgccgctatagggcaggggcaacaccggagggagcgagatgatccaggagacggacaagcgcgcagcgatcgtggcggcctgccgcagcatgaatgcggtcggtctgaaccagggctcgtcgggcaatatcagcgtccggcacggggcggggatcctgatcacgccaagctcgattgcctatgacgtgctggcgccggaagacatcgtcttcatggagatggacggcaccgctcatggcgcgcgcaagccttcgtccgaatggcgcttccatctcgacatcctgcgggcccggcccgatctgaacgcggtggttcacgcccatgcgccctattgcacgatgctggcgatcctgcacaggccgatcccggcagtgcattacatggtggccgcggccggcggcggcgatattcgttgcgccccctacgaaaccttcgggacccaggcgctgtcggacagggtgctggaggcactggaggggcgcaaggcctgcctgatggcgcatcacggcatgatcgcggccgaagtcagcctcgagaaagcgatgtggctggccgtcgaggtcgagaccctggcccggcagtatcatggcgcgctgaccctcggcgagccgtcgctcttgaccgaggcccagctggccgaggctgtggcccagttttcccaaggctacggacaagccgagcgcggctgaggcaggtagcccccggttcttctgcggcggcattcgtctcggggcagttcatgcggcgcgtccgacctgatccgcgcgctggtcggggccaagattgaagtcggccacgatccgagccagagcctgagcgctggctgccaggtcgttcgaggcgtcgcgggtgctgtcgacgacatggccattccgctcggtcagggcgcgcaggctggtcatcgattcgttgacttcctgcaattcgacggtttggccatcggcctgggcgctgacctgcgccagcgtctcgtaaacccgagtcacttgcgagacgatttcgtcgagcgattcgcccgcctcaccgaccagacgcaccccgcccgagacctcttccacgctttcgccgatcagtttcttgatctgcatggccgactcggccgatttgcgggccagttcgcgaacctcggtggcaacaacggcaaagcccttgccgctttccccggcgcgggcggcctcgaccccggcattcagcgccagcagattggtctggaaggcgatgtcttcgatgatcgcggtgatctgcgcgatcttgctggacgattcggagatccgttccatggcgaaaacggcatcgcggacaatctcgcccgaaaggtcggcgcgctgcttggcgtcgcccgccagcgagcgggcgtcgtggatcgagccattggtgtccttcagtccgctggccaggcggtcgacagaggcggccgttccctggatcgtgctgctctggctggcggtctgctgtgccaggtcgccggcggtgcgcagcatgtcctcggaccgtccctcgagatcgctgaccgtcgaggcgatggtcgacagaacctcgcgcagtcgaaccacggtcgcgttgaaatcggtccggatcgtgtcgtagtcgccgtgcagcggatcttcgaaatgccgcgacaagtcggagcgggacagcgccttgagcccttcggtcaccagatccacgacttgctgatgacgctcgttcagggtggcctcgtcctcttccttctggcgcatcgcggcccgcgtcagctgcttgaagcggtagatggcattggccatctggccgatttcgcccttcttctcgatgaagggtacccaggcctcgaaattgccttccatgaactgatgcatgatccctgtcagcttgcgcagcctgcgcgtgatgccgtcggcgatggcagcggcgatcaggacgcccaacaacacgccgattccggtagcaatcgaccccaccaccatggcccgttcggcctgtgcgcggttgcgttcggccagaaggccgatttcctcgcccagatcggattcgacggttcgcaggcggtcgatccaggcggtggaggcggcgaaccattgcggagcggtcagatcgccgcgcgcgccgccatagggcagggccgcaatcgtttcgcgcatcggggcaatcgtccgggcgggtttgctggcctcgatcgtcgagacgaaatccggccgcccgagcaccgtctgtgcccgcgccagcagcgcgctttgacgtgcccccagcgccaggaaacggaggtgaacctcgtcgggaaaggtctcggtcccaagcccggtcgcgcccattgcgcgttccagcccggcgctttccttggcaagcgccaccagttcctgcgcctccatcaggatcgccgtggaacttgcgaccttgccgtcgcggattcgggtggccgctgtcaggagcgactcgacgatgccggtgtaatagcccgccagttgcggcaccgtcaggtccagcgcgtcgatcttgccgcgctgggtctgcagcgcctgcagggcgcgcagcgcgctgtcagtggcctcgggcgccatcgtcctgaccaccgacagcttgtcccggaaaaccgacagggcggtatcggtctcggtccgctgtgtgcgaagctccgcagagaagttccgccccttggaggcggtaaacccggccgatagacccctttccttttgcagttcgtggaccagatcgccgatccggtcggtttcttcggccacggtcgccatgtcgcccccgaaccgggcggcggagctgaagcctcgcaggtcgttgccggccagcacgaggatcagcagcacaagcggcacaagggcgaggagaaggatgaatctcagggacatgcggtatgttccatgcaggtcggtcaaacccctaagctaaacgcctttccctaagggaaatctaatcccgcaagacccgcccttcacgccccgtccacggtacgaagcgggccaattccgtcgagccgaaccggtgcgggtccggttgttgcaaggccggttgggcgcgtgttccgacgcgtagatactgactctgttgcgcaaatcggctgacagccgggcctccccattccccgggcagacttaccataaggtcgcggccgtgaattgaggctctggagggcccgatcttggggggtgtgcaggagaaatctctacctctccacatcctgctggaagcaagacgattgccaccgacgagatcctgaccgcaaagatggcccggtgtgtcggaacaggggctggacgtctcctcaggggggggcggttacgccgcggccaagtcggaccgcagcgggttgaaggacgcttgatcgggcgttctgccgtcaagcggtgaatggggtcggcggccgttctggaggccgatgtatcggccaatcccggcttgtgcctcggacaggatggcatcgggacccgcagatcagccttcgcggtccgggtcgaagcgcagaagccataatgcgttcaacgttaccagaacggtggccccggtgtctgcgaggatcgccagccacaacccggtgatccccagaaccgacgtcaccaggaaaaccgccttgagccccaatgcgattgcaacgttgtggcggatgttgcgcatcgtcgcccgcgccaaccggatcagcgccgggacgtcgaccacccggtctcgcaggatagccgcatcggcggtttccagcgccacgtcggtccccgaccccattgccactccgacactggcctgcttaagcgccggggcgtcgttgatgccatcgccaatcatcatcacaccgccatcggcgcccatctcgcggatgaccgacagcttgtcctcgggcatcatctcggcgcggtagtccattcccagctgcccggcgatcgcctgcgcggtgcggggattgtcgccggtcaggattaccggcgcgatgcccatcgccgtcagttgccgcatggcgtcggcggcatcctcgcgcggttcgtcgcgcaaggcgaccagcccaagcggctcgccctcgcggaacaccgccaccacggtcttgccctcggcttcaagcgtccgcgcctgctcgccttgccaggcgctcaggccgcccgcttccagggcgtggcgcggcgcgccgacccaggccctggccccgtccaccagagcctcgacccctttgcccacgatcgcgcgggcgtcgcttgcgccaagcggcgtgatcccggcgtcttcggcggcgcgcaggattgcctgcgccagcgggtgacttgaaccggattcgaccgcagtggcgaccgccagcagatcggtttcgctgaccccctcggcgggacggatgtcggtgacgcgcgggcggccgtgggtcagcgtgccggtcttgtcgaaggcgatgcgctcgacccgggcggcggcctcgatcaccgcaccgcccttcatcagcaggccccggcgcgcgcccgaggacagtgccgaggcgatcgaggcgggcaccgaaatcaccagcgcacaggggcagccgatcagcaggagcgccagcccgcgatagatccaggtgttccagtccagtccgaagccgagcggaggcaccagcaccaccagcgccgaaacggcgacgatcgcgggcatgtaccagcgtgagaagcggtcgatgaaccgctcggtcggtgcgcgggcgtcttcggcctcttcgacgagccggacgatgcgggcgatggtattgtccgaggcctccttggcgacaacgacgcgcagggcggcctcggtgttgatagagccggcgaacaccgtatcgcccggcccccgggttaccggatggctttcgcccgtcaccgggctttcatcgaccccgctgaccccttcgacgatctcgccatcggcaggcacgcggtcgccgggacgcaccagcacgcgctgaccgatcatcagctgatcggcgggactttcgcgggtgcggccgtcctcttcgatcagtgcggtcttcggcaccagattggccagcgcgcggatcccgtcgcgcgccttgccggtggccaccccctccagcacttcgcccacggcgaacaggaaaacgaccagcgccgcttcctcggccgcaccgatgaacagcgcgccggtcgcggcaatcgtcatgagactttctatggtgaacggctgcccgagccgcagcgcctcgaaggcgcggcgggccaccggcgcgaccccgatcacgcaggcaagcatgaaggcccagtcgccgtattcggcattcgtcagcagctcgaaggcccaggccagcgccagcaggaccccggtgaacagcacaaggcggcccttgcccgtcctgtaccaggccgtgctgcgatccgccggatcgtcatggacgtggcccggcgcaccatggcccgcattgcaggcagacggcgcgccgaccgcactctcccggccggaaggctggtgcgccgaatggtcatgatcatgatcgtgatggtgcccctggcaggacgcgcgcggcctcgcggcagcggcgttgccccggtccgaagaggcaggcgcgatgccgaagccgaggcggcgcacgacggtctcgatctgctcgggcgcggttgctccgggcgccagggtcagggacagtttctcgctcatcagcgccaccgacacttcgctgacgcccggcaatttctcgacggccttcgtcaccttcgcggtacaggcggcgcaatccatgccgctcaccgaccattgccgccttatgctatcgctcatcatccgtctcctgcccggcgctgcgccacggcccttgttcctatcgagtcgaaggcttacttgctctagcaactggagcttcaagaggtttctcatgctgtcgatcggaaaactgggcgcgaggaccggggtgaaggtgcccacgatccgctattacgagcagatcggccttttggccgaggccgatcggagcgcaggaaaccagcggctgtatgacgaaaaggcggttgaacgactgaccttcatccgccatgcgcgggagcttggttttccgctcgatgcaattcgcgagctgttgagcctgtcggatcaacccgacatcccgtgcggcgccgcggatatgatcgcccggcgtcagctggacgccgttcgggaacggatgctgcgcctcaaggcgctccagacagagctggaacgcatggtggcgcaatgtgcgcatggcacgatttccgattgccgggtcatcgaagtgcttggaaatcacgacctgtgcctgcatcccgaccacggccattaagccatcctcgatgtaggcgttccctcaaggctcatattgctgagatacaggcgttcttccaatcgctaggctcaggaagccatcgcgacgcgtcactccggtctgatctcacgccggtggcggacaagaggggtgaccagtcttcagccggaaatcaccttgttgcgcttgaggtggatgaggccccgtcagaccgggtctgccttctcatagatggcagctgcgtcgctccgaacgttgcatgaggcggcgcccccaggtggcgggcgcggagtcgccgatcgagccgaaggtcgacagccccgccgggggcgcaaaagcgccacgcgtaatggggagagcaggctcaagcgagaaccgggcgctgttgcgcaaatcannnnnnnnnnnnnnnnnnnnnnnnnnnnnnnnnnnnnnnnnnnnnnnnnnnnnnnnnnnnnnnnnnnnnnnnnnnnnnnnnnnnnnnnnnnnnnnnnnnntgatttgcgcaacagcgcctactgaccgccaacttcagcaagtccgagtatgatggcatcgctttttgccggtttccatccaatcggagccaggcctatgcagcgctggtcacgcaggtcttgcaggcgcgtgcccggttgatcgccacaggacggcccgattggtcgctggcaatcctcatttcgaccaagcggatgatgcggtttgtttccgatatcctgcgcgaacctttcggcaacgtgccggccatcgcccatgccgcctccattgatatggaaggaccgatcctggcagccgacgtcattgcgctactactccagcaagcgtgtgctgcggatgacctcgaccagttggtccatctgatgtgccagtaccttcgcggccgtgggggggggtgacccaggcaagggtgatctgggagatgcgatcagattggagagcgcgctggcgaaatggaaccagcggatcgccgcgggacgcgccccacacgcgaacagcgtcatccagcctatcgctgccgtactctacgcaagccagcaggtcggcctgctcggcgatcctgacaaggactggatcgccattcgcgccaagcttgctgatggagcgtgtccccgactacgggcgattgcgaacgacgcccgcaacgtgcgtctgctcgagcggggcaatatgctgcgcaatacgatggaacagaactggcgagagcggggtcgatatgctgatgcgcttgacatcacgcggctggcgttcgttcaggaccactttgccaccacgcagcgccccgagacgggcatcgttgtgatgaacatgcacaaggcaaaggggaagcagttcgacgaggtgatcatcttcgaaggatggccggtgcgggtcggcaaggaggtcaaggcgaacccggatcggatcgtccgcgagaacaggcccggaaccttggcgcatcgggcagtcacgctcatgctctataccggcgctgcccgagtggatgccgtgcagctcgggccttggaacatcaagggcgaccgggtggagtaccgtcgccagaagaccaagcgttccggcggcatcctgatcagcgttcccttgcatgacgatctgcggcgcatccttgaggaactggcggcagacaggccgtttcttgcgaccgcgtcgggcaagcaacgctcggccgcagggctcgggaacgcgatgcggaaatggtgcgatgaggcggggctggacgtctgcacttcgcacgggctccgcaaagcctgcgcccgccgcctggccgaagccggggcgacgccccacgaaatcgccgctgtcaccggccacaagaccctggctctggcgcaactctacaccgaagcggctggccgcgaggggctggccgatgccgcgttcgaaaaactgatcgcccgaccgaatggggaacagaacgtggtgaaccttcacgaaaggttcgccaaaggcgacaccaacacattggagggaaaggaaaaaccgtgataagtggtgatcccggcaggacgccgcgaatggcgtaaaatcaatacgatgccgggggaagttccaaattacggcaccacgacatttcaataacttagatcgcgggcttccaagtggttcgtcggacctgaaaccaccaccggaacatcagggttcgacagaggcctgcgactgattcaagctcctttaccgcctcagcgctcccccccccctgacgaccacagcgcactcaaagcggaacgtcacgatccgcaacgcaaagtctcgaaaaccgccgtctgccccctcagtggcgccgcgtcccaccactgtgcccacgtcccgcggccagcccgtcacatacgacaaacaccgctgcagacgcagcccacgcacaccccgatggcctccgtcctgccgatgccgtcattcgacgctcaacaccatcatcgctcggcgactcgcggacgcggacattcgcttggctgatgaaaccggacacaagttgcgtagcggacggcccgcccctaacgttgacctgtaagctgagatgctgcggcgcagcccgtcaagcatgccgttcgcggcacgcgcaaactctctggcggtcaggttagatcagattcgtatgctcttggcccgacgaaactactttccactagctctatagtaaaaaggaaacgcgccccgtagagcgcgcttcaatgtggtgctacttcgagcttgttaacggctcgaccgcgaattctgaacactggaagtgttacacatacccgacacgctttcaagttgcatttcgcccgcgcacaatgaattctaattcgggcagcttcttaggtggtgaacatgcgtctaggtctcgatatcggaaccaattctatcggctggtggctttatgagaccgatggcttcggggcgaaggctcggatcaccggtgtgataaacggcggtgtccgtgttttctcagacgggcgcgatccacaatccggtgcctctctggcagtggatcgccgcaccgcccgtgccatgcgtcgtcgccgtgatcgctacctacgtcgccgcgccactctgatgagacttttggcaaatgcgggcctcatgcctgctgatccggtggaagctaaggcgctggaggcgctcgacccctacgcactgcgagcagccgggctggacgaggccctgccgctcactcacctgggtcgggcgctctttcacattaatcaacggcgtggcttcaaatccaatcgcaagacggatcacggcgacaatgaaagcggcaaaatcaaggaggcgacaggacggcttgaacaagagatgatggccaaaggcgcccgcacctatggcgagttcctgcatcttcggcgtacgcgggccagccacccgcgccatgtcccgaccgtgcgcacccgcctctcagttgccaatcgggacgggccaaacggaaaggaagaagccggttacgatttctacccggatcggaggcatttggaggaggagtttcacaagctttgggcagcccaggcgacatttcatccggacctgaccaacaatctgcgcgatctggtcttcgagaagatcttctatcagcgcgcactgaaagaaccggaggttgggctttgcttgttttctgggtatgacgacatcccaccggacgagcgtcgactgcccaaagctcatcctctgagccagcgccgcacgctgcttgaaaccgtgaatcaattgcgtgtcaccttggacgggcgggaaaggcgccctctgacgcgggaagaacgcgaccagatcatccacgcgctggacaataagaaaccgacgaaaaaacctccaatgtcggcaactcagggaccgacgctaacactcaaatatctcgccgaaaaggtcctgcgcctcccggatggtcagcgcttcacgttggaaaccggcgtgcgtgatgccatcgcctgcgatccggtacgcgccagcctgtcccaccctgacaggtttggcccgcgctggtccacgctggaccctggctcacaatgggaagtgatttctcgaatccaaaacgacgcggattacgccgcgctggtagaatggctggcctctacctacgcgctcgacagggaccatgcggaggcgattgctaacgcacccttgcccgcaggacacgggcgccttggcttggcggcaaccacccgcattctggaaaagctggaagaagatgtcgtcacctttgcggatgccgttgctgcctgcggttggcaccattcggaccagcggacgggtgaatgcctcgaccgcctaccctattatggcgaggtgctcgaccgccacgtcattcccggaacctatgatgccaaagacgacgacgttacccgctacggccgcattacgaacccgaccgtgcatatcgggttgaaccagctcaggcgtttggtgaacctgattatcgaagtttacggcaaacccgaccagatcgttgtcgaactggcgcgagagctgaaacaatccgaccagcagaaaagggaggtgatgaagcgcattcgtgacacgacagaggctgcgaagaaacggagcaaaaagcttgaagaacttgggattgaagacaccggccgcaacaggatgctcctgcgcctctgggaagatctgaaccccgaagacatcatgcggcgcttctgcccttatacgggcaggcgcatcagcgctgccatgatctttgacggctcctgcgatgtggatcacatcctgccctactcgcgcacactggacgacagcttcgccaatcgcacgctctgtctgcgggaagccaaccgcgaaaagcgaaaccaagccccttgggaagcttggggcggcacgccgaaatgggacgccatagaaaccaacatgaaaaacctgcccgaaaacaaacgctggcgcttcagccccgacgccatgcagcggttcgaaggcgaaaaagacttcctcgaccgggcgttggtggatacccaatatctcgcccgaatatcgcgggcgtatctagacacgctgtttacggagggcggtcatgtctgggtggtcccggggcggttgacggaaatgctgcgacgacattgggggctgaattctctgctaagcgacagggatcgcggcgcagtcaaggtcaagaaccgcaccgatcaccgccaccacgccatcgacgctgccgtggtagccgccaccgaccgcagcctgctcaaccggatcagccgcgctgctgggcagggcgaggaagccggccagtctgccgaactcatcgctcgcgacacaccgcccccttgggacggcttccgtagtgatctggacgcgcagcttcgcaaaattatcgtcagccaccgggccgatcacggccggatcgaccgggaggggcgcaagcatggtcgcggcagcacgtccgggcagttgcaccaggaaaccgcctattcaattgtcgatgatacgcatgttgcaagccggacggatttgttgagcgttaagcccgcgcagctactggatgaactcggtcgaagtggccaaatccgtgacccacaactgcgaaaggcgttacgagtggcaactgccgaaaagattggaaaggactatgaaaaagccttgcgcgatttcgcggccaagcccggcccttaccaaggcatccgccgggtgcgcatcatcaagcccctgcaagagcaggcacggattcctgtgcctgagcagaggccgatcaaggcctatcagggtggcagtaaccactgtttcgagatttggcagcttcccgacggtcagattcaatctcaggtcataacgacctacgaagcccatcgcctcgagtgccacaagaggccccatccagcggccaaacgcctcttgagtgtccacaagggggacatgcttgcactggaacgggaggggcgaacagtcgtcggatacgtccagcaaatgcacgtcaaaaatggattgtttatcgttccccataacgaagcaaacgccgatgctcgcaacagcgacaaaacagatccgttcaggtggattcagatagcggcacggcccgcagtcgacgccggaattcgtcgaattgcggtcgatgagattggtcggcttcgggatggaggcgcaaagcggcgctaacgcagcttggcccgaatcgagaaaacatgtcaacctcccaatggcttggaggatgagggcatggatcaaatcgtggacatttcgaccgacggccggcatctctcgcgcgaccggggcttcatgaaggtgagcgaaggagccgaagagatcggccgtattccactggaccagatcgccggggtgatcgtccatgcatacgggaccacatggtcaacctcgcttttgacggaactggcggaccgcggggcgccggtcgtcttgtgcgggtcaaaccacgcaccccgatctgtgctccttcctcttgagggacatcatgcccaaggcgcccgccttcgtgcccagtggcaagccaaagccccactcctgaaacaggcatggaaacagatcgtgatctgcaagatcaccatgcaggccgccgcactggaggccatgggggagactcatgctcccgtcgccatgctcaaacgcaaggttaccagcggcgacaactccaatgtcgaagcccaggccgcccgatactactggccccgtatgatgggcgagcagtttcgtcgggatcgcactgcacccgatctcaacgcactgctgaattacggctacaccgtgctgcgtgccgccaccgcccgcgccgtcgtggccgccgggctgcatccgaccatcggattgcatcactccaacaggggcaacgcctttgccttggctgatgacctgatggagccgttccgtccccttgtcgattgctgcgttcgcggtctctcagcacgcaatggaccggaagtagatacacaagccaaacagactctggctcgtctcatcgcactcgatctgccacttgggggcggttcgacaccggtttcggtagcactcagcaaactcgccgcttcgttgggccagagtttcgaagccggaacactgaacctcgccctgcctatgccacccgatgcgcttaccctcgcggggctgggggcatgaccaccgcgcccacctttctgtctggatatcggataatgtggatactcgtgatgtttgacctgcccacggacaccaagccgcagcgcagggcggcaacggattttcggaatttcctgctggacgaaggattcgaacgcagccagttctcggtctatgcgcggttcgtgaacggcaaggacgcgttcgagacgcgggtgaaccgaatcgagcggcatctgcccaacaagggtgacattcagatactcagcttcacggaccggcaataccgtgatatcgtacacttctcggatcaaggtcgcagatctgcccggaaaaatccggaacaactggtgctgttttgatgatggttccccagattttcacactcccccactcccaaaaacgccgtaatttcggtgtcttggggagggaaccagtttagccgttcagaattcgaggtccagccgcaacgcctgcgcgcgcgagggcagcagcgtccagagtttagccgttcagaattcgaggtccagccgcaacatcggggagaacgggttccgcatctcctccagtttagccgttcagaattcgaggtccagccgcaacatcgacgaacagcgccgtgcttacgtgtctagtttagccgttcagaattcgaggtccagccgcaacttcgcaagcgtcacgggcgacatacatgccagtttagccgttcagaattcgaggtccagccgcaactgcttgtgtcgcgaatgatctgatgctccaagtttagccgttcagaattcgaggtccagccgcaacgaaacagcactcggttagccggatctggaaagtttagccgttcagaattcgaggtccagccgcaacattgtgtaatgaccgaccgaggtccgggtcagtttagccgttcagaattcgaggtccagccgcaaccgccatgcgggcgggccattcgcaggtgggagtttagccgttcagaattcgaggtccagccgcaacgtggactgaacgcgcacttcatcccgcccgagtttagccgttcagaattcgaggtccagccgcaactacggcacgggcgctcgtccgctcatgccgagtttagccgttcagaattcgaggtccagccgcaaccatgccatggcccgaccctctccgccgggcagtttagccgttcagaattcgaggtccagccgcaacagcacaacctgtccgaagacccgcggctgaagtttagccgttcagaattcgaggtccagccgcaacagggcttgcgagcgtatggtcattcgacgcagtttagccgttcagaattcgaggtccagccgcaacaccggcacccattgggccgtggtcgatgcgagtttagccgttcagaattcgaggtccagccgcaacgcacgcggctatgcacccgttcccacatccagtttagccgttcagaattcgaggtccagccgcaacgagacgcgcctgtgcgtctggtgcaagcgcagtttagccgttcagaattcgaggtccagccgcaacccgtggggatgatgaccatcgttgcattcaagtttagccgttcagaattcgaggtccagccgcaaccgcgctggcggtgcaggtggtcgcgatccgcagtttagccgttcagaattcgaggtccagccgcaacgggaggggcggggaaatcgtcctgcatggcagtttagccgttcagaattcgaggtccagccgcaacaagggcaaggataacaaggcgcatgactggagtttagccgttcagaattcgaggtccagccgcaactggaaagcgagaagaaggacctcgcggaccagtttagccgttcagaattcgaggtccagccgcaacgggatagccctgcggcaggagacggatcagagtttagccgttcagaattcgaggtccagccgcaacaagcttgcagaacaggtcagagaccttacaagtttagccgttcagaattcgaggtccagccgcaactgaggagaaaatcatggctgcactgaaacaagtttagccgttcagaattcgaggtccagccgcaacgcgaggtgccgggatttcggattgctcctcagtttagccgttcagaattcgaggtccagccgcaacgagccggtaaacctgatgctcgttataggagtttagccgttcagaattcgaggtccagccgcaacgaggtcaccaccatcagctacgaggccgcgagtttagccgttcagaattcgaggtccagccgcaaccgggtgcggcggtgatcgccgtccacctcgagtttagccgttcagaattcaaggtccagccgcacagttgtgaatggctgattagcgcctttggcacaaaggcactcgcgcttatacgccgcacacccgcccggtcagcgccaccagatcccgctcttcagcagccgtgaacgccagcccgtaggccttggagatccgccggaaccgcagcacgtactggcagcggaagccctgatcgggcggcagccagtcgagcggcccgcgcgcgcctttcgagcggttcgccgaggcgctgacgggcagcaggttgacgggatcgcgggcgaagcgagcgcgtttctcggccgaccagctggtcgcaccgtgatcccacgcatagcgcagcggcacgatgtgatcgatgtcgagatctccggcctcggccacaacctgcccggtatagggcgcgatccagcgaccgtggcgcaccgaacagcccgagggcgccagcgtgaccggcacggtggagagatccgccagcagctcggcgcgggtatcgaggcaatcgccatcggaatcggcccagcccgcgccgaaggccgcgcgggtatagggcgcggccgggctcgccagctccggggcccgcgcaaccggggcgcaggccaggagcgtcaggctcaggatcagcaggggaagaagacggcgcatggggacggacctttgaccgggtgcccccaagatcccgttaaacgccgaccgggccgggggacctcataccagccccgtcatgacctcgcggttggcgatgatcaattcccgcgccgcggtcgcgccgcccttcgagaccgagtaattcagccgcacctcctcgatccggaaggcgccgaacagatcgcggatctcgggccggtcgttgatcgacagcacgaaggcgccctcgatcctgcccaggcgctcggccagctcggcgaactggtcgcggtcgaagagccccttgccgtaatcgtcctcgccgccccaatagggcggatcgagatagaacagcgcctgcgggccgtcatagcgcgccagcacctcctgccagggcaggttttcgaagaccacgccatcgagccggtcatgggcggcgtcgagcagcgggccgatcttcgccaggctgaaccgggcgctctggtcgggcgccacgccgaagaccccgccgagctggccgccgaaggcgagccgctgcagatagaggaaccgtgcagcgcgttccagatcggtcagcgtggcgggatcgcaggcccggagccgctcgaactcgcggcgcgaggtgatctggaagcgcatgacctccatcagctgcggataatggcgctgcagcacgcggaagagattggtgatctcgccgttcagatcgttcgccacctcgagccgcgggcgccagctgcggcgcaggaagaccccgcccatgccgaggaagggctcgacataggtgcggtgcgggatcgcctcgatccgctcgatgatccgccggtgcagagccttcttgccgcccatccagggggcgacgggggttgcggggacggtttttcgcatttcgttcatgtcaggaacctgttctaggtccgcccgctctcgcgagagtcgggcggcagattcccttcgtggtgtcggcgcagcttctgttcacgcaggctgcgtggtgaggcggtgttggcgcaccgccttgcccccgcccgaaagcgggggaacctctcaggcccggcggcgcgtgaccgcctcgccgatccttcgcccgatctcggctggcgagggggcgatccatccgatcagcgcgaccaggacgatccaggcggggagttcgttgacgacgacggtctcgacgcgatccgccctgaccctgttctcggattgctcctgtcggatttcgcgggcgcggggccggacgatgctgggtgcgttctcgaccttcaggccctggacgttctcggccccggcctggacattggcggcgacgtgcgggccgagcgggaccggcagcccgccgcagcccgccagcagcagggccgcgaggatcaatcgaggccggagaggcatagcgcgcgttccgcggtgcgacggttgacgaggccgggcacggtcttcccgcccgccttcacccacatcgtcagcgcatcgcaggcgccgggcagatcgcccgcgagggcgcggcgggacatgctcgaccggcagaaggcggcggagccgatattgtaggcggccgagacgaaggcggcgcggatctcgaccggcagctcggggggcagacagggccggatctcggcctcgaactcagcggtgcgggccgcgaggcggctgcggcaggcctcgggcgtcgcggtctggccggggccgacaccgcgagtttcgccgtagcagatcgtccagacgcccacgatatcctgataggaggcggtgcggagaccttcccagggggcgatcagcgcgacggcggcggcgatcaccgcagcggcggccccgcccttcgcggcgctgcgacggcggatcatcggtctgccccctcaaggccggtctgggcgatcaggcgggccagcacggcggcggcggacagaagccccacggcggcggcgtagatatcgggcggcaggccgagcatgtcggccgagagcagcgaggcggcggcctcgaggccggagaggaggaccatggcggccagaatccagaccgaccacgcacggcgcagcaccgcgcgccagttgggcacgagtttcatttgggatctcctgtggctgggaacggcccggtgtcagggccagacgatcagcgccagccagatggcggcggtgagggtgagatagaggggcaggctcatttcccgccccgccagaggcgcagcatttcggccagatgggcggggtcgcgcttgagccagaggagcgccgcggcggcggtttccagcgccagcgggcccagcacggtcacgccgacgatggtcaggcgctcgggcatgtcgagccagagggcgatctcggggcccgcgacatagccgatggcgcccgaggcgatcacgatgcccatgcgggcgatcaccgccatgccatcggtgcggagccagaccaggaccagcccgccgagaagcgccagcagggtgcggagcgcgtggtcggtcgcctcaagcatggcggcgcgcccggagggtccgccccgccccgggacggtcgcgggggatgtcggtatcgtcggccatggccggtctccttcgggatgggtctcgggggatcagagctcggtccgcgcgcccgcgggagagagggtgacggtcaggaccgcatcgcccgcgcggctcctcacgacggcaaaccgcacatgcgtggccagggcaggcacccggacggtctctgtcgtgagcgcggggaaaagctcggtgcccgaaccgcccggcagcgtgaccgcccgcctggcataggactggaacggacagaggaacgcgccctcggtcaggggaaaggtcccggccccgccggtctcgttggcatagtcgccgggcagcgcgatccatggcccccagctcatgccgccatcggacgagaacgccatgcgccagccatccgagcccctctgcgccgaataatacgcgacatgcgccatcgcaaaatcgccaatcgcgacgatcccgggctcggaggacccgtccgaatggaactggtggcaggcggccctggtgttggtgctgtcgtatttgtccagaagcgcggcgaggatcttcccggtcagcatgccataggccgtgccggtgctgtcgagcgcctgcgcctcggtcagttcccgcagcccggccggaacgaagctgtcagacgcatagccgccaagcgcgatccagccgctattggcctcgttgcgcatcctgagcgctttggcggcggtatcgacccagagcatgccgggccaggtctcggggggcggggtcggtccggcattggtcgaggcggcggcggccagggcgccctggaagaaggcgaaggcctgggccttggtgtgggtgacgttcgggatataggtggcctgggtcatgggctcctctgggggttacgtcgcgcggaaggccgcgacggacaggcgggtgacgcgcagcgcataggccgcgctttcgaccgacagcgccgcgcggatctggaagaggcggccgtcgaactcggccgcgtcgaagctttgccaggggccccaggtggcggtcgcgtcgtcatggacccggacctgggtgtcgagatcgccataggcatcggccccgccctgccagaagagcccgtcgggcggggtccagaaggcgcccgtttcggggccgaagatccggtcctggcgttcctcgatcaggatcccgacatcgctgaccagccgcaccggcccggccgtgccgaggttgatgagcgccgagaagtaatagagcgcctcggtcgcgccctcgtcggtcgacaagacgccgcccgcggccgagcaatccgccttggtcccggcaaagcccggcgcctcgtcgagccgggcgacctctgtcatcggcaccagcgaggcggcgcgcagcgcgaccgcgctgaccgggccgggattgcccctggcgtcatagggccgcgcgagatagctgccggtcttgagcggcagcgaggcgtccgtcgccccgcccggcaccgccttgccgatcaccaccgagctttgccaggtggcgccggtcagctcggccgaatggcggaactcgatccagccgccctggcgcacgtcgagcgagggatgccggtcccagcgcagcatcgccaccgcgcccccggccgactgcccggccaggttggtgatcgcgaccggcggggcgttctcgccctgcacggcnnnnnnnnnnnnnnnnnnnnnnnnnnnnnnnnnnnnnnnnnnnnnnnnnnnnnnnnnnnnnnnnnnnnnnnnnnnnnnnnnnnnnnnnnnnnnnnnnnnnnnnnnccctgcacggcggcggcgcccgcatagacccagtccgaccacatgccgcgcgtgttgcgcccgcgcgcgccgaagacataggtgccgggcgccatgtcgtcgatcaggtcctcggcaacgtccgtgaggccgcgcacggtcgcctcgggcgccgagatcggccgccaggaaaactgccaggcgtcgatgaagggattgtcggtgctggctgccagccgcacccgggtcttgaccccgccgccgccccgggtctcgtacagctcctcggtcatcgtcggcgccgagacccggggcctggcggtcggcgagggcagcgtcgggatgccacccgcgggccgcgcctgttcctcgctggtccgccagtcgaagatcgcggggccggtttccaggcaggtcagccgcacctggacgccctcggggccgaccgtgaccgcgcgggccgtgacctcgaaggccttggcctcccagccccggcgcgggatcgtgacacggacagtgtcgcccagccgcacgccccaggcggcgaggctgcagggcaggatcacctggcgctggcgccgccccttcaggagcgccagcttcatcagccgctggccgcgcaccggatcggtctcgcccggcagctcgcccagatcgcgcaccagccgctcgccatgatcggcggcacgatacgtctcggaggccagcaccggcaggtcggtcaccacatgctcggccgtcgcatcggcgaactgcgccttgacggtgttgaactgctcctcgaaggggcggcgcgcgatcacccggatccccgcgaccagcatgtcctcggtgatcgtgagctcgggctcttcccagactgcgccgccgagcgtcagccgcccgcgttcgcaggcccaccagccgccccaggccgaggagagcgcatcgaggttctcgcgcgggctggcctcggtatcgagcacgccgttgaaggcatagcgcggctggctgccgcccgtggccagcggcaccggttcctcggcggcattggccagcgccacgagggcggcttcgtccagatcggcctcggtccagccgatgccgccgaagagctcgggcgtcagggcgtagtcgcgcaggcacagcgcggggttcgtcgaataacgccgccccttgaaccacagcgcgaccgcgcccgccgcgatgtcgatctcgacatagaccgtgccgctgcgcccggcgagttccgcgaccggcagggtcgcccgggccaggtcctcgcccgcgacctcgcccgatccggcgcggaagacgagatcgccgccggtcacccccagataggcgccatagcccgagccgccctgttcccagatcacgccctcggggttggccggaaaggcgacatcgaaggccgcgaacagatccgcgtcgagcgccatccttgtgtaatcgagagtgtcgccgtcctgcgcggtcagatccgggctcagcccggcctcgggggtgagcccgccgggatagcggtgcccgaagaaaaaccgcgcggcgatggggccgccggtccaggcagcgtcggattcgccctgcggatagctcgcacccgaggtccggccgatggcgccgccgtcatagcctgcccagagcgcaatcgggcggagggccctggccgaggcgagcggggtcgaggtccactcgcgcgggtcgtaaacgcgcttgccgcgggcgcggacgcggatctgcggcgcgccggtcgggaagaggtcgcggtcgtaatcggcctcgaaatagacataggccacgccgcggccgcggtgatcggccgtccattccgaggcggccgcgacatagcgcggctcggccgcctgatcctcggcgccggtatggacgcgaagcc

SEQ ID NO: 3673 - DNA, 23240 bp, synthetic construct
  source 1..23240: mol_type = other DNA
  misc_feature 1..23240: note = Synthetic
gcgatactccaggtgttcgacgatccttcgtttcgtgggacggagtcgcttttccatgctgccttcgcctacacgtccgctcgcaccgcggacaaactgaaaccgaacttcgaggcacacctcgcggcacgcttccgacggcagcgggactcgatgaagtccttgatcaccagcaccaaaatccctgccgttgcggcgcgcctttcgacagcgtttcgcttcggagggtttcaggacaacaccatcaatcggctcctgctgatgtcaggctctgaacaccacttgcactccgttcctatggcgacgttgatagagcgttgggatgctgcaccacaagcggacaccgtgaagtctcgggcaacactgagaccggagcgcaaccgaggtctataggctgctctggcttgctctatgtcgaaagctgccggtctgctgtccgcccccagacctgccattccgccccgccgcagcgaaggtcggcttcccgcccatcaattccagcggtacttgcttccagccttctgcagccgttcagcgagggtttggggatggtcctttgcgtattcaagcagagcttcaacatgacgttccatgaaggctggtaggtcggtctcttgcacatccgagatcgcggcgcgtgttaaaaagaggcccatgagttgggcatctagctggcggattttggcgagcttgtttgcgtagatgatatctgttggcacgaggccgcaactatggtccgcgaggttctcttgcacggtgtccgagaacttgcgccagagctcatgtgacggccaccgcgagcgattggtgtcttgggttggtgaacagtagcgtatgcggctaaaggcgtctcgataggcgtcgccgatacccgcgcgaagatcatcccaggagtggagctcgaactgattgcggagttgtttggatccaaggcgcagctcaaaccgccagaccagactcttgtctcgctcacgcaagtttagaggaccgttcccctgcttattgcgcgttttgttccaaatctctagccagcccagctttcctgtcttcatcacctccagccgcttgtcatagatcgccagttggcgattgctcactgctccggcacgaaggccagtgacgcgcgcgccggtcgcttgtgtggccgtctcatcaatcccggtatactccgtgactttggtacctggtggaacaacgagagcggtgcggtcgggttcaaaccagggcgcaagcatgtccacggcgacgtccacgcgagagatacgcatgagctgatccgagtatcgaatgcggagatcctcagtcacgcggcggaagtggtcttctgcttgaccgagcccacccgtcgccaggccgaacgcgcggaagtcgacaattattcccggattgtgaggaacccgatcaagtggatcttggaacatccagacagcaccaaggtctccggtatggcaggcaaacccgcgtgctccctttggtgtcattgagaaggctgtgtcgccaatctggacgatgcattcactgttcgtctttcgacactgggtcttcgcttgggagaattggttctgtagagccaatggaatatccgcctgaacggtaaccttcaggccgtcaaacccgacgtggaggatttctgcgcccatatactctgtctttcattttcgtattcgtggaggggggtgttacatgacccccccttgctcgctccgctccgagcgcagagcgcgctggcggcgggccgccgcgcgtcgcgctcgggcgaaccgaataagagggtgagagcaccattgcttatcgcaaccgtatctgcgctcggaggctgtccctccgggactgagacttcaccggggccactccccctggagaacgcggcaacagatgctgagaaagaaagcgctgcgctcattcggaggtgtgcgctctgcggcgcgcgtccgcccagccgagaacttcgtcttggcgataccgcaccgaccgtccgagcttgtagaacgcgggcccatacccggtaacacgccatttctgaatggtgcgcaccgattggcaaagcatgtcggccaccgcaacttcgtcaaggaacgcgggcgcttggccggattgctcagggtcaaggagatctctcatgtctcgtcctcattagttggatcaatgacgacgagttacgcaggcgcagccgggcgacgctatccgaactgcttgcgataatgtttcatgatttcgggcgttaaacccaagtcgctgacagccatgcttttttcgcgaaccgtgcgcgacgcgtttgcgatgcggccgaaggagatcgtcgggtccaccacctgggcaatgcgcacgcagaaccgagcggcatcggtgatcggctcggaatcacctgtccagtcgagtttgaagggtctgcgcaaaatggcctcccatacttgaaaggctgcatgaagcagatgaagcgtcgcgtcgtcttcaggtcggcccacccgtcctttgccgaccatccttgttgcgatttttgttgtctcggcgagcgcggagagctttgcagcaagatcgaccacatcccctttggtaaggcgcggtggtgtggcctccgcgtctgaagatttggaaccacgctgatcgggatacagagctggagaaaggtcgtgggcgagttggaagctgtctatcgcccgccaagcctcgccggtcattatcgacagcatgtccgcgagctccgatgccttttgggtcagacggtcgaggtccttgcgcacagttttcttgtttgcatgatcctgttttctcaggttccaataaaggagcgcaccgcattcaaggctcagaaagacggtggaagaggtatctgacggaattccgaactctcgttctattgagctgcttagagcctcggagaagtatttccgctttctgatctcttctagctggagaagcgcaaggaactctttgttcgcgaagagaccattcaagtagctcatcctgctatcctttgaccacgcgtagcggtgtggttcttgcgcgcaaacccagtcccaacccttcactcaatgctgcagcgttttcctctgccgccttgcgcaccggatcatccgcaaggtgtgcatagcgcatggttgtctgaagctgagtatgcccgagcaagcgtcccaccatctgtattggcatcccagacgataccgcgtttgaggcataggtatggcgcagatcatgaatccggacgtcattcaggcccgccagatcgcgaatgcgccgccaagggtgctgcaagtcggtgatgtgctggccttcaatccttcccgcaatgacatagggattgccgggatcgtggggcagggcgtccaggactgcgcgggcagctgatggcagaggaatgcgccgcgccccggttttgctgtccggcagttccatcccgttgggcgtaaggtagtcccaacgtaacgtctgaatttctccgaggcggcagccggtgaggatcagcaacttgaacgcggccacaacataggggctttccgaaccggaccgttcgcagtcagcaagcacttcgcccaaccgacgcaactccgcttggctcaggtagcgctcccgttttcgttcgcggtacttgggaacatggcggcaagggttggatccatccgggcgaaggccccagacttcagccaggttgaacatcttcgacaacacaccgagcgttcggttggcttggtatggcttgtctctgagtttgtggtgcagttccgcgatatcgcggcgttcgacatcgacgactttgaaggtgcctatggctggattaatgaagaagtcgatagatcggcgatactcgcgctgagtgcttggcttgcagcgctccatgacatgagcctcgaaaaaccgttcacagagggccgcgacggttgaggcgcgccggtgctggctgatctcttccaccgggttaccgccactggccacgtccccaagcagctctttggcgcgttgccgggcctgctggactgtcacggttccatgccgaccgatggaggcgcgacgggtccgtccgcctttgcgatactggacttgataagtgcgggttccggagcgcatgacacggacaccaaagcctttcacctcgtcgtcccacacgaagtaatcacggctttcgacggttaggctttcgacaaggcgcttggtcagttttggcattcgaactctccgcaacaggcccgatccatggaagcaaggtggaagatcggaggggcgtttcagtgcgcaagaggtagaaagccagcgtgcgagtggtcaatgaaaaatgcttcgattcaataagatagggtagagcagaggagttcagcgcagcccgtagaaatgctcagaggcgatctcataacctgaaggtcgtaggttcaaatcctactcccgcaaccattgatgtcgaacagaccgccttcgggcggtcgttcgcattctggatccccccaagacccaaaagtccggcaagttcgccaacaagctcaatggtcaagccatccgcttccggaacaagacggatctccgacaaaaggctgcggatagcatccgccgcttccactgatctctgcgggtcggccagcgccccttccaggctctcgacctgtgcgcgataccgatccgcaagaccgggatgaataaggaccggtgactcttcttctgtctcgcgcaactcctgctcaagacgcagcttctccgcctccagcgccgtcatcttgtccttcatgctgatgtggaacatcccctgggcaatcgcatcgacgatctggtctatctgtcgattgacggcggcgagtttgcgcgcgttctgggcgcgctccttgcgcaccgtccccgcaaggcgattgaactcttcctggtaggcccggacatattccgcgataaggtcgggctgcaaaagctgctcctttagcccgctgaggatacgggcctccaagtcttctcgtctgatcgtcaatcggttgtcgcatgtgcctttgttgcggacacttgcgcagccatagaattggcttccaacctgaacaaagccaccaccgcagcggccgcacttgagcatcccggaaaacagatgccgggcgcgcctcgcccggccgagcttcttgatgccgtcactgattgccatattccgggtttgaagctgtcgtgccttcacggcgtcccaaaggtcctcgtccacgatccgcaggtgtggcacgtcttcgattacccacgcgtctggcgggtttgggcgggcctggcgtttgccggtcgctggatccttgatgaagcgttggcggttccagacgaggcgtccgatatagagttcgttgttcaggatgccggtgccgcgctggtggttgccgtagatcgtcgaggccccccatgtcccgcgagggcctgggacaccttccgcgttcaaggtgctcgcgatcgccctcgggctgagcccattcttgtagtcttccaaaatcctgcgcacgacctcggcctgatccgggttgatggcccgttccccggtggccagggtcccgtcggcttgcatctgacgcaggacgtcatagccaaaggtaacgcctccggccgacttgcccttgcgcactctgccttccagaccccggtgcgtcttctgggcgagatccttgagaaacaggctgctcatggtgcccttgaggccgatatgaagctcggagatctccccctctgccaccgtgaacacaggaatgccctggaaccgcatctgtttgaagaaggccgcgatgtgctcctgatcccggcttatccggtcgagcccttccgcgaccacgatatcgaacgcgttgccgcgcgcgtcctccagcaaacgctggtaggcggggcgcaaatgtgacgcaccgctgagcccccggtcggaataggtctcggcctccctccagccgttgctggtgatcaaacgggcacagaggcgatgttgatcctctatggaactgtcgctttggagatccgtggaatagcgggcgtaaatggcggcgcgcatgggtcgggcctttcggtttggtacactagacgggcccatccaagtataggcatgggatgggccctgtcttccactttcgattgcaacccgttgcaacggaaaatcgatcaaattgatacctggcgggtgcctcggtcacgtctggcggactttgggccgcttccccgagaggcgcttcaacgtcgcttgaaccaggtcctggtactcggaacaggctgacaggccagtggcgcggttatagtgcttctcggccatgtcgagggtcgcgtgcccgagtatgtcgcggatgatgttgacatgctcggggtcctgctcggcgatgctggtcgcggcgatggtgcgaaacgcatggggtcgcagtgcgtggccgaggaggcgctcggtgaccttgggaaactggcgcgacaaaccgtcgggcgtgatggcacccccgtatcggttgatccaaagcgccttcgtgtctgcaccgcccaagagcctgacccgataggtggtcagatagacctccatggggccaacgaggacctttggcagcggaaaccaacggtctttcttgtccttcatgtcctcggcggaaaagtggacctcaaagccggtcccaacccgtcggacgtgccgatccgtggtcatggacaacagcgtgcggcggcgcacgggccgggaaatcagaaagccgaccatgagcgcctcgcggaaccggatcgctcgcttcatctcgctcgtatgacgggaggtctcgacctcctccagagccgcgaggcacttggcgagaacctcgccggccgagaggggcggagctgctggcaggcttttgcgatctgcccggtgcatcaggcgcctcgacactgtgttcagccaaccccaatcggtcgatggctgaagcgcccgtgtaacgacatagaggtcattgatcaggttcttgatcgttccgatctgaacccgcgcctcaagttcgtccatgaacccgcgcaccgcatctcgcgtgacgcgatctgcgggcggatgttcgagcagggcagggcggtgccgagcgagccaggaaagccactgtccataactctgacgccgcttgatgcgactgccctccgaccagctggcgcaaggccccgtgccgtcgaagatatccccttccgcgaagaggtcctcccaggcggatcgatccgcctgaggccagtcagagaaacggagaacgagcgggattgcgtcagacatcgatcttgcccctccatttggacagcacgaccttgtcgtaatggtcatgggcccactggttgctgagttccgcgtagaaatccatcgtggtctgcaggcgcttgtgcttcagcaaccggcgcacaacctcgaaattgcccgggcactcctccagatacatcttggccgcgacgtggcggaacaggtggggattgaccgaaaggcccgtctcccgttgaacgcgttgcgtgagttcgccaccaaaattgctggggcaacggggctttccatcgctcatgcggggaaagagggcgcgtccatccgcgcgcgaaacctgcgagcggaattgcatgatgtagcgatgcaggagtttggaactgcctgcgttcagacggacttcgatgggctcactgttcttgacctctaccccctcgatacggatcgtgtagagcgtgtgggtcccggagcgctgcgggagcaggtgcctgtccaggtcaagtccggccaggttcttgatccgcatcgggcaacctagcaagatagcgagcgccgcagcgtgcattgctgccagcgcgctgtcgcgggagagaggccgctcttgcgcgcgcgacatcaatgtactcggcaggcttatcaactgttcgaggttgtcccaactgttgaactgagcaaggcgtttcctgtttttggagctcatgccaaccgctgatcctgcgacccgcttttggatcgccttgagtgccttgatctgttcctcaggcgcgttcagatggtgccgcgcgatggcgatggcggttcccgcgatattgcccagccccgaagggatatcgtcgccgccacgcctcgccttcatcttgcgaaaggcagttttgagattgtctgccgtgatcacttcggcgagctgggtgaactctgacggctcatggcccacagagatcagcgcatccagaatctgtctgagatgcgctttgatattgcgcaggcttgtctcgcgcaggggtttgtcggggccgtcatcactgaagagatccctatgggagacgcggtcgagatagtcctggatctccttctggaggctcgccgggtagtccgagagggggcgtgccaagtagcgcgttgagggcgcgcgcttcaacaccggcagatcaagtccagacctccggatcacatggttccacgtgtcgatcatcgacttgacgtgcttgtccgggtccctggtcagcagggtggcgtcaagctccgcgcgaaacgcctcgacgacttccgtatttacgtcctctggctgaatggaccgggcgctgcaataccgcgcgaaacggtgcagcccccaaacttgatgggaggagtgcacgcttgccagaaatcgatcccagggcggggtcagaggctgggcggtctcgcgatcctgcaacacgcccgttgcccgcaacgccgcggccagatcggtcctcaacgtgctgagcgatttgggtttgaccccacagcggacgggatgcaacgtctcgagcaggcggcggagctgcggaatatctgtcggaatatccgatggggggcgatggagatatttggagacgcgcgatatcgctgactgcctggcgctttggcgcttctggtcaggatcaggatgggcctccagggcctcgagaatgtctgccagggatgtgggcagtttgaaagacctatggtgggtcatgatatacctctttgatcattgggtaggggacattgggggacgttcggggccatggcggccctcttgcggacattcgggaaaccaagggcttggttttgaagccgaagttgtcggatccgttctcccgacagcctgaaaaaccgccccagaagaggacgttagaggacatcggccagacccgtctttccgcgagcagcggcaagcgccctcaggtctgatctggcaatgcgccagtcgcgtcccagccgcgtggccgggagctgaccggacgcgatccagcgccggacggtcttcgggcagatccggaaaacctgcgcgacttccttgacgctcaggtacggggcgttgggcggaaacggccaatcagtcatggtccgccttccccgtgcaacgagttgcaaagtcattgcgtgccgcctctcgcgccagaaggcgcacaagagaaagcagcgcagagagatcaggggaggacagacggtcctcgggagcgacagtgcttgtcgtcatcgataagttcctcaattggaaccgctcgtgacaatgtcaggtggtgtaggcgcacgccttcactcaatgcacaggtgcaccgatctcttccgagattcggaccatcgtcatcgagtgctccctcgggcgtgcaaacgcccagagtgctccctgcggcccagcctcgcgggctggtgtcaggtcaaagtcttccgcatgccagcaaactcacgccagcacgcgcatcgaccttaatggccggaacctaaacctgcattaagcgaccgttcggaaaacgaggctccggctgctaagccgcgactggcctccctttttcgctgaaccggatttgctttgcaaatgaagggcattctgcgcgaaaaaagtttttctcagcgacctaaaacaagcatgcgaaggtatcagggttgacgtaagttcattacgccgtcggcagcggtggaccaacattcaactgcgcaaaaaagaaaacgcgccccgcaggacgcgttttaatgtggtgcttcttcgagcttgttaacggctcgaccgcgaattctgaacgtaaagacagtaactcggcccggaaacaatttcaagttgcgttacgcgcctccacttcgcattcttctcggcgattagggagataagcgatgcgcctgggccttgacataggaaccagctcaatcggctggtggctgtacgaaaccgacggcgccgggtcggatgcccgcataaccggtgtcgtggatgggggcgtgcgtatcttctccgacgggcgcgatccgaaatccggtgcatcgctggccgtggaccgtcgggccgcccgtgccatgcgccgccgccgcgaccggtatctgcgtcggcgcgccaccctgatgaaagtgcttgccgagacaggcctgatgcccgcggacccggccgaggcgaaggcgctggaagcccttgatcccttcgccctgcgggccgccgggctggacgaacccctgcccttgccccatctcggtcgcgcgctgtttcacctcaaccagcggcggggcttcaagtcgaaccgcaagaccgatcggggcgacaacgaaagcggcaagatcaaggacgcgaccgcgcggctcgacatggagatgatggccaacggcgcccgcacctatggcgagttcctgcacaagcgccggcagaaggcgaccgatccgcgccatgtgcccagcgtgcgcacccgcctgtcgattgccaatcgcggtgggccggatggcaaggaagaagccgggtatgatttctacccggaccggcggcacctggaggaggagtttcacaagctctgggccgcgcagggggcccatcacccggaactgaccgagaccctgcgcgatctgctgttcgaaaagatcttctttcagcggcccctgaaagaacccgaggtcgggctttgcctcttctccggccatcacggggttccgccgaaagacccccgcttgcccaaggcgcaccccctgacacagcgccgggtgctctacgagacagtcaaccagctacgtgtcacggcggacgggcgcgaggctcgtcccctgacgcgggaagagcgcgaccaggtcatccacgcgctcgacaacaagaagccgacgaaatcgctttcgtcgatggtcctgaaactgcccgcgctggcgaaggttctgaaactccgcgatggtgagcggttcaccctggaaaccggcgtgcgagacgccatcgcctgcgacccgttgcgcgccagccctgcccatccggaccgcttcggcccgcgctggtccatccttgatgccgatgcccaatgggaggtgatctcgcgcatccgccgagtgcagagcgatgccgaacatgccgccttggtggattggctgaccgaggcacacgggctcgaccgcgcgcatgctgaggcgacggcccatgcccccctgcccgatggctacggacggctgggcctgaccgcgacgacccgtatcctctaccagcttacggcggacgtggtgacctacgccgatgcggtcaaggcctgcggctggcaccattccgacgggcggaccggcgaatgcttcgaccgcctgccctattacggcgaagtgctcgaacgccacgtcattcccggcagctaccaccccgacgacgacgacatcacgcggttcggccggatcaccaatccgacggttcatattggcctgaaccagcttcgccgcctcgtgaacaggatcattgaaacccatggcaagccccatcaaatcgtcgtggagcttgcccgcgatctcaagaagtccgaagagcagaagcgcgccgacatcaagcgtatccgcgacacgaccgaggcggcgaagaagcggagcgaaaagctcgaagagctggagatcgaagacaatggccgcaaccggatgctcctgcggctgtgggaggatctgaaccccgacgatgcgatgcgccggttctgcccctacacgggcacgcgtatctcggccgccatgattttcgacggcagctgcgacgtggatcacatcctgccctattcgcgcacgctggacgacagtttccccaaccggacgctctgcctgcgcgaagccaaccggcagaagcgcaaccagaccccatggcaggcctggggcgataccccgcactggcacgccatcgccgccaacctgaagaacctgcccgagaacaagcgctggcgtttcgccccggatgctatgacgcggttcgagggcgaaaacgggttcctcgatcgggcgctaaaggacacgcaatacctcgcccggatctctcgcagctacctcgacacgctcttcaccaagggtgggcacgtctgggtggtgcctggtcggtttactgaaatgctccgtagacactggggcctgaactctctgcttagcgatgccgggcgcggcgcggtaaaggccaagaaccgaaccgaccaccgccatcacgccatcgatgccgccgtgatcgccgcaaccgaccctggcctgctcaaccggatcagccgcgctgcgggtcagggcgaggcagccggccagtccgcggaactgatcgcccgggacacacccccgccctgggaaggcttccgcgacgacctgcgcgtccggctcgatcggatcatcgtcagccaccgcgcggatcacgggcgcatcgaccacgcggcccgcaaacagggccgggacagcaccgcggggcaattgcaccaggagacagcctattccatcgtcgatgatatccacgttgccagccggaccgatcttctgagcttgaaacccgcgcagctgctggatgagccgggccgaagcggccaggtgcgcgacccgcagttgcgaaaggccttgcgcgtggcgactggcggcaagaccggcaaggatttcgagaacgccctgcgctacttcgcgtccaagcccggcccatatcaggccatccgccgggtgcgcatcatcaagccgctgcaagcgcaggcgcgcgttcccgtgcccgcgcaggacccgatcaaggcctaccagggcggcagcaaccacctgttcgagatctggcgacttccggacggagagatcgaagcacaggtcatcacgagtttcgaggcccataccctcgaaggcgagaagcgtcctcaccctgcggccaagcgtcttttgcgtgtgcacaagggggacatggtggctttggaacgggacggtcgacgggtcgtcggacatgtccaaaaaatggacattgcaaacggcttgtttattgtcccgcacaatgaggcgaacgccgatacacgcaacaacgacaaatcggacccgttcaaatggattcaaatcggcgcgcggcccgcgatcgcatccggaattcgccgcgtatccgtcgatgaaatcggccgccttcgcgacgggggaaccaggcccatataggccggagtcgcacgaatcgaaaaaacatgtcatgcttccaacggcttggagggatggccaatggaccagatcgtcgatatcgccacggatgggcggcatctctcgcgtgaccggggcttcctgaaggtcagcgagggcgcccgggaaatcggccgtatccccctggaccagatcgcgggcgtcatcgtgcacgcccatggcaccacctggaccacctcccttctgaccgagctggcggatcgcggggcgccggtcgtgctctgcggggccaaccacgcgccgcgctcggtcctcatgccgctcgacgggcaccatgcccagggcgcgcgcctgcgggcacagtggcaggccagggccccgctcgtgaaacaggcctggaagcagacggtaatcgcgaagatcgccatgcaggccgccgccttggaggccatgggcgaaccccatgcccccgtcggcatgctcgcgcgcaaggtgaccagcggcgatgccaccaatgtcgaggcgcaggccgcgcgtctctactggccccgaatgatgggcaccgagttccgccgcgaccgcaccgcccccgacctcaacgcgctcctgaactatggctacacggtgctgcgcgccgccaccgcccgtgcggtcgtggccgcagggctgcacccgaccatcggcctgcaccattcgaaccgcggcaacgcctttgccctggccgacgacctgatggagccgttccgcccgctcgtcgattgttgcgtgcgcggcctagccgcccgtaacggaccccaggtcgatcccgcggccaagcagtccctagcgcggctcatcgcgctggacctgcccctcggcgacagcctcaccccggtttccgtcgcgctcggcaagcttgccatctctctcggtcagagcttcgagtccggaacgctggatctcgccctgcctgcaccgcccgatgcgctgacccttgcaggcctcggcgcatgaccgacgcccccgcctttctctctggataccggatcatgtggatactcgtgatgttcgacctgcccaccgacaccaagtcccagcgcaaggccgccaccgcattccggaatttccttctggatgaagggttcgagcggagccagttctcggtctacgcccgcttcgtgaacggcaaggaggcgttccagacccgcgtgcgccggatcgaacgaaacctgcccgagaaaggcgacatccaggtcctgaacttcacggaccgccaataccgtgatatcgtccacttctcggatcagggccgaagggcggctcggaagaatccagagcagcttgcgcttttttgatgaattttttccagattgcctcacttgtcctcttccaaaaccactgttgtttcaggggcttggaaaaggaacaagtttagctgttcagaattcggggtccagccgcaaccgcgtccagacacgacattcggggggcaagagtttagctgttcagaattcggggtccagccgcaacaagcgtgtgggcgtcccgcccgtcagccacagtttagctgttcagaattcggggtccagccgcaacacatttaccactcggcgcgttgataccgttagtttagctgttcagaattcggggtccagccgcaacgtgtttggccatctcccgcagcttgttgtaagtttagctgttcagaattcggggtccagccgcaaccgcacaaaagctcgtagctgatctgaaagagtttagctgttcagaattcggggtccagccgcaactgaacccatccgcgcctgcactctgacatgagtttagctgttcagaattcggggtccagccgcaacgaaatcgcaacccggtgctacgcgcaaccgagtttagctgttcagaattcggggtccagccgcaaccgttggcgaaggctccacacatatcgaaaagtttagctgttcagaattcggggtccagccgcaacttgaacgttggcgcgtgtatcctcgtaccgagtttagctgttcagaattcggggtccagccgcaacctgacgaacatcgccctgactgacgtaagtagtttagctgttcagaattcggggtccagccgcaacctgcacgtcgcgcgctcacgccatgcctgcagtttagctgttcagaattcggggtccagccgcaacacatcgggcatccgcgcccacaaaggagtaagtttagctgttcagaattcggggtccagccgcaacggagttcgcgccctcctgctgaacggcgccagtttagctgttcagaattcggggtccagccgcaaaaaagccgccctcgcctgcgcgtgtgagcgcagtttagctgttcagaattcggggtccagccgcaacaccgccgcgttgcctttcgcggctgaatagagtttagctgttcagaattcggggtccagccgcaacacaaagaaagacggtaacgggaaagagcgagtttagctgttcagaattcggggtccagccgcaacgtggcggtgaatttcggcgggtttgccgagagtttagctgttcagaattcggggtccagccgcaaccgacaacgccgacgagagcggatacgcctgagtttagctgttcaaaattcggggtccagccgcaacccacatttgacacgggaacagcgccaacccagtttagctgttcagctatttcttccggaaatacgacaaactagccgagttcgacaacggtggttgcgccctcccgcaaccaaatttttactcgtttccaaacgcttatgcgccgccctccggggcggcgtttgcgtttccagccgccgtggaagcactgtggaagcaagaggggccgaagtccttcgtgcttccacatgagcagttgggctcagcgctcctcgatgaagacactgcattccttcgagtgagtgacctgagagccgcttcttcctccagtttgaggtagagtccgcccaaccaggagacggacaatgaagcgatcaaggttcacggaagagcagatcatcgggatgctgaaggagcaggaggccggaatgacgacggccgatgtctgccgcaagcacggggtcagcacggcaacgttttacaaatacaaggcgcggttcggcggcctcgaggtatcggacgcgcgccgactgagggcgctcgaggacgagaacgccaagctgaagaagctgctggccgaagcgatgctcgacaatgcgatactgaaggatgtcacttcgcgaaagtggtagcgcccggcgtcaggcgggaagcggtggcacacgttgtggaagtccacggagtgagccagcgacgggcgggcaaggcactggccgtggatcggtcgagcgtgcgctatcgcagcgtgcggcctgacgatgccgaagcgagggccgccatgaaggctgtcgcggccgagaggcggcggtttggctatcgccgcatccacgtgatgctggaacggcaggggatcatgatgaacctgaagaagctcaggcggctctatcgcgaggagaagctccaagtgcgccgccggggcggccgaaagcgggctctggggacacgctggccgatgctggtgccagatgcccccaaccagcactggagcctggacttcgtcagcgatgcgctgacggatggcagacagttccgcgttctggccgtggtcgacgactacagccgggagtgcctggccttggtggcggacacgtcgctctctggcctgcgcgtcgtgcgcgagctcgatgcgttgatgttgcgccgcggccagcctgcaatggtggtttcggacaatggaacggaactgacctcggtggctgtcctgagctggtgccagcgcacgggcatcgaatggcactacatcgcgccaggaaagcccatgcagaatggcttcgtcgaaagcttcaacggacgcttccgggacgagcttctcaacgagtcgctattctcgtctctggccgatgcccgcgagcagatccgggcatggcagcacgactacaaccaccatcgccctcactcaggactggggaacattccgcccgtcgagttcgtggcaaagaaggggctggaaatgcgcgccgcgtagcctcagagatcaacctgcggactctccgaaaatccggaggagagtcgggtctcaggtcaggagacatcaaattgtcgatgcccgcggtcacgtcccatctcagattgaccctcggcctgtcatcgacggtttgaatcgtcacaacgcggtcatggaaatggcggttgcgtgcagatcggtgatggagttcgggtgtaggcgcgctgtattgagcgtggcgagcgcggccatctcggcgacatccggatcaacggatgccgccagagcggcgaatgcctgcggcgctgcagcatatagatccggagcgaactgcagagggtggaggatcggcacccagtcgggtgccgcatggtcgggaggcggcaagcaggccgctcgcataactgctccatcgccaccacgaagttctcgcagccgacagccgagctcctgccagcgtggcaccaatgtgcgctccagcgttggccagcactctgctgcgtagcaatccgacaaccagcggctgagagcctcgaaccgacgctgaagctctccgtcctgcacgaatccttctgccgccgggttggcaatggcgacggcgaaactgtcgccgcgcgaattgcgcagcggtcgccaaccatcgcgtccttcgggtcggatcaagagccgggcgagacaggggccgtcatcaatccaatcggcatcgagggtcagttcgaggccgtgcgcgtcgttgtcgtttaactcggcatggaaccagtctggccgacgcgtcgccaccggccgatgccgtagggcggcttcggcgaaaacgactgcgcccgtttcgttctcgacctcgaccgccactgcatcgaccggatctccgaattttagctgcagtcggatcgcgttgcgagcgggcaggaggttgattgcctgcggcgccagtgccgcgaccagttcgaatagcaggacttccgatccgtttccgcgctgaagcaacacacgttcatcggaggcgggagccagaagatcccgcacagcaagactgcgtgtcagccccccatagaatggccgttcttcgcgtcttccacgaatgatcagctgtgccttctggtcagggcatcggatgctgatcgtatcgaagcggtcgtcttcaccaaccgagagccgcgtgccatgcggaagctgggcgacacttccctcagcacggcgccttgatacggtgacatcgggccaaggcagatcgaaaggaacatgtacgccttcgatctcgaatacgacccgtgcgacgctgtatccgccgccgggctcaaggcatagacgcccctggtcatcacgaccgacgtggaggcattcatcctggactaggttgcggacttggcgttcgctatggaacacgatgccgtctgagccgctgaagccaggccacacccatgcggcaagcgcgatcccggacgcatgagaggcggcaccatcggcgcttggcgccatcagttccatccggagccgcacagggtctgctgcctcagcctccgcaaagccagcgagcacctcttccatccgacatcaccaaaaccgtcatctgaaatcggtaccccgatgaggcgcgactgcaagccgagagtgaaccgtaccgctcgtgtctcggagcgacccaatccagtttcgatccgaaggcgtgcagaacgcccatgaagtgcgccccgtggtccgcttgcgatttcgtctcctgccaagcaaaggcgtcttctcggacgggccgtgagacccgtttgcaggccgtcaagttcgagcactaaggggcgcggcccgagtactgcgaagccgacgaaactatcggcttccggttcaagagcgggttcgcctgctatcgagaatggcgtccgcgcgaggagaacgatgtccgttgagtctagttcgatatcgaccgaaccccgtgggatctcgcgcagatagtgaccggtgatcctgtcgaacgcggcacatcccccttgagcgaggagctcgagttccccggtctggccagagacttcccaacggagctcgcggggccagggctgaggtagtgtccagtcctcacctccgcgcaaacggcgcggtcgttgcgcgccatcgagccagaggcgaattcgcccctcgcttcgaggcaatctcaatacaagcccaccagattgccaatggagccgcggcctcggtgccagcgcctcgcttcctcctctgctcaatgttggccgtgtttctttcagtctttggtcaaagacttccttgaaagatctctcgaactcgattgcggggacgaaggcctccgggtcttggcgtatccgtgcaaacagggctgcatgccacgcagtctcgtcccagaggatcgcacggcgaagcacgttgaccgcaggagggagaaaatacagtgcatcgtcttcccagcggttgagcagaacggtcgtttcgacagggggcgggccaaaagctgcttcctgtctcagaaacgcgtcgatcaggtgtggaagctgcgcttggcttacgccggcatgaagaaggtagacgtcgacatcgcgatctaagcctcgggtaggtaacccgaaccggtcgcaaaccgcacagaatgagcggaacagcaccttgcgatgcggctggaaatctagcggaacttggagaacgtcagcgatgtgtgggtataccgcattgccggcgtctccatatccttcgcttagcgaatgggtgacaagccatgccgcgaggcttggaaatccgcggaacaacgcttgcagcctgtcgggccgaccgcccaagaactgtcgcgtgcgctcaacggctcgctcttgcgctgtctcatctagcggaatgagcccaatgaagggcggcgccccagcttcttggcgacatctgctgatcaagaagtccgcggtcctgcaacccacagcacacctttccctcttccctgcccgctggtcgcgagtccggttcactgttgatccccttgtggataaggagtaacaactcgcaaatccgcgaacaagcggattgacagggagatgaagcgatgaaccggccatgtccgccgacggtgtgaccttcggtcaggcgatttcgaaggcccgcaaggcactcggtctcagccagaaggagctcgcagcgcgcgtgatgaaggaagagggcggcgggtcgatatccccgcagtacctcaacgacatcgagcacgatcggcgcagccccagctcggggcacctgatccgccagttttccggcatcctgaacattccggaggactacttgtacgcactcgcaggccggctgccggatgatctgcgaccggatgcgtcaaccccggacaaggtcgtcgaggccttcgccaatttcaggaagacgttgaaagagtaaggaggttcgcatggtgaagatgatccgtgacaacacgggccgctttgccgagcgacccttctaccgcgagcgggatctcgacgatgaatgcgagcggctgatccgtgagcttttgatgaagcgccacggaaaggtcgactatcccgtggagaccgacgacctgaccgtgctgatcgagatgcacgacgcgggcctcgacccgtacgccgacctgttcgcctacggcgcagatgtcgaaggggtgaccgagttcttccccgaccgggggcccaaggtctccatctcggaacgcatcgccgccgacgagcggcgcgagaatcgcttccgcaccacgctcacccatgagttcgggcacgtgaagtttcacgggcctctctgggcgcagaaatttgccaacggcgacctgctcgagcgcggcgtgaacgccaaaaaggcgctctccaagcgcgaaaatatcctggacgccccgcagtcggactggatggaatggcaggccggctatatcagcggcgcgctgctgatgccggccacgccggtccgtcgcctcatgtccgactactgcagcccgcgcgagctgcatagcgatatccatgtttcgacggagcatgctgcgcggctgatccagatggtcatggagcgtttcgcggtttccgaagaggccgctcgcatcaggctgctgaagctgaacctgatcacttcggcacgcggacagccctcgctcttcggcccctgatcgcgaatccgcggaagtgcgtattttttcgattgtctcctctctgaagcgatatacgctgattagcagatcagccgatacagggaaacgccagaaaagagatcatggcgactgcactgtccgccttccttcgcaagacgcccggcgaggcgctgcgcgaatacttcgaccggccggagatcggcctgcccaccgagttcgactggcccgcatcggacgccgaactctccgggccgcttctcggcgccatcgagaagatgtcccgcgtccagcgcgaccggatctcgaacgacgccgagcgcgtccatgccctgtccgacgagccggggcaggccgcgatctacagcgtggccgaggatcctgccctcctcggcgggctcgcgaacccgcacgcgcggtcgctctggattttcctgaacgcgcaggaccgctttagtcacgctgaggaagttcgcttcacggaggaccgccggcgcggtcggatgtgggccggctacattaccgagccgggtagcgtcgtacagcgcaacgcgttggcccgctacgccttcgtctccgcgaacaaggagttctcgggcgccgcccatgcccatgtcgacaacttcgaccgggtgaggacgacccatgctctacaaggtcaacgcgcgcacgtcggcgcggatggccgttcagttcgcggacagggaacagtatctcgtgccagagggttgcgcctagcgcgtcttcaagttccaagacttcatcactagccgggcccaggttgatctgttcgccgccaacgcgtcaagtgacaagacgacccgatagaaccggctttgacagaccgagatcacgctcctcaagcttgggggcatggcaacgaatacccatctgcccgcggtcacacctcgctccttgggccgaaatctaggctgagttaccgggccctcccaccggcgaaaaccagtggagcgatatctgcggtgggagcgccgcaggtgaagcaggttcgacgccccgcgcaggtcgctggcgtccatgagggagcagggggtgggaggatttctgcccttggccactgcgcagagccgttttcgcgaagctcacaggtcaaggacagggcccggaaactccgcctgtatcccgtttcgtagcaggcgggcgcgggccgtggcatcctcgggcaagagatacccgcgcgcggcggcgaaccggcccgtgtagcggccgaagtagagcgcgcgccggtcgccgattgccgccgcgcgcacatctgtcgcgaagttatggcccagtcccgcgatccgcagacccggcgcgctcggggcgggctccagatagccttcaaccgacaggaggcgcaggttggacagacgtgcgaaccgccccgaatgaacccgttcggccaggaaacgctcggtgttcgcgcgcccgaaggcggtggcataagcgccggaagccgggggggtcgcagcggaggaaatcgggagaccgccgatcgtgccggtgccgtcggggctgcgccccactgtccctgcgatcaggtcctgcgtgccggtgggggcggggtcgatccggctggggcggaggccttgggccgtccatagcccgctgactgcgacccgggttccgggcgcgccatcaccccgggccgcgaccggatccatcaggggcacgccattgaccgacagccgcccggcgtcctcgcgcaacacccccacgagggcgaaatcgaccgacacctcgcgggcgaggatgccactagcgtcccgcatcgcggcaatggtcagcacatggcccggcgcgaggatctcgccggtggtgatcccgtagggcgtccggtagcgcgtgcgcccgtcgcgccgcactcgcagcccgttgatccgcaggctgcc

SEQ ID NO: 3674 - DNA, 23237 bp, synthetic construct
  source 1..23237: mol_type = other DNA
  misc_feature 1..23237: note = Synthetic
cgcgagacatagggcttcgtttcactggtacgttgatagatcgttttgggaccggctacgttttcgaccgggtgcaagccgattgtcttggtcacgacaccgcccagccagcctcgaaggccttcagaatcttcgccttgctttccgtcggcggtgcggatgccaagacgaaaggattcacgaactcaagaccagtgaagttggtggcaagctgatatgtcacggcaccctccaagtttctgacagacagcaccgccaatttttatcaaacagtcaataattttttcgacacccgcgacatgcgcatgtgcgacagggcgtcccgtggcccgtgccgatcaaaacatgggcagagcgcgcttgtcagcctctgtcgaaagcggtggttgcgatgttctgaaccgtgaggccttcgcagacaccgctgtctcgagcgtccgcttctgcgaacacgtttgcgccacactgaagcggtcaaagcgcttgccgctcgcagagcctcacgccgacttatccaagaatggaataaaccactccttcggaagataatgtggcgccctcgatccctgagggctcgatgctgacgcatccgcggccttgaccgccaaacccgcgatgaacgcctatttcttgcggactggaccagatacgtggagctatgacgatgcctccgcaaccttcactgcgacaattggcggaccggtggaccatgtcgtgctcgacccggcgtggattgcgcgtctagcccggttttcatcgcctccaacttgacctatcttgccgtaacttagaaccagggaccaacaggcgggtaacagcaatgtcgcgcgagggcgtgtttcttcttgtcatgtccgcgctgccgtttctcggtgcgctgatccccgggctgatgatccgtgcagggcggacggcctgcgccgccttcgcggcggtgccgacggcgcttgcactgacaatgctgctgattctggcaccttcggtcatgcagggagaggtgatccgggtcgagcttgactggcttccgcagctgggactttcggtgtcgttctttctcgacggcctggggcttctcttcgccggcatgatcctcggcgttgggctcctggtgacgctctacgcgcggttctacctgtcgagcaacgacccgatgggtcagttctacacctacctgttgctgttccaaggcgcgatgctgggcatcgtgctgtccgacaacatcctgcttctgctgattttctgggagctgacctcgctgtcgtccttcctactgatcggctactggaagcacctgcctgagggccgtcagggcgcacgcatggcgctggcggtcaccggcggaggcggattggcgatgatcgggggtatgctcatcctcggcaatatcgcaggcagctacaacctgaccgatatcctgagtcagggtgatgcgatccgggcgtccgagtggtaccttcccgctctgatcctgatcctgcttggcgcgttcaccaagtcggcgcagttcccgttccacttctggcttccccatgcgatggcggcgccgactccggtctcggcctacctgcattcggcgacgatggtgaaggcgggcgtgttcttgctggcgaggatgtggccggtcctggcaggcaccgaggcctggttctacctcgtggcgaccaccggactgatcacgatggtgcttggcgcgctgatcgcgctgttcaagaatgatcttaaggcgctgctggcctattcgacggtcagtcacctagggctgctgacaatgctcctggggttcggaaccaagcttgcggctatcgtcgcggtgttccacatcatcaaccacctaaccttcaaggccgcgctcttcatgaccgccggcatcgtcgatcatggggtgcacagccgtgacatcaagcggctgggcgggctcaggcatctgatgcctatcaccttcgtcatcggaaccgtcgcggcgctatcgatggccggcattccgctattcaacggctttctgtccaaggagatgatgctcgaagaggcaagtcataccggctgggcgggcagtgcctgggtggtgccagcactggcaaccctcggcgcggcgctgtcggtggcctattctttccgcttcatcttgcatgtcttcttcggcccggtccgcgacgactacccggcggagccgcacgacccatctttcggcctctgggccgcgccggccctgcttgtggtcggggtcgtcgtgatcggtctcgttccggcactggtcgtgggtccgctggtcgccgttgcggggggcgcagtgatcggcggcggcgagcttccatactattcgctgagaatctggcacgggttcacgccggcgctcttcatgtcggctgccgcggtcctcggcggtctcgccttgctgtggcgacacgcaccgcttgacagggcctggatcgcggcaccgcgcccggaggccaaggtgatattcgaccggctgatcgcagccgccgtctcgcttgcacgccggatcacggacgggacccatgacggtgccatgagccgctatctggcgatcttcgtggtggctacggtcgcgctcggtgcggtcgcctggagcggcggcggcacccccccgccgacccgcgggctgcagccggtcccgctggtagtcgctatgggctgggcgctgctgctgctgggcgcggtctcggtcgtggtgacgcatcggtcacggtttctggcgctggtgctgatctcgatcatcggcctgatgatctcggccggattcgtctacctctcggcacctgacctggccctgacgcagatctcggtcgagaccgtgacgatcatcctgctgctgctggcgctgcatttcctgcccaagaataccccgatcgaaagcagttggttgcgccgggtccgcgacggcgtgatagccctcgccgcgggcggcggcgtcggcgcgctggcctatgccttcatgctcagggatgtcgacacgatctcgggctaccatctagccaattcctacgagggcggcggcggaaccaatgtcgtcaacgtcatcctcgtcgatttccgcggctacgacacctatggcgagatcatcgtcctggcgatcgccggccttgtcatctatgctgggatcgaggccctgcttagcggtcacgcggcggcccggatccggaacaccgactatgcgcaggaccgatcccgggaccgtcacccgctgatgatggtcgtcgccacccgcgtgatgatgccgatcgcgatcatggtcggggtctacatcttcctgcgcggccacaaccagcccggcggcggtttcgtggccgggctggtggtctcgatcgccctgctgatgcaatacatggcctcggggttcgcctggacgcaatcgcgccagaggatcgcgtaccacaccatgataggctggggcgtcgtcatcgcggggctgaccggcgcaggggcctggcttgcgggaaggcccttcttgaccagcgcctatggctatgtccacctgccgccgatcgaggagttcgagctggcaaccgcgatggcattcgaccttggcgtgtttcttgccgtgctgggggccgtcatgctgatgctctacagcctgtcgcgaatcgcgcgccactctggcgaaaccccgaatgccaaacctatggactttgatccgaccgaacgtaagacagacccgaaggagggcgtgtgagatggagatcgtggtcgcaagctcggtggcggtgctgacggcagggggcgtctacctgatcctgcgtctgcgcaccttccccgttatcctgggacttgccctcctgtcatacgcagtgaacatcttcctgttcgcatcgggacggttggcaaccggcctgccacctgtcctgttgaggtacggtgacgccagctacaccgatcccctgccgcaggcgctggtcctgaccgcaatcgtcatctcgttcgggatgacggcagtgctggtcattgtcgcgcttggcgcattcctggaatccggcaccgaccggatcgacatcgccccgcccaagggcgatgccgatccccgggagagccacagatgaaccactggattatcgcgccagtgatcctgccggcgctgctggcgccgctgatcgccttcataatgcgccacgatctgacgctcgcacgcactacgtcgctggcaggggcagtgggaatcgtcgccatagcggtcgggctcacagtggcctcggccgacggcgaaacacaggtctactaccttggcaactggccggcgcccttcggcatcgttctggtgctcgaccggctctcggctctgatggtggtgctgacgagcgttctcgccttgatagtgctagttcacgccgtcgtcaccggctgggacgcccgcggtcgtcatttccatgccctgttccagttccagatcatgggcatctgcggtgcgttcctgaccggagacatcttcaaccttttcgttttcttcgaggtgctcttgatcgcctcctacggcctgatgatccacggcggcgggcgcgaacgcatgcaggcgggcgtgcaatacatcgtcatgaaccttgccggatccaccctgttcctgttcgcactgggcgtcctctacgccagcaccggaacgctgaacatcgccgatctcgcgctcaggctgcgcgagatcccgatcgaggacgcctcgctggtccgggtcgcagcgatgctgctgatgatcgtcttcgcgctcaaggcggcgctgttcccgctgcagttctggctgccgggcacctatgccaacgcgcccgcgccggtggccgctttgttcgccatcatgaccaaggtcggggcctatgcgatcatccgggtgcacaccctggccttcgggccggatatcgcggcgacaggaccgcttgccgcgacatggctgttcccgggcgccatcgtcaccatcgtgatcggggcatttggagttctgggcgcgcgcgcgctgctgccacttatcgccttctcggtcctggggtcgatgggaaccttgatggtcgccgttgcaagcttcacccccgaggcgaccctggccgccctgtattaccttgtccattcgaccttcgcaggcgccgcgctgttcctcgttgccgacctgctgctgtcgcgccgcaaggaccagacgctgatcccgctgccggccaccgtgcagaacgggctcttcgccgggctcttcttcgctgctgcaatcggtatggcgggcatgcccccgctcagcggcttccttggaaaattgctgatcctcgacgcgctgcgcgatcccggccagatgccctgggcctggggtgcggtgcttggcggctcgctggtcacaatcgtcggctttgcccgcgccggcagcgcgctgttctggaaatcgaccagcatcccggtcgcggacccgacaggatctgatcgcgggccagccacgcccgttcgggccgcttcggcgctcgaaatcgcgccgaccctgaccgcgctggctgtgctcgcagggctgtcggtcttcgccgggccggtggcttcatatctcactcaggcgtccgagcaggtttttgaccgcgacggctatatcggggccgtgcttggaaccgcggcggaggaccagccatgatcgcacgtcttgttccccacccgatcctcagcgccaccctgaccctggtctggctcggcctcgtcaacaaggtcacgctgggcaaccttctgctcggcggcgtgcttggacttgccattccgatgctgacggcagcctactggccaaaccggcccaagctgcgcaaccccctggtcgccgctaggtatatcgggatagtcctgtgggatatcgtcatcgctaacgtccaggtcgctatgatcatcctgttcaagagacgggatgagatccactcgcaatggatcgtcatcccgcttgatctgacatcgcccgaggctatcacctggctcgctggcacgatcaccctgacacccgggaccgtttccgcgacactgtcggccgatgcgagcagtatcctggtgcactgcctgcataccgatgatccgggcgacgtgcgggatacgatcaaggcccgctacgaagccccgctgaaggagatattcccatgatcgccgctgccctctggttcgccttcgcctgcttcgggcttggcctgctgatgaacgcctggcggatggtggcgggccccaatgctgccgaccggatcctcgcgctcgacaccatggtgatcaacgtcatcgcgctgttcatggtctacggcatcctccgcagcaccacgatctactatgaggctgcaatgctggtcgccatggttggcttcgtctcgacggtcgcctactgccgcttcgtgctgcgcggcgacatcatcgaataggtaccgtaatgactgtcatcgccgagatccttgtgtccttctttcttgtcgtcggcggcgtcttcgggctcgtgggctcgtttgggctactcaagctgcgcacgacaatgcaacgcctgcattctcccaccaaggcgacgacactcggggtgggcggtgtgctgttggcttcgatgctctattttcttctggtcggcggcacgctctcgttccacgaactcctgatcacgctcttccttttcctgacggcaccgatcacagcgcatttcatagccaagacctacatggccagcaacctaagaccaaccgacctgccggagacagggcgggaccttggctgggccatctacgatgacgcgccggagtcggagacagacgacagggcctgaaccgacggaacggaccataatctggagacgggccaggccagatttagatcgggcatggttcttgaagcagcaagaatcgttggccgtcgctgtgatcttgatctgatccccgcaacctgggccgtttgaatctggagttttccgctacgctttcctggctgggagaggagcggaatcggatgaaggcgagcaaatttttggacgcgcagaaggcgttcattatcaagcagggcgaagaaggcacgccggttgcggagatctgttgcaaggccgggatcagccaggcgacctacttcaattggaagaagaagtatgccggtctgctgccgaccgagatgaagcggctaaagcagctcgaagacgagaatagtcggctgaagaagatcgtggctgacctgacgctggatcgggagatgttgcaggacgtgatccggcgacagatctgaagcctggtcggatgcgcgaactggttcgcgggatgtgcagcgattgggcggtttcggtccggacggcttgtggggccatcgggttcgaccgctcaacgttccactaccaatcccgcggcaccgatcaggctgctgtcgccaagcggatcaaggagatctgcgaaacgcgggtcaagtatggttaccgccgcgttcatgtcctgctggatcgtgagggatggggcatcaacgtcaagaaagtctaccgcatatacagggcgttgggaatgcagctcaggcacaagacgccaaagcgacgggtgaaggcgaagctgcgtgatgaccgcgcggaagccgtcggtcccaacgatgtctgggcgatgaccagttggccacgggcaagaagttgcgggttttgaccgtggtcgacactttctcgcgctacgttccggtgcttgacatgcgctacagctaccgcggcgaagatgtcgtggcgacgctcgaccaggtgttccgcacgactggctatccaaagacgatccgcgtcgatcaaggcaccgagttcgtctcgcgcgacatggacctttgggcgtatcagcgcggcgttgttctcgacttttcacgcccgggcaagccgaccgacaacgccttcatcgaagcgttcaatggcaggttccgggccgaatgcctgaaccagcactggttcctgacgcttgcggatgcagcggaaaagttggaggcttgtgacgttgcccccgacttttatccagcgtgagcgagactccgggtttgagttttgcctgtttgggcgggttgggcaacgggggctggcgcggagctttgcgggttgcgcagcgtcaggccccgttgcggggtgaaggtttgggcgaactcggcaggcgtctgccagccgaggcgagagtgcgggcgttcgatgttgtaatcctttcgccaggccgtgagcgtggcgcgggcgtggttcagggacgcaaacagcgtctcgttcagaagctcgtcgcgcagacggccattgaagctttcgatgaaggcgttctgggtcggcttgccgggtgcgatgtagtgccagtcgatcttgcggtcgtcggcgaaggtcaggatcgcgttcgaggtgaactcggtcccgttatcgctgacgaccgtcatcggcttgccgcgggcctcgaacagggtcgccagctctcgtgcaacccttgcgccggacagagacgtgtcggcgatcaaggcgaggcattcccgcgtgcaatcgtcgaccacggtcatgatccggaagcggcggccatcggtcagctgatccgatacgaagtcgagcgaccagcgctggttcggcatcagcggtaacgccatcggtgcccgcgtgccgatggcccgcttgcgtccaccgcgacggcgcacgtgcagccgctcctcgcggtagatccagaacaggcgcttgtggttcacctcatgcccctcgcggcgcaggaacacatgcagccgccggtagccgaaccggcgacggacacgggccagttccttcagccgctcgcgcagcacgggatcatcctgccggatcgcctcatagcgcatggtcatccggcaacagccgatcacccggcacgcccgccgctcgctcatcccgtggcccgcgaccagatgcgcgaccgcttgccgctttccggcgggcgtcaccacttttttcccaagagatccttcagcgccgcattgtcgagcatcgcatcggctagcagccgcttcagacgggcgttctcgtcctcaagacccttcaggcgcttcgcctcactgacatccatgccaccatacttggccttccacttgtagacagtcgcatcgctgacgccgtgcttgcgacatagatcggcgacggaaaccccggcctcgtgctccttcagaatgccgatgatctggtcttcggtaaacctgctgcgcttcacctctggtcctctcggttgggccagagtctacctcaaactggattaggcggagggggcaacgtcagtgacacttggctcttcgaaatgcccgacatgcccatcgccttcaccaggtcgtcaacggagcgcgtcgagatgccttgaacataggcctcctgaatgaccgccgtcagcgccttctcggccatccgccggggttcgaggaaaccgggaaagtagctgcccttccgcagcttcgggatacgcaactcgaccggcccggcccgggtctcccagtcccggtcgcgatacccgttccgctgcgccagccgcgccggatccttctcgccataggcagcgcccgtcgcggtgccgacctccagctccatcagccgttcggcggcaaagccgatcatctcgcgcagaagatcagcgtcaggggtcttctcgacgaagtcacgcaggttcatcatgtcggtggtcatcggtggaatctccggtccaggttggtgtcagcaaccagaccctaccggaacatcgccggtgaccacctcacccagaacctacaccacgctcagggacagcatccctgtgccttattagccggggatcgtgcaaaaccaactgcatggcccacatgctacgggcttatgcatctgcaaaaatggaagcacgggccgtagcccgtgcttcaatatggtgctctgtcgagcttgttagccgctcgaccgcgatttctgatgccccaccacatcgcatcgcatctaccgagtcaagtcgcttcatttgatacgctccggcggcaaattgaccggaaagtgggggcgtcaatccgcgttgacagcgaagtgtctcgcgccgattgtcctcaaagcaatttctaataggttgtagttattatcatgcatacccgcctcgccctggacattggcacgacctcgatcggctggattctgtatgagttggtcaacggccaacccgccagcatcttggacgggggcactcggatcttcagtgacgggcgcgaggcgaaaaccgggcactctctggcggtcggccggcgcacggcgcgggggatgcggcggcggcgggacagatatttgcgacgacgggccgcactgatgaagcgccttgctgcaattgggctgatgcccgagagtcccgaggcggcagcgcagctggcgacgctcgatccctatgagttgcgcgcgcgcggtctcgatcacccgttgccgcccgagcacctaggccgggcgctgtttcacctgaaccagcggcgtggcttcaagtcgaaccgccgcacggacaagggcaacaatgagggcgggatgatcgccgatgcctcggcccggctggagcaggcgatgatggcggcaggcgcgcggagctatggcgagtttctgcataaacgccgcgcagaggcaaccgccccccgcgccaccccagcggtgcgcacccggatcaacccgcatctgaccggcgaggatggcaaggagcagccgggctatgacttctaccccgaccgcaagcatctggaggacgagttccacaggctgtgggaggcacaggcgcgccacaaccccgatctgacaccggccatgggggatctgctgttccagacgatcttccatcagcgaccgctgaaggctccggccgtggggcgttgcctgtttctggacgagccgcgcctgcccaaggcgcatccgctgacgcaacagcgcacgctctatgaaacggtcaacatgctgcgcattgcgccccccggccaacccaaacggcgcctgagccgcgttcagcgagaccagatcgtccacgcgctgaacaaccgcaagatcctcgcatcgccgggtaagaacgtgctgacgctggccgctatcggcaagctgctgaagctgcgccccggcgaggccttttcgctggacaccgcgaaccgcgatgccatcgcctgcgatccggttcggatgagtctggcttacgaagggcgctttggtccgcaatggtcggccctgagcgtcgagagccaatgggagctgatccagcgcctgcgcgacgaccaggatggtgcggcactggtcgattggatcatggatcgctacggctttgaccgggatagggcccgcgcaatcgccgatgcgcccttgcccgaaggctttggtcgccttggcgaaaccgcgacccgggctgtgctggcggtgctgatcggcggcacgacagagcaggaggtgctgacctatagcgaggccgttgctgcctgcggttgggatcattcgcgccttggcaccggcgaggtgctggaccgcctgccctattacggccaagtgctggaccgacacgtcctgcctggcactggtcgacccgaggatgacgagatcacccgttttggccgcatcaccaaccccacggtgcatatcggtctgggacaggtgaagcggctggtgaacaaggtgatcgatgcctggggacgaccgcatgagatggtggtggagttggcccgcgacctgaagatgagcgaggatcagaagcgcaatctggcgaaagtgaacgcgcagaaccagcgggcggcggagatgcgcagcgccaagctgatcggggatctgaagatcgaggataatggccgcaaccgtggcatcttgcgagtgtgggaggaaagtgcagcggatgtgctccaccgttgctgcccctacaccggagcgcagatcagcgcatccatgctttttgacggcagctgcgatattgaccacatcctcccctattcgcgcacgctggatgacggcttcaacaaccgcgtgatctgcctgaaatccgccaatcgagagaagcgcaacctgacaccgtgggaggcatggggcaatacgccgaaatgggccgccattgaggccaatctgaagaacctgccccccgccaaggcctggcgtttcgcgcccgatgctatgctgcgctacgagggagagcgagatttcaccgcccgcgcgctggtcgacacgcaatatctgtcgcggctggcgcgggaatatctggaatgcctctatgccgaagatattgatcccggcccgcattcagggaaaaagccgcgccgcccgatctgggttgtgacaggcaagctgaccgagcttctgaggcgacattggggcctcaacagcctgttgccagatgcacataggggcactgcaaaagccaagaaccggctcgatcaccgtcatcacatgattgacgccgcagttgtcggcgccaccgatcatgccactgtccagcgcattgccaacatggccaagggcaatgtcgagaacgggttggaagatctggccggcaccattctcccaccttggcccggcctgcgcgatgacctcaaggcgcggctggagcgaaccattgtcagccatcgcggcaatcatggcgccattgaccccgccgcgcgcaaacagggccgcgatactacctcgggacagttgcacaacgataccgcctatgggctgacgggcgagacgctgaaaggggtgccgctggtcgtcaaccgcaagcccatcgacatgctgactcctgcaatgatcgacaagatccgcgatccgcatctgtcgcgctggctgaccgccgtgaccaaaggcaaagaggggaaggatttcaaggccgccgtcgaggccttccgcgcgcaccccggcccctatcgcggtatccgccgggtccggctgatcgagccggtggaggtgatccgcatcaaggaccgcaacgggcgcccttacaagggctacaagggcgacagcaaccagtgttacgaggtctggtgcctgccggacaggacgctgacccatcatgtcgtctccacattcgcggcgcatcaggggcagacaggcaaaccccatccggccgccaaacggctcgcacggctctataaaggtgacatggtcagactggacagaagcaagtttggctccgtgattgcgactgtagaaaagtttgatcggaatgggcagctggaactggtgccgcacaatgaaggcaatgccgatcagcgttaccgcaaggacaaatccgacagcgtcttcatccgactgcgagccgccacgttcatcgcttctggtgcccggcgagtgatcgtggatgaaatgggtcggatccgcgaccctggccccggcaaacactgaatccctttggatcgaatcatccggcgcattaacaattgctgattattgtgccggattaccccattggatcagattatcgatatcagccaggacggccgccatctgtcgcgcgaccggggctttctcaaggttgaagccgagggctcggtcctgggccgcatcccgcttgatcagattgccgcggttatcgtccattcgcatggcgtgacctggaccaactctctgctggttgaactggcggatcgtggtgcgccggtggtcctttgcgcagccaaccaccagccgcgggcgatcttgtgttcgcttcaaggccatcaccagcaaaacgcccggatgcgcgcgcagtgggatgcgccacagccgctgatcaagcaggcgtggaagcaagtggtcacctccaagatccgcatgcaggctgccgcccttgccgccattggacagccgcccgccccacttgagcaaatcgcccgaggcgttcaatcgggagatagcggcaatgccgaagcacaagcggcgcggatctactggccgatgatgatggggaaagccttccgccgcgacgcggacctgcctgatatcaacgctctactgaattacggctataccgtgctgcgtgccgccaccgcccgcgcggtggccgccgctggcctccacccgactatcggactgttccattccaaccgctccaacgcgttcgccttggccgatgacctgatggagccgttccgcccactcgtcgatctgaccgcccgcgccatagcggccagggctggccccgaagtcacccccgaggccaagcgccgcatggccgacctgatcgcgctcgacctgccgctgaccggcgagaccagcccggtttcagtcgccctctcgcgcctcgtgacctcgctggcgctaagcttcgaggcccggcgcctgtcgctggccctgcctgaaccgcccgccccgctcacccttgcaggcctcgggtcatgagcggcccggccacctttctcagcggatatcgtctgatgtggatccttgtcatgttcgacctgccgaccgacagcaaaccgcagcgcaaagccgcaggcgatttccgcaatttcctgctggatgaggggttcgagcgcagccagttctcgatctatgcccgcttcatcaacggtaaagaggctttcgagacccgcatccgtcgcatcgaacgtgccctgcccgcccatggcgatgtgcaaatcttgtccatgacggatcgccaatatcgcgacatcgtccatttctcggatcaaggccgcagatctgtgcgacaaaatccgtcacaactggtgctgttctgatgcgattcgacgattttcaccacactcaccccgccgcttttccgtgccattgcaaggccttgcggcgggacgaagtgtagccattcagaaatcgcggtccagcggcaactacgcccggctggcgctggtcaaggaatacagtgtagccattcagaaatcgcggtccagcggcaacagggtcagcacggtcttgatgtaccgcttgagtgtagccattcagaaatcgcggtccagcggcaactccacgacagttgcgatggcgccgaacttagtgtagccattcagaaatcgcggtccagcggcaacaacagccggatggggccggcggatcatgccagtgtagccattcagaaatcgcggtccagcggcaacgttctgcggtggcgaggcttggctgaacgaagtgtagccattcagaaatcgcggtccagcggcaactatccgacccgcccttggtcagcccgaacgagtgtagccattcagaaatcgcggtccagcggcaacgggttgctgtgccagcgatgcacgaagccaagtgtagccattcagaaatcgcggtccagcggcaactcctattttgaggcgacgatcacggacggcagtgtagccattcagaaatcgcggtccagcggcaacaccgcagagagggctaagcgatgagcgaggagtgtagccattcagaaatcgcggtccagcggcaaccgttgggcatcccgcctgaccctgaccgtgagtgtagccattcagaaatcgcggtccagcggcaactccagcgtgccttggacgccgctggccggtagtgtagccattcagaaatcgcggtccagcggcaacacctcgcgcgcgtcttcgccggatgtctcgagtgtagccattcagaaatcgcggtccagcggcaactcctcgaactgagcgatgccgacgccgttcagtgtagccattcagaaatcgcggtccagcggcaacttgtagcgggggattgcgtcttccagcggtagtgtagccattcagaaatcgcggtccagcggcaacttgtcgggcgcggagagacggaagacgtctagtgtagccattcagaaatcgcggtccagcggcaactcccgcgtgtagcggccgccagcgcctggcagtgtagccattcagaaatcgcggtccagcggcaacttgacgatccggcgcgcgctaatgttctgcagtgtagccattcagaaatcgcggtccagcggcaacaagccagaccaacgggcgaaagaactccaagtgtagccattcagaaatcgcggtccagcggcaactttgtagggcatcacgttcgggccgagcttagtgtagccattcagaaatcgcggtccagcggcaacgcgctgcgtccgcgcttatcttctgcggcagtgtagccattcagaaatcgcggtccagcggcaactccatgagcttggtgaagttggcttgcttgagtgtagccattcagaaatcgcggtccagcggcaacagatgacgtgagggcgacatggcagacatgagtgtagccattcagaaatcgcggtccagcggcaacagcgcctcgccagcggtgtattccgcgatgagtgtagccattcagaaatcgcggtccagcggcaacttgtccggcgcggagatcctgaacacgttaagtgtagccattcagaaatcgcggtccagcggcaaccggacgcggcgaccgatggaagtttgacttagtgtagccattcagaaatcgcggtccagcggcaacaatggctcggatgctgcggttgaatcgttcaagtgtagccattcagaaatcgcggtccagcggcaactcaccagcccccatgcgttatggatcatcagtgtagccattcagaaatcgcggtccagcggcaaccaacccccggcacccttcccgcatgtgcccagtgtagccattcagaaatcgcggtccagcggcaactgcagcaggacacctctcaccggaatgtagagtgtagccattcagaaatcgcggtccagcggcaacacgtcgcagggtaagccggtgttcgaacgagtgtagccattcagaaatcgcggtccagcggcaaccggcggctttgtcgccagaggtcggcgcggagtgtagccattcagaaatcgcggtccagcggcaacgtcagccggcgcgtccagcggggggcattgagtgtagccattcagaaatcgcggtccagcggcaacaggccgagcgtggcccgcatggcgcccacgagtgtagccattcagaaatcgcggtccagcggcaactgcgcaagcccgctgtcactcaggcgcggtagtgtagccattcagaaatcgcggtccagcggcaacagatcctcagccagcagcagcgtcacaccgagtgtagccattcagaaatcgcggtccagcggcaacaggacaacccggccggtgagaaccgcacgaagtgtagccattcagaaatcgcggtccagcggcaactccgcaccgcacttgaccttgtcggcaagagtgtagccattcagaaatcgcggtccagcggcaactcgaccgggtgacggtcacgccggccgacaagtgtagccattcagaaatcgcggtccagcggcaacaccacggggcagatcctgatcctgcgcaaagtgtagccattcagaaatcgcggtccagcggcaactagcgccacggggtagaccagctcgattgcagtgtagccattcagaaatcgcggtccagcggcaactcagcacctttggtaatgtcacccattgcagtgtagccattcagaaatcgcggtccagcggcaactcacgccgactatgggcgcagctttcgacaagtgtagccattcagaaatcgcggtccagcggcaacggaaggtccagcgtctcggtcaggcggatcagtgtagccattcagaaatcgcggtccagcggcaactctgtcaagtcgccgtggtcagcgccgaagagtgtagccattcagaaatcgcggtccagcggcaacgtaagcacagcgctgccccctgccagcgcgagtgtagccattcagaaatcgcggtccagcggcaacatcgaaacgcggaatacctgatagaccgaaagtgtagccattcagaaatcgcggtccagcggcaacccgagcgcggaacggacacagggtaaacccagtgtagccattcagaaatcgcggtccagcggcaactcacggcgacggcgaatgccagtgcctcggagtgtagccattcagaaatcgcggtccagcggcaactgacgtggccgacgacaccgccgtaaccatccggcgtaggccgcgaacgggtagccgcgttcagggagtggccttgggtgctttgggcttgccgggccgcggcgcccatttcttcgcgagctggtctaagcgttcgaccatccgctcgatccgggcatcttcgggatcgaaggaactccctgaccagctgaccacgtcgtcgtgctgctcgtggtccggatctgcgagggcttcgaggaattcctcgtagcccggggcaccgccgacgtcctcgggcggacaggccccgctggccttcagaagccttggataggtcacgcccggtgcggcctcggtgacccgttcgatccggatgctgtggtcccagtcatcgccgaagtcgtagacatactggatcgtcctggcgccggtgtcttcgagcaccttctgcaaggttgccttcttcgcgggcatggggccgtcgtagaacccatcggggtcgggcacgccccagccgacgccaccggcgcggaactcgtagagatgcgtgtcggtccagcccattgcggcctggaccacctcatgcagccggtcgagcctgatcttcagcggcacctcgatctggcgcattggctgcggatcgacatcgttcaggatgatcctgaggcgggcgatcagtatcatgcggccttcctttgcaaggtttgcgaccagtgccagggaaggagttccggcaggcgcgacaggggcatgtccggcagccgggcaagaacatcggccagccaggcctgaggatcgacatcgttcatcctggcggtgacgatcagggaatatatgaaggcagcgcggtcgccaccgcggagcgatccggcgaagagccaggccttgcggccgagggcaatgccgcggagggcacgttcggccgcattgttcgtcaggcagatgcggccgtcatcgaggaagcgggtaaaggcttcccaacggccgtcttcctcgaacatgtagttgatcgccttggcgacggggttgtgcttcgacatccgggcacgctcggcccgcatccagtcgtgcaggtcctcaaccatcgggcgcgccagcagctgacgggcgtcacatcgtgccacggcgctcaggccgttgatctcgcgctcggcctcgaagatgaggtcgatgcgcttgaccgcgtccagcgcgatgggcgagatctcctcggcgacctttgtgcccttgcgcgccccattcttggcagcggccttgatgtctgccagttcgaagaacttgcggcgggcatggctccagcacagggcgcggagcaccggcgcaggtttgcgggccgcgtcgtagacaccgttgtatccgccataggcatcggcctgcaggatgccggtccagcccgccaggtgccgggttgggtgctccatcctgcggtctgtcgagaaggaataaagcgccgccggcggtgcctcgccagcaaagggccggtcgtcgcgcagataggtccagagccgggcggtctgcgtgccgcccttggccatcagcggcacggttgtgtcgtcggcatgcaatcgttctgccgcgagaacatgggcacggatcagatcgtggatcggctgcagcgccacggcacaggcgccgacctggtcggccagggtggacaggctgatctccaccccttccttggcgtagcgttcagcctgccggttcaggggctgatgttggccgaacttctcgaacaggagtgagccacgagccgccatcggttcgaggcccgtggcgaacgccagcaggttgggcccggcccatccccgcggtgtgggatggaagggcgcgggcggctggctgatccgttcgcaggtgaggagggtcacaaaacagtccgggggattgttttgccgacgaacgcaggtgaacttctcgcggacggtctggatcaccttccactgccggggaataacctccagcgtctcggtgacatcctcgcccatcttcacgatgcgcgccgacccgcagcagctgcaggcggacggcgcctcgatctccactcgctcgcggggcagatggtcggggaacggcttgcgggcggggcgacggcgttcgaaggccgcgacaactgccttcggggccgtcgcctcggccttggcccggtcatcggcgaggtcggtctcgagatcctcaagccgcatctccagctgttcgatcagccgggcctgccgctcggcgctgtggccgtattggtcgcggcggagcttggcgatctgcaggcgcaaatgctggatcatctcctcggaggccgagatgacggcgcgcgcttgcgtcagctcccgctccgctgcggacgcgcgggcctcggccgcagcgagcgcagcacgcagaacagcaatctccgaggtggtctccgacatgccggaaacctaccgcaggatcccgtaatagtccaacaaaacaaggccattctgctcgtcaccctgccgatgctggccgctgggtccagcgcggattgcgccagtcgatcccctccagaaggtagccgagttgcgccgccgagaccggaaccgcggtcccgctctggctcacaggccagatgaacttccccgcctccagacgcttcagatacagcgacatgccgacgccatcgtgccacagcaccttgatcagatcacccttgcgcccccggaagcagaagatctccccgccatgcgggtcacgcccgagaccctgctgaaccttcagcgccaagctgttcatcccgcaccgcatgtccgtcaccccgcccgcgatccagacgcgcgcccccgccggaaacgcgatcatgcgccgtccagcaccggaagcagccgccccaaaagggccgggtcgatctccgcaggaaccacgatgtgccggccattcaccagcgtgatcgcgactgtgacggcaccggagctctccagctctgccgcaggtggtgccgctacaggcgcaggttcggcggcaatcatcaccggcgcaaaggtcagggcaggctcatcgccgagaaggccctcgcgatagtccttccgccagcgcgtcagcaacgcgcgagagatatcgtgacgccgcgccgtcagcgccacgttgcgtgggcgcgacaggctttcctcgacgatccggatcttctcgccagccgaccagcgacgccgccgaccgctatcggttaccgagagaacttcgatctgggaaactgcactttacgctcttaaggttgccttcgacgaaaacaagaacgagctggattcatacgatgatcgattggccgacgccatagacacagctaacgaggcaatcggcggattcagttgggttatggatgtatattctccccttgcgattgaccttaatggagacggcatagagacgatcaaccatttagacatggcgggcattttcgattttaatcttggcgttgaagttacttctcacggatggctatcgcccgatgatggcttcctggcttgggacagaaatatgaacggcaaaattgacgacgcaagtgaactattaggcggacgtacgctggatggcttcagtcagctttccctgttcgatgacaatggcgatggcgcaattgatgtcaatgatgcaatttgggcggaattactgatatggcaagacacgaatagtgatactgtctctcaacatgatgaactttcctatatttccgatcgagggtcacctctttgattctttcggctgacataaccactaggcagaacaatgggaatctagtacttttggagtccttcgcaaccagccagagcggtgagatgcttgaattttccgatgtttacttcagaattgctacgtcagacgagagtttgctttcttcgagcagctccgactcgaaggttgtgttcggacgagtgctgatgatttggttttgggatcagccgaagatcagatattctttgggggtcaggatctgacacctttgtttttaatgaaaactccggaagcgatattatctacgattttgacctgacccatgacaagcttgatctgagagaatggggcgagaaggataccctgacggcggaagtcacggatgatggcttgctcatcagcggagcttgtggctctgttcttcttctcggaatagcggaatatgatggtatcaacttgatatagccaacctgtgaccgctgatcgctatgtgaactgaccggccacagacattgcgctcttgattggggcgactctgaagtcagtcggaaaaacctgtgacgggtcattcccgcaacgcggcccggaagtagtcggtaaacggtttcaagagatagtcgagcggcgaatgtttgccggtttcgatataaacttcaacgggcattcccggtaaaagtctgaccttggctgtgctttggtcattcattggttcaagaagtatctctgtgcggtagaacgatgtgcgggtggcctcatcaagcatagcgtccgcagacaggttccggacgtgccctcggaactccggcgcttcatgaccggaagcccggaagaacgagacgcgcagactggccaatatccacttcatcaatctgcagcggagatatctgtgcttcgaccagcaatggactgtcttgaggaaccaaatacatgaggtagtccgcggcacgcagcacggcaccttcgttcatctcttgcaaccccaacacaattccctcggaaggtgcgcgcacttcaagcctcccaatccggtccagaagatccttacgccgttctgcaagctcagcgtgcgtctgggcgaggtcttggacattcgcggcagcctcttctcgccgagtgatgtcaagcgcaaggatctcgagttccaccccggcaatctgctccccgattgtcgccacttgggcgtcaagcccgccaatttcgccccggacctctgcggcctcgcgctccaatgccaataaccggctcttctgcgtcaggccgcgctcgtgaagtgaacgctgatcggcaacctccgattggagcaggtcaaactgcgagcgccgggcactcgcctgctcaagcaaaccatcaatctgcgcgagcatctgatcgatccgttttctttgctgctcaacctgcttttcttgtccttcaatgcgggtttcgaaaagcacccgttgtcctgcgatctgctcggcaacccctgcatcgccctcagccagccgcgtcagttcagcaccgaatgccacctccctggcgtttgcgctttcggcgcggaagcgggccattcgggcgaggacttcaaacaattgactatcgacgatctggagctctgttctcagggatgcgccatcaaggcgcaggagaagctctccgcgttccaccagttgcgcgtcccttaccagaacctcctcaaccactccgccgtccgggtgctgaatgatctgccgacggctatcgacgacgatctggccttgcgcgatgaccgcgccggaaag

SEQ ID NO: 3675 - DNA, 23225 bp, synthetic construct
  source 1..23225: mol_type = other DNA
  misc_feature 1..23225: note = Synthetic
ttgcaagcgcaaccctagacccaaggaaggacaagtaagatgcaaaggaaccaaattattcacggagaggcggcacaagagctgatgaagatggcggacggatcggttgatctagtcgtgaccgatccaccctatctggtgaactacaaagacagaaccgggcggtcattgctaaacgacgataacgcggcgggcgttttgccagtgtttgagccattggcgcgcgttctcaaaaacaatgcctattgcatcagcttttgcggctggtcagcactgccgagctttaccgcagcatgggagaacgccgggctacagatcgtgagtcagatcgtatggaagaagaaatatgcgtcccgaacgggatatacgcagtatcggcacgagacagcttatgttttggcgaaggggaaccctgccaagcctgcgcgccctatcgcagatgtgcaggactgggtttactctggcaataagcggcaccccacagagaaagccgtggaggtgatctcccccttgatccgttgtttttccaatccgggtgatacggtgctggacccgttttcaggatcggggtcaacgtccgttgcggctgttttgaatgatcgagagttcatcggcattgagttggagaaagcccattgtgaaacggcacgcgcaagagtggctggggcacaagcgttcaagactcggcaaaatggtgttgcgcgcgaggtggcagcatgagcatgtattccgagcagctaaggtttaccgcgctgctggacacggcagcgcaagacaacaaagcacgtagcttcgcgaaagaagcagcacatttgccatccgactggtgcgaggcacgcgccttgcaccctatccaaatcagaaaccatcacgcagcgatgatggagaatgactttgacaccgcattgcgcatacgcgcggacgcccacttgctcgcgaaaaagctgaatggcggccaaccgggcatcttggctggcagggacgcgcccggttgcgttcttgcgcgtgctgccgccgctccacgcggatctgagccgctttgggggcaggatggccggttcatggcgcgcgctgctggcacgacgctggatgtcgaagccaaaggtatgttcggaataggcgcaatcgcgatgccctacattggattctccgttcgggccgtcgatcccaccacgccatttatcagcgaaaccggatatagaagtttcttgggggtgtcagttgccccacagccgggcattacgacaggggattttgtgcaagaggtgatcgagacctatattgcacaagaattgaagggaaagctcttgcggatcaaaactgacagtctggcgggggcgacctggaacagaccttgaccacagcctcttcaaaaaaatgcgacgaaccgtgcggttcgtcgcatagagaccaataggcctggaagacgagaagtcggctcggccttgatgttttagaagaatgtcatgcattcaaccatagagatcagtctgcaaatcccattttccaaagaccgctatgaaagcctaagttaccgtccacgaaacccgcgacggcccggatacagaagctctgttttaaagcatggcaatatcttgaggcccgactaaatcgcgaaatcatctatagacttgcctgcttctaaagcctccttgagccatttcggccttgggcctctacctgaccaagtgagggcggggttttctggatggcggaactttggagcgctgtccgctttggcgcgcgttctctttctctccgatttttctggagctaagcccagctcttccaattcgaacccggactctttgatcaattgcatgacgtcacgttttgttgccatgagtgcttcatggcgaagctcttgtttgatcaattgcagatcagcttcatgctgttgaagctcttgataggtcatcttcttcaaatcagatttcgttggtttagccattgcagttcttctccttggtagagactgacagtgtgggaacaacagactgcagtcaatgaggatgacaactcaatcagccgaagagcgcgcaaatctgttatttgcaactgtatcggcaccaagtgtcgaaagttactgagaattgacccatataggcgttgctctgactttttaattggccgtgtatgcaatgattgaggcgtgatttccgagtactctcgactttgggaagaacccccaggcgggatgtttcaatcgggcataggaagaagttcgatacgttcgtaactgacctcaaacgtatgctgcgactggggcgactcacactatgggacccatgcggtgcaaatgacgaattcctctccgccaccacaggttaaaacctccgcaaactaaacaagatctttcccgcacggcagcatccgtgaaaagcgtaatcaggaaagcgctttcgaatattccgagccgccactttctaaatctgcaacacattgtttttccatagaaatgggcgggaattagaacttcactgcatgctcaagatttcgccgtcaataccgacaaagcagacatcctcgcatatcgtatcagttgtttatttctgaactcaaacaacccatgacagactcactaatgccgtgtacaccactcattaggtaagtagaatccgcccattagaactatctggattattgttatggatgacccaattctcagctcatacctgaaagaatttacgaaaaactttgatcttgaagggcaaaaggaagcagacgtctttgagttcttctcggcttatagtgttttgcatcgtgatttttcggagcataccaacttagcggatgtagtcgtcgcaggtgggcttgacaccggtattgacgcgattggtatgtatctaaacgacatacctgtcgtcagcaccatgcaagtagacgaagtttcagcgaagcagaagatagatgcagatttttgctttatacagtcaaaaacatcacgcaatctgaattcggcggagataggaaatttcgttcaaggagtaaaagaattctttggtcgaaggtacatgcctgcaaatgatagcattgcggataaacgtgaattgtctgaccacattttttctaatagcgtcaagatgcgagctaagccaagattgcatctctactattgttacagcggttcgttcaaaggtgatcctgctatcgaagcacgagtggctgcgggaaaggcggaactcatggagttcaacttattctctgaagtaaattttttgtttgttgatgctgataagctgcaagctcgataccaagaagtaaaccttcgggtggagcgcgaagtacaaataaacgaatatgccgcgcttcccccgatcaacggtattaggcaagcctacatcggtgtgttgccatgcaaagaattgatttcgcttttatctaattcagaaggaaagctgcacaaagcgctcttcaatgaaaacgttcgagattttctcagtagcaacccagttaacaatgaaatcaaagccacgttgctatcagttgataatcagagccgacttgccgcattgaacaatggcatcacaattgtcgcgaagcgcattcagatcgttggcaagaggtttgcacttggagactttcaaattgtcaatggttgtcaaacgagccatattgttttcgcaaatcagcaccttctgaccgaagacacctcgcttccggtaaagctgattgaagctgaagatcgagatcttgtgaatgagattgttcgtgcgacgaataggcaaacggaagtcaaggatgaagcgttcgtagtgcttggagagttccacaagcggttagaacgcttcttcatgagcgtggatgatttaccagcaaataagatcgtttatgagcggcgtaaaagacagtattctgacacggcatacacggctcagaacgtcgtcacactcacgtttctgacaaacagctttgtaagctgttgtcttgaaaatcctgtagacgcgatagactattatggcgttcttctaaaaaaatatgaaaaaacaatgtttgtcgaaggtcactcactttggccttatcttttgtcagcaaaaattctaaaggaagtcgaaaaactctgtgttgggaaggctcgcccatcactttggaagtttcggtttttaatttctactatggtccgacgtagttttggcgactttcccaagctcacgaacgacagagatcaagctgcatacgcaaaggcggccttgaaacagatcaataacaagaaagaattcgaaaaaagagttagaaaagcagagaagagcattgctgctgctatgactgaaaagggacgtgcattcgacaaaaggaatgctcatcaggaccgtaagttcattgcgggccttcttcagtaaagttcagcgcgctagtctttaccggtaaacttctggatgcttgaggccggaatgactactttggcgaagctgcactgcggcatcgaccgaccacatcaatggccggattgggccgaaccaaacggttttctctaaaggggggcgaaatcaggccagtcttcgcgccaatatctagagttctgtgggtcgcgtcgagcttcaccaacggcctcaaagcgatagtgctccatgctgtggtgttgttgaaaattcttcagtgctaagccaaatagccaagacccgaaaaactgcagttccaacccatcagactcatcgaattcggcgccactacacgtgaactgccttgcatagttttcgaaacccaacatgcgtggcgggcaatgtgcgacaatgtctaagtgtcgacgagtcgcaaaaatgcgggaggtctctatcaagctggatagcttcccaactcttggggaaccgaatatgtagcaatcgttgattggaacctgaaattgcatctgattcagcaaagcggcgatggcgccacccagtgagtgccccgatagatagattgcacaatcagattttgaaattctgtctgccattttactgcttaaacagtctcgaatagctgaggctagttcctcagcctcgttcagaaagcctcggtggattcggccgccgaagctagaattggatttaaacgcgtttaaattaaccagccaatcgtacgcgaattgggtgccacgcactgcgacaaagatgaatgtacgagccgggattagcaccgcaactgatcgtctggtgcgaataacatgcacgccttgaaagtcgaggctttcgagcgcgtctgcaaagtcgaattcttcgccaatgacaagcctttgaaacatctcgcaaggcaccaattttgcccgcgaatgattgttccgctcttcttctccaatcgcgcaataggccaaatgtgccaaaatactagatgccgcatttcttgttactttaaattggccccgctctctcgaccaatgagactgattaattaacagccaaagtggtccacctacttgtctaacttcttctcgcgatgctggttgtaacatccttttgtctccttcgaaattaattcaaaaaaataggaaaatgtgaggtggatcggcactcagcataacgatgaaatcagttggctccagattatcacactgcacatattctctaggacaacagaacggatagagtcaaaattattcgtattggcggtcaaggcggctccgacgaagctctgcaaagatgtgccgcgtcgcagcaataatgctgagatttaagatcggcttaggccgttcgtttcgatattttctgggccgagcccctatgatgctgtggaccggagaacggcaggaatgggcccagaatgacagatgctgcgagctgcaccaatatcggctttgtcggaaactgaccgtacaaatgaattcgccttgagatcgattttcctgagaagcgttaaagcccacaatgctccacttcacggcattctcgtgcctgtaggttaccgagggaaaagtgtccgtatcctgaaactattgatccacgggcagtagcacccggagccactaaaacaaaaggacaaaacggcatcgtgatcaatcggcctaaatgttctccgttcctcagaatttgttgattcaccaccgcgcaagtgtcgcaattgttcgttatgtcccaattgtaagaaattctaggattttgcggagtgcccgtattactacccaccggcgcgttacgaacctgaaaacaggatggatctatagaggtgtccgcctggatgggccttggcgagatgaggaggagtgctataaaaataggggctaatcttctttcactattcatgtcttgtccttgactgggatttaccgacttaaagtcactggagggcggcctaagagttcatcgatttgacgagatgcctcttgaaagagtggtaacagatttccgtcggtagcgatttggcgaatgtaggacagcacctctagtgctgcctcataatcaccgtttttcgcatatttttctgcggataaaaaaagtgaaagcccgtcaacactggctaaggtccgttcaagatcacgttcacgttcgcagcgtgcggccattggtgctccaggaatgcggtcatccagtaggcctactcgtgcgcagtcttcagaactcaatgcagaagcacgctcggcttcatcattccatatttctggttcttgcgggttctggattataaagcggcttgttgcatcaccctgataagcaggccagctactaggtcctatactaacgctagagctgccttctgatacaatgacgccaccaccatttggagtgaattgagcaccaacccatcgaccgccgtattcacccacaggatcacgaaaaaactcgcttttatatatacgaaatcccagacctgaggaaagatcaaccggtgtaacataaacatccactcgcgcttggcgtgcgcgaccctcgttacgaactgtgcgaacaattacaagtaggctgcgcccactaggggaaatagaagcagcggtgaatgatcggacgcaattatactttggaggataaagtgttgtaatctgccggctacggaaccagcgttcatcttcttcgggtacagatgccgaaagtgaataacgtgaaatgacggaggcttgtggattgagcggattccctggggctcgaaccaggagcacatcaccgaacaaaactgttaaaatgcggatgccttcaggcgtaacagaatatgttaaggcacgctcagcgaatggtcgtccatctgagtgagagcgataaaacccattggctatgcgacagtgggtcacgatttcctcatcgcggttgaagcgaagcgcgtttattgaagaagagtttggctcgtcaccttcgtatccataatcgacaggattccacctcgaaacagcttcagcgccagttataagcttacccaatggacctcgtcttaagaggccacgttgaggtgcaatgatgcgctcgatcacggtcccatcgagcgtgacggagacatgttgaccttctctaagcaaaagcaggcttggaaatcgagggtcgaaaggttgtggacctataggaggcgtcgctttaagtgcctgtgtaccgcgcgggttacgctgccattctctcacgcccgggatgtgaaaaccctccaacattgcaatctggtttaaagtgcccctggagagagttgagactctcacaccgttggattctcgcgtggctacaagtgttccatccccactgatggcgaagcgctcggtggggaaagggaagctttggatcgcattgtcctgagcaatggcgcgcccatctaaaagtgtagcagtgaccaatatggcgaaaaatactgctataaaataattggattttcccatgacaagatcaacccccgttacctgaaacaatgatagcctagcaccaagattctaagtgtgtctcgaaaaaatccttagcaagagcagatcttgatgtgtcgcgaagcgaaactccgctttgtcccgcaaattgccagttcgatccgtttcagatttgcagttgcagcaaaggtcagcgaagtgtgctgcgaccgaagcatctaatgaatctggctaagatcgatttcggaccgcgagcgattcagaatcctcttctcactcgcgccacaactgggagcgatcaagaaaatttgtatgtgacataatcaaaactatgtaggacaggattaaaaagaagagcttttgttggacacatccgacggttgtgcgggatgatctgaacagaccacgagcacaacagcagaaaaatgcgacggaccggatagttcgccgcatcaaggtctatcgggcaggacgacgataggccagttcggctttgatgtttttcaaagactgccgtgcattccggcgcgcaacggaatctttaggtgctactgaagctgtcagagcagcttctcgaaaaagaccccgcagtgctgcgggcggcagcttcaaattgagtaacaagtttcatgtgatcctccatctcttgggaggccccgaaccactcagggcctttcggcccgacccacatcagaggctctgattggatcggtggacgtcttggagatctggaatcacgtgactgacaaagatacttattgaagctaccgcgaagtgcgcgaacgagtttgaaacaatatatatgctccttcagtctatgtgataacttatagataccctgtttgcattatataggtcattgatatatactctttagtaaattgaaagagtaggtatttatacccatgtccagcgtgaaagatacagcaattcgacaatatgcgcgtcagcttgatgacgcggcaaggcagtgtgccggtctgaccccaccaaaagaaggttggatcacaaccatgcgcaaagcacttgagatgtccgcaccagaactggcgcgccgtctgggcgtgaccaagcccgcgatctatcaggcagagcgcaaggagcgcataggtggtatcactctccagcatatggaaagacttgcggaagccatgggcggagaatttgtctacgcaatcgtacccaacgcgagcgtgcgcgacgttctctattcgcaagcccgggaaaaggcgaagcaaacggtaaagcgtgccagcgcccatatggctttggagcagcagtctttaacgccgcagcagctcaaccaggaaatcgagcgacttgccgaagagctcttgcgcgaccgaccgtctgatttttgggaggcatcttgatattcgaagagcctgaaggtgcgacaccgttagatcccgatgagattgaagggctcaggttcaggcatgtggtgacgcgtggagaactggacgagctagagcaagccaacatcacccaaggtctgcaatggctcggacgccgccggggcggtgatattttaactgacgaatttgtccgccgcttgcatgagcggttgtttggagatgtctgggattgggcaggtacctatcgtcttcgcgaaaaaaacatcggcatcgatccgtttcaggttccgatgcaacttcgtatgttgctcggtgatgcgcgatactgggtggagcataacgtatacccgccactggaagccgcggcgcggtttcaccatcgcatggtgcaaatccatccgtttccaaacggcaatggacgtcacgcccgcatcgcggcagatgtacttcttgccgatcactacaatcaccccgctatcgaatgggccagcgggttcgatctacaagccgacaatcagcggcgtatagaatatatcaaagcgctccgggctgctgacaaaggagagatagagttgatgctggcgtttgttggaggaacaaagcccaaagggtgagcaactccaacgatgggaaaaaccggctgcggcagtttcgatataaacggcaatacgcggaaagcgtcccctccaatcaaactacaaggaagacaaaggtcaaaataagaaagcgcaggccgtagcctgcgctttaatgtggtgcaatcgaatgcttgttaacggctcgaccgcgaattttgaacaagacgatatttacagagaactaaatcttcttcaagcgcttttcggttgatttgacgcagacaagaaaccaaaattgctcgaattttaggagtgtgtttatgcgtcttggtcttgatattgggacaaattcgataggttggtggctctatgccactgaacgcggccagataactgaagtcgtagatggcggggtgcgaatattttcggacgggcgcgacccgaaatctaaggcatcgctcgccgtggaccgtcgggcggctcgagcgcagcgccgccgtcgcgatagatatctgcgccgcaaggctgctctgatgaagcgtatggcagaagccgggttgatgccagccgaaccaagtgaggcgaaaaaacttgaggcactcgatccgtatgcgctccgagccgagggattggataaagaactgccgctcactcattttgggcgtgccctatttcatctgaaccaaaggcgcggtttcaaatctaatcgcaagaccgatcgcggtgataatgaaagcggtaagataaagaatgcgactgcgcggctggaccaagcgatgatcatcaaaggcgcacgaacctatggtgagtttctgcacatgcgtcgcagcacagtcagtgatccgaagcaagtgccatccgttcgtaccagactatcagtcgcacgatgggaagacgccgaaaaggaggaggcgggttatgatttttatcccgaccgccgccacctgtcggaagagttcgctaagctttggatggcgcaggccatgtttcatcctaatgtcttgactgataacttgcgtgatgagattgctctcgtcatctttcaccagcgacctttaaaaacaccagaggtggggctttgcctcttcaccgaagaaaaacgtatccccagtgcgcatccattgaaccagcggcgcattctggtcgagaccgtaaatgctctgcgcatcgcaacacccggcgaaccggtaactggtctgaccacagaacagcgcgatcagatcatccatgcattggacaacaaaaaacatacaaaaacactgtctggcatgtctatgacgctcaaggcgctcggcaaaataatacgtttgaggccggatcagtattttacactcgagaccgcgaaccgtgatgccatttcatgcgatccagtccgcgcgagcttatccgatcctcgccgattcgggcccaactggtcttcactttcttccgatgcacaatgggacgtgataagtcgcatccgcgacgttcaaagtgaggcagagcatgaagcgctcataaattggctcacatcctttaacgatcttgaccgagatcatgccgtagaagtggcacgtgcgcctttacccgagggctacgggagattgggtttgacggcgaccacccgcgtatttgccaagctcgacgcggatgttatcccatatagtgaagcagtcgcacggtgtggctggcaccattcggatgatcggaccggcgaggtgctgactgagttgccttactacggcgaaatcctgacgcgtcatgtcatccctggaagctatgacatagaggatgatgacatcaaacgctatggtcgcgttacaaatcctaccgttcatatcgggctcaatcaattgcgccgtctgttgaaccggatcatcacagttcacggtaaaccggaagagatcgtcgtggaattggctcgcgatctgaagttatctgaagaccaaaaacgagacgttcagcgcggcatcaaaaaaaataccgaagctgcaatccagcgcgggaagaagctagaagaattgggtgtacccaataccggcgccaatcgcatggttttgcgcttgtgggaggatctcggagatgatgtcatggtccgaaactgcccttattccggccaacggatcagcgcagcgatgctgtttgacggctcctgcgacgtggatcatatcctgccatattcccgaactctggatgacagtttctccaatcggacgctatgtttgaaggagttcaatcgagaaaagactaataaaaccccttgggaagcttggggcaatatggatcagtgggacgcgatcgccgctaatctcaagaacctacccaagaataaggcttggcgatttgcctccgacgccatggaacgatttgaaggtgaaaacgatttctcagctcgagcgcttaaggacacccagtatctatctcgcatcgctcgcgcctatctgaatgctttgtatgatggtggagaccaagaatcgcatgtttgggtggtacccggtcgactcacggaaatgttgcgtcgacattggggtttaaacagccttttgtccgataaaaacggcgcggttaagaccaaaaaccggacagaccatcgtcaccatgcgatcgacgctgccgtggtcgcggctacggatcgctctctcatccaacgtataagtaaaatagccagtcgcgacgaacttgttggtgcagaacaggtcgctcgatctgtcgcacctccatgggaggattttcaaaaggacgtagcttcccaattgcggcgtataatagtcagccatcgcgctgatcacggtcgcatagaccccgttgcccgtaagtccggaaacgacagcacttccggacagcttcacaacgatacagcatatgggttagctcatgacggaaaggtggtcagtcgcaagccactcatgtcacttggcgcaggtgatatcgcgatcagcaagcgcggcgcgaatatccgcgacgcagatttgcaacgtcatctggcgcgtgtgacacgtggacttgatggaaaagacttggagaaagcgctatcgaatttcgcaaatgcacccaaattacctgatcagtctgacaacccatacttccgagtgcgccgtgtgcggatggaagacacattgcagaaaagcgctcaagttcaggttgctgacagggatgggaaggtattcaaagcttacaaaggtgacagcaatcattgctatgagatttggcaacttccgaaaggcaagatcaaatcgcaggtgattacaaccttcgaggcacatcaaacaggcttggatagaaagccgcaccccgcagctaagcggctattgagggtttttaaacgtgacatggtcgctattgagcgggatggagaaacgatcattggctacattcagaaacttgacgccgccaatggactcttcattgcgccacatgccgaggcgaatgccgatgctcgcaatcgtgataagatcgatccgtttaagcttattcaaatgagtgcaggcccccttatcaaagcgaatatccgacgggtttatgttgatgaaatgggccgtttgcgagatccgagacaacctaaatgatctaagatttggtggaaactcaagaaagcaatacaattagtgccttagcgattcgtgtttaattagtgtggtgatgtattggatcagattattgatattgcgacggacggtcggcatttgtcacgcgaccgtggatttctgaaagtaactgaagacggggccgagattggccgtactccgcttgatcagatcgcaggagttattgtacatgcacatggtacaacgtggtcctcctctctcttggtggagttggctgaacgtggtgcgccggtggtcctttgtgcggcaaaccacgccccaaaatccgtgctcatgcctttggaaggacatcatacgcaaggcgctcggatgcgagcgcaatggcaagcgaaaacacctttgatcaagcaagcttggaaacaggttgtctccaacaagataaaaatgcaggccgctgctctcggtgcttttggtgaagcacatgcacctttggagatgatgatccgaaaggtgacctctggcgacagtacgaatattgaagcgcaggccgcccgatattactggccccgcatgatgggtttagagtttcggcgcgacacctcggccgaccaacaaaacgcgcttcttaattatggctacacagtcttgcgcgcagcgactgcccgcgccgttgtcgccgcgggtctgaatccgacaattggtctgttccacgcgaaccgtggcaatgcttttgccttggccgacgacctcatggaaccgtttcgaccgttggtcgactgcaccgtcagggcaattgtgaaggaacgtggaacagaggttgatatggaagctaaacaggttcttgcgggactaatcgcaaccgatctgcccttgggcaatggcataacgccagtctcggtagcggtgatgaaacttgcaacctctctcggacaaagcttcgaaactggcaagctcatcctcgccttgccggaaccgccagaccctctcgtgatggcgggcttgggaaaatgacagcgactgtcacacaattatcaggatatcgtcttatgtggattcttgtgatgtttgatctaccgacggataccacgaaacaacgaaaggatgccggcacttttcgcaactttctgttggacgaagggttcgaacgcagccagttttctgtttatgcacgtttcgtgaacgggaaagaggcgttttccacccgggttaaccgtatcgaacgcaacttgcccgagtccggtgatgtacaaatcctcaattttaccgaccgacaatatcgtgatattgtgcatttctccgatcaaggtcgtcgtgaggctcgtgaaaatccaaaacagttggtaatgttttgatgcggttcgtacagaaatcacacacaagcatccaaataaagcccttcagtttcaggaccttatttggatatcaagtgtagctgttcaaaattcgcggtccagccgcaactggccttcagatcatccttcagccagttccagtgtagctgttcaaaattcgcggtccagccgcaactgatccacacacgattgaccgccaatccaaagtgtagctgttcaaaattcgcggtccagccgcaacaccggcagccgcctttccgctggtgcgacaagtgtagctgttcaaaattcgcggtccagccgcaacgagaacgaagcgtggtggcgcgagaactgcagtgtagctgttcaaaattcgcggtccagccgcaacgaactggccagccaaagggttacttggcgcagtgtagctgttcaaaattcgcggtccagccgcaactgttacactctctccgctcatgcggtaagaagtgtagctgttcaaaattcgcggtccagccgcaactcaccgcctgacgaacactagggtgtgatagtgtagctgttcaaaattcgcggtccagccgcaactgcccttggcctccgctggctggatctggcagtgtagctgttcaaaattcgcggtccagccgcaacaaaggacagacatatccggtcgcgtcgccgagtgtagctgttcaaaattcgcggtccagccgcaacagcgaggcccaaccggtcaaaaacgctcatagtgtagctgttcaaaattcgcggtccagccgcaactaggcagcggcggcagtcatcggtccgatgagtgtagctgttcaaaattcgcggtccagccgcaaccgaatggcaagccgacatcttgaaggccgcagtgtagctgttcaaaattcgcggtccaaccgcaaccgggtggcaacggcctaagccgctctatacctcaatggaaagggattccgtacttaccaacctcaaaggagacgctaagattttatatgtaggaaatttcgggcttgttggggcagcagtgcgatcattatttctgactttttttttagcagccatgctgctagatacctcgcattcatcggcacaaagttttgacgttgaaaaactggcggagcgtctacccccacaagttctggaaaaatttcagttcgaagataatggcgaattgatctctgggcctgtacgcgctcgcggggaaccaatcgattactcggaactccttgatgtcgaacttttgaagagtggtttcttagatagcatttacagctgcgtcgaaggcattcactactgcgatcaaactatattccggcaaagctcaaaatcactacctctaaaagtaatttctgaggacggtatatttgaccttgatgcagcagaattggtgcatgaggctatcttgcgcacgctcgcgacactcggctttgaagttccagcagaggctgacgaaaataaatccagaattacactatatattggttccatagattacttgcaagataaaacgaaggcgcaaagtgacagatacggctttgaacacttcgaaaggcttcaaaagaaccgtccaatatctttagttgggcaacttctagatcgatttcagatagaagaaccagatgactaccgctcgtgctacgtatctacccgcgaacgcgcagaacttgatcggattacgatttatcttgagccaaatgacttagatatctgtcttgcccatagcttaatgtactcactgggctttggtgcaacaggagccaacctaccgacggtgacaaatgtatctggtcgatttcaagctgcgactctcttagactttatgttcgtcgaatggctttatgatgaggagttcccgacttctagcggtatagttccaattaaagaattcctagaacattcccaatcttcggtgaatcgaaattgagggcaggcttgaagtttgaagatcatataaactcgacaaaatccgcgtaaataaatctttgtgcttgttaaatttgcatatgcgacttggtagcaagacgtagaaattcttaatcgagtgtaaactttaaagagccttcagaagtaacaagcgcgccattttctatctccatatcagcggttacatgaacattaggcattactacagcagagactggaatgtgtaccccatcgtcgatttcggcgtctacggacaccataccacccttagatccgtccggattggcatggctataccaatccaacctagcttttgaaaatagtcccatatctagccacctaccacaacattttgtagaaagagtaacacattactacgacttatagaaacagaaaatattcctatcaccaatggggcaatgccttccaccgcaaaagctacctgcgaccaaaaaacatagaaatcagcgtatctttcaagtggtctttgtggggcgatacctttagatgaaaaattcacttcgctactcggttcctctttagcatatgcttcgttatcgctgattgcagtgctaaagaaatcccgtatgaggtagcaaattgctgcggctagaattagaattaaggcaattgcaaaagctcctgccaaaatatctttgttgttttcgtcaatctcgatctcagctatcttaattgattttatgggaaggaactgcagcactataatgaagaaagagaaggtgtagatcttggaatgcaaccccttaaattctgaggaaagaataatcatttaataatctttctatccaccctcttccagataaggatactcattcccaattttccatcatcccgtatccttctaactctaagtgtgagctttcttttcccgagcggcgtgacccaagcctttagattatatacgaaatttgtcgtttgacgcgacggtgatttccaagtactccagaaaagctcgacgacttcattcttatgagctgaatgtacttttccctccgcgtagtccaaagcacatttaaaagtggcagccgaagtatcttcaacataagcggtatccattaactcgggaacaacgacatccataaacgacccaatctattttaatatattctaacaagcattttttcgccgacaagagccttagtgcggggatatgataaaatttcttgcttgttttttagcccgttccgaaccttggtttcagatatcctctcaaattaaacctaatttacggctgcgtatctctacaagatcgagctcacgtgaaccaggcggatgagtactgtcgtggccctccgggctttgatctcccgcgtggagcttggacgtagcctcgggcgcagttcaagcaaaacagatcgaacagatccttgctttacggatagcttcaactggaaactcccataaaggcatatgatcttccgccggtttccctttcccttgcccccccactattcgtcacgaggcaagacagacacttgttttacctgatgctgcactggccaagaccaatatttcgtcttcttctgagacaacggctaaacgctgctctagcgtgagaaggttggagtcgattccatcgaagaactccttcatttcatcgagctcactggcgataaatcgctcggcagcgtctttacgcatactccgggcattttcttggaatgcgatagctttattcaagagctggcgttttttgtatgcaatggcatcgccaggaatggccgcagatagttcctccatgatgttggacgcgcgttcgaagaagggctgcaacaagtacttagatggatatcaccgagggttctcaaggcgttcagtggcgtttgctggcttctaaaaccccgtttcaaaatgatcgatcttgttcccgaaatagcgccggatcgtatcgtgtgcggtgttggtaaatcgcgcagcgtcatcacgtcgaatgccgatcacgctcgtctccaagccgttcttcagcgcaaatgtcgcggcctgacaaccgagggccttctttgtatttggcaggacggccaagtcggagaagtgaaactgctttccagctttgcgcaagaccgagaacccgtcaccggtgttttctaccccaacagccatgacctagtgaacgcagcagcacacctgcaagctggtttcgtctcacccgctgtggtttttcggtcgccatcactcaattttcgacccttccaatgcagcctcgccaaactgcctggagtgaaataattaccaatataacaatatgttaaggtaaacggcagtgattggacgcccatattcactgttgcgaacgcccccttgcgggccgggctgtcgtgaacctagccagtctgtgcctgtctcggccctgcggcttccatcccttgcgcagctatagccagccgtcaacggctgacacttcttcctttgattggggccttgcaggcccgtcctccgtcaaggccaagcccttcgctatgacttcgggcgcagccagcggtctccccgtccttccgcacttcgtttgtgcaggacgggcgatccccctccgctgtctgcggtctgtgacggtctccccccgctcattggcgcgggcctagtccggttgcatgcgcaaccgactacccgaggagaggggaaacagatgaaaaccgatatttatgaaagagtgaccaacaagatcattgccgatctggagcaaggcgagctgacatggctcaagccgtggagcagcggcaaccttgaaggcaagatcacaaagcctttgcggcacaacggtgtgccctataacggtatcaacatcctgatgctgtggggcgcagccgtggagttgggctatctttccccgttctggatgacctacaaacaggccaaggagcttggcgcgcacgtaaagaaaggcgagcgcggtaatctggtggtctacgcaaacaccatcacgaagaccgaagagaaagacgacggcagcgaggaagagcgcaaaatcccctttatgaaaggatacagcgtgttcaacgtcgagcagatcgaaggcttgcccgaacactactatgccaagcccgagccagtgatcgatcctgctacgcgcatcgatcatgccgaagagtttttcgggcaagttggcgcagatattcgccatggcgggaacagcgcccattattcgggcggcagcgatcatgtgcagatgccaatctttgagagtttctgcagccccgaagcctactatgcgacacttgcacatgaactgacccactggacgaagcacaaatgtcgccttgatcgggaatttgggcgcaagcgttggggcgatgaaggctatgcccgcgaagagcttgtcgccgagttgggcgcggcgttcctctgcgccgatctggaactgacccccgagcctgacaccgaccatgccgcctatattcaaagctggctgaaggtgctcaaacacgacaagcgcgcgatttttagcgccgccgcgcatgcccagcgtgccgccgatttcttgcacggttaccagccggtgatcgaggctgaaaatgaagaaggagttgccgcttagggcggctcccaagcggcaaaatttcggctggcctcacggccagacgagctggtttgaaagtcttcaggcttgccttcgacctctccaaaccagtaccctcttcgagggaatgagagcagaacatgccaataacaaaagatgaatctgacgagctagaagaaaagaagatttgcgccgggtgtatcggcgagacctatctttcaaactgcgtcgaacacgaaggtgaagaagacgagtgttcgtattgcggtgaagagcttggatgcatcacgcttgaagaattggcggatcgggtcgaagctgcatttgagacccattattcgcgcacatcggatgagcccaactcatatcaatacgcgatgctgcgcgacaaggaaattgattacgattgggatcgtgaaggcgagcagaccgtttatgccatcgcggatgctgtcagtgtttcagaggagattgccgaagatattcaagccatcttggaattccgtcattatgatattgagaatgcaaagatggggattgaggatgagttttcatccgatgcccattatgaagaaatcatgcccggcgatcatgaatggcaagagcaatggacggaatttgttcgcctcataaaaaccgaagctcgctttttcagccgcaccgccgcttcccatttgggcgacctctttgaccggatcgacgaaatgcgcacccatgacgggcgctcgctcgtcatggatgtcgggccggataccgaacttacccacctgttccgtgggcgggtgttccaatcagagcccccactgcaaaaggcgatggaacgtcccgacaaagaactcgcagcgccaccggcatgggcggctggcgcaggccggatgaatgcacgcggtatctcggcgttctacggcgcaaccgcccctgaaatcgttctggcagaagtccgtccgccagtcggaagctgggttgccatggcacgcttcgagatcacgcgtccgctgaggcttcttgacctttcagctctggtcgatgttcatgagcgcggaagcatcttcgatcctgactatgcccatcgcttgggaagaatgatgttcttaagaactctttccagacgcatggcgcgtcccgtgatgcccgatgatcaggaaatggagtatctgccgacgcaggccatcgccgattacctgtcaacagaaggccaagtaccgcttgatggaatcctgttcccctccgtccaggtcggggggaatggggtgaacgtggttctgttccataaatcatcgcgatgcgaagagttggacatacccgaaggtactgaaatcagtgcccgtacatataccaactatgaagatggcccggagccggacttccatgtgagcgaggaagttcctcccaccgaagatgaggctgaaaccgaagaacggaggccgggaatttttgaacctgtattgggagattgggatgaatggttcgatgcagaccctagaaatgcggcattgaggatcgatgttgaatccttgcgtgtgcatggagtgaacgcggtccagatcgaaacgaatagtcattcagtgcggcggcatcgcttcgaaaagcgcggccagcctaacagccagccgcgagcccgttagaaacctggcgagcgggtcgccagttcatcttcgatattgcgcatgctctgaagagcatcatggcgctcggcgctactgcgcggcgctgcgcaaaaggcgttgaatgctttggccaacaggccgtgcagttctgccgtgctgcgggatgccgcttcaaatcgtgagacgagtttcatcgctatcctcctatgtttcaaggaggccccgaaccgctcagggcctttcggccccgcacacatcatccatggccagtgaaggccctgatggatcgggaaatctctttggaacagatggagagaagcgtttgaagcacgccgctaccggtttgacgggggtggacgtatcaacgtctgatacgcatgcggtcgaacggacataagctttcatgccgatgggtacgcgcccctgcgctcagtgcggtgcgatcttgttcaaagacttgcttttcttatcgaagttgacgtggtgacacgcagcaggccggtgcgctcgcggacgcgtttggcaggcctgcgcgtttttgcaggtggcattgatcatccttgcttgaggggacttgcaccaagagcccttaaatccctggccgaatgcggctcagcattcaatgtcctgcccgcaccacctgtcttcgacagccgtgttgagcatgaaccctgatcctttgccttcggcgcgacgggagggcgttagcaagccaacccaagcaaaggagacataccatggcacgcgaaaacaccaaccaaacccagccgctcaatgcacccgattatctggcgtggcacgtcaccaaccgaaacgacaaatccttctggaacaaggtcggagccgcatggcggcacaaggacgggcggggctacacccttcagctcgacacctgtccgatcaatggccggatcgtcctgcgcctggcgctcgaagatgcccccgaaaccgcaaacgatgcggggcgctcatgagcgccaccgtcacgcccagggagtatcgcgtcgatccctcacgtcttgcatcaggcacatggtgtcactcgcgagaccggcagatcggcgaaggcgatatcagcgcatcttacagcgccgacaaaatcggcatggaaggaaaggtcagaaaaccattcgcctggcagaatgcactttgggtttgcacaggaatgcagtcttacggcgactttcgcgcagccgaagcctataggcttgtgcccgagcggttcttcagcggcgagccgacgacctataacgaggtcgcttgcctgccagacgccgagcggttcaagcccgagggcttttaccacggcatgcgggttcgcagcggaaagcacgagttcatccttgtcgggccgagcgtgaagttccttcccaaagaagacagcgaaaccatcgagcaagccgatctgttcgatgccctctaaccgaaagcgccgccattactggcggcgctttttctttgttgttaacggtcaggttccggccctctatcgggtgggtctcgcctgctttcgcgcaggcggcgcaagcgctcttgcgtgtggtccttgtgctgcgcgggttcgggtgccttttctcggagttgatcaagccgaagcttgttttgatctt

SEQ ID NO: 3676 - DNA, 23222 bp, synthetic construct
  misc_feature 1..23222: note = Synthetic
  source 1..23222: mol_type = other DNA
cggcagggtggtcaccttgtcccgcacgatccggagcagatcgtcgaccacgatggcccctggggcataaccccagcccttgccgacgccggccggttcgccggtgcgcgggtcgatgctgttccaggtctcgggcagcactttatccggatcgccgcccaggcgccggacgccggcctcggtgcgggcgccggagacgtagcagctgcacccccattcgttcggcgggaaatgtttggcccagaacggatggtcgggcggaagcgcgatgccgttccacgacaggtgcagaaggcgcggctcggccgagccgccgtggaagtagatccagaaggcgaagttgccctcggtcagctgagcgtagcggcccgccatgtaggaggtgcgcatgttggtgcggtagatcacccgggtgcgccaggcttccccggccgccctgccttcacccgtccagccatgccagccgtgcttctccaccgtcgcccggaaatcgcgccggaactcctcgaggctcgtgccctccgtgatcgccttgtccatcgctgccccgagatcggccagcaggtccgccttcatggccccggcgacgacgaaggcgcggtcgtgctgctcttttcgcagatcgtcccagcgcgatgtcgggaccaggttgccgagccgcagccggaaggccgccacctgttcgcggaaggggcgacggaagacggttgccagattagccatccgtttcctcctggatcatcgcccgtcccccggcatgggccgccaggaacgcctctcccagcacccgcgccagaccttcggtccccagcgttggccaggcggccagcatcatctcgcgggcctcctcgagagagcccgccacctccagcataacctcgatctggtcgagcatctgcccgatctgcggcgcggcctctttcgccagccgatcgaccgccggagcgagaggctctgagcggcccgctgaggggccatccgtgtgcagggcggcatcggtgcccggagagccgaggtgggtattaaaagggtgtttaatcgagctctcaggaggcattgcgttcccatccggcggttgcacctgcgtctgcgggccattttggccggttggacggaggatttcggcgtcttttgccgcctcgggcaggccgaacttgtccagcacgtcggaggccgcgacacgcaggccccggtcgatcatcgggccgatcgcgtcggagaaggccttcaggtcctccggctcctgccgctggatgacgatgcgaggataggcctcctgcggcccatactccagatcgatccagggccgcaccaggtcgcggttcaggatcgcggccagcgccttgcagtcggccgcctcgatgtccttctgcacctcgcggtgttccttgccggaaccgagccccccggtttcggcatctgtggtcgccgtctggcccagcaccgccttcgagatctgcttgtccagccagtccgagcggcgctcgtagtgatcggtggaggatccgacattcttcgcctcgacgaactcgatcagcatgctctcgggaatgatcgccgcgcagtcgccgccgatattcgccaccgccctgaagagcgtgtcccggtccttctcatcggcgccgggcccgtacttgccgacccggatcggctgaccgtaggtctgggtgaagatcgcccagtcccgctgggtgtaggccttgaacatccagttccaggtggccaggcgggccagcccggaccgcaacgcaagtccgctcttggcccggatccgggcgaagatgaacttgtaggccggcagcgggatttccgcgccgccttcgtcgagcatcatcggcgtggccaggtcgcgccggtcaaagcggaaccagcgcgggtcgcgatactcgagccgcgccggctgccattgcagggaggacgtctcccagaggatctcggtcaggctgtagcccttgcccatggcgtcgaggatgtcgaaggtctcgtccgagagctcgtcccgcatcagccagtcacgaaccatctcggccatgtcgagatcgtgctggctctcgccgccttcctcgaccgtgatctcgatctggctgaccgaccgtttccgcgtaccgaggacgcccacgtaatgcaggtcccgttcctcgatcgtctcggccagctccaggtagcggatcgggtcaccggcgtcggcctcgcgcaggatgactgccagccgctccggattgagcccgtcgccgggatagccggtgatgggcgagcgcacgccgccgatggtcggcgcggcgatctcgcggcgcagctcggcacgccggactgggcgcccccattggtcgaccagctgtgcggttgccatgtcagcctccctcttggagatcgaagttggaaatcagcagttccccggcgcgggatccggcggagtgctttgcgacggaataggaggtctcgaccgggcggaggtgcgcccagtcaaagagatcgcggacctccgggacatcgttgatcgacagcaggaaccgcccctggatctgccggagctggtccgcgaggtcggtaaaacgggatcggtcaaaggcctgccgaccatagtcgccctcgctgccccagtacggcgggtcgagatagaagaaggtgccgggctgatcgatccgcgtgatgaaggccccgaagtccagccgcgtcacggtgaccccggccaggcgcgaatgcagcgcctccagatccggctccagcgtggtcaggttgaaccgggagggccggtcctttgaaatcccgaagttgcgccccgagaccttccccccgaacgcgcagcgctggatatagaggaaccgcgccgcgcgctgcagatcggtcagcgtctccggatcgaccgacaccagccggttgaaattctcctgcgtcgtgatttggaaccgcagcaggtcgaggaaggcgacgtaatgctcctgcaagatgcggaagagcgtgtagacgtcgccgttcaggtcattgatgaactcggaccgcgccgcgcggctgcgtcgcagaaagatgccgcccatgccgacgaagggctcggcataggtcgtgtgcggatccgcgtcgatgatccggcaaatgcgtttagcaaggtttcttttccctccgaggtagggggcgacaggtttgactggtgcgaaaggcacttggattgactccggttcacgccgccgccgaacattctcgggcagggcgatcttgattcttcggaggtcggcgggggctcttgacggattccccgtgtcgagagctgctccaacagctcccggcccctgcacagggcctttggtttgaaactggccgagggggtgtcgacacatgtcagatgccccctctcattccggtcccgagcgccggacgccaccaggggcgattgggaccatgatcgtcattgccattcgcgtccccgcgctgcgtgacgccgcgatagccgtattcgacgggcgcggcagcagcggcgccggcggccagggcggcggcccagaagcggtcggcgtgaccgtcagtgtcaccctctgccaccaggcggcggatgccggtcggtccgacgcgggagcggatcgcatgcaggtccgcacgcagcaccgggtcgccggcggggatcgcgaaggcccggtcctgcatgcgctccttcaggaccgtggccagttccagcttgcgcgcggccgtgaacagcacgccgtcgacgcgcgatgtgccgtaacgccgggtggcatcttcgacgggcttctcgcccatgccggtctggtcgatcgccacgcgaagcacggtgtagcggtcgaagacggaggcgagatgggcatcctgttcggcgaaggagatccgcttctcggcgatgacttcgcgcgtcaccagccggtcgcccaggtcctcgaccacccagatcacgaagaggtcgttgcgggctgcgatgtcgacgccgacatagaccggtttgccggtgtagcgggcgggatcgcccgccagcggctcctcgcaggaggcgatcaggtcatagtcgagccagctcgaggccgcgtcgagccagtgcagttcgaactcctgcgcccaggcgtcctcgtcggacatgccggcgcgcagctcgtcgatgtcgacttcaagcccctgttcaacggcctgataaatgtcgacgtgatgccgggaccagccggtgtcgtcggctgtcatcagctcgaagaacttgttgcccttgccgttgggcgtgctgatcacccggatcttgtgcccgccgcgcgccgcgactggaaaggccgagccccagatccgacggctgtcgcggtgaaacgcgaactcgtcgaggagcaggttgcccccgaagccccgcgccgcatcgggtgaggaggagagcgcggtgatccgagatccgcttggaaagcggacctcgtgggtcttgtaggtggcgtcgagctcgggggcgtagaactcgccctcctcgaactcgggcgggcggatggtggagagccggttataggccgcgaagaagccccgcacgatcggcttcaacgcatcctccatcgcttccttcgcggtcgcctcggagcgcgacaggatcgtccagcgcgtcttgcgcccggcgatctcggcctggaagcaatcgtcggcgatctcgccgcaggcaccgaaggtcttgccgccgcgccgggtgaacatgccgatcttgaagcggctctgatcctcgagccagcgcttctggtacggcaggaaggtgatgacggggtcagtcatgcggacaccgcccggggacccgcagcctcatgcgaaccccatgatctcgcgggcggcccgcgcggcgtcggcgttcatcgcgccccgggccacgccagcatccaggcgggtttccagatcggactgcatctgttcgcgggcttcgcgggcggctcgctcccgttcatcggccatcagcttctcgcggaccccggacgaactgatgacgtccttcatcatcttgccgaggcgggcgagggcgaggggatcgatctcttcgccgctcttggtcatctcggattgcatgaccttgaaggcgagggtggtgatcatctggaagagcacgttgtggcgcttggcctcatcttccatgccctgctcgttcatccagctaacggcccaggcgctggcctgctcctgcgccttgacgaaggcctcgtattcctggccgtaggcatggatcgcgctcttgccgatcctgagttcaagacccgcgtcttcgagccgcccgttgagagcgtcggcgagggcgacataatcgccaaagcctctggaccggagttcgtcctggagccagccgcggaactcttccggcaggagatcgaccttgcggggagggggcatgtctcacagctccgggagatcgcgggagatccccgcgtcgatgttctcacctcgtgcaatgcggcggccagacggcgtggctgtcgcgaccacggtgttgtcgcccgcgatcgtcacgtagccctttgcctccagccagcgcagatcctcgactacctcgctgtaataggcgctcacgccatcctgggtgccgttgatgacgtgtgtcaggatatcggcgttcgagacataatccttggacttctgcaggaagcgcaggatgatggcgcgtcgaagcggcttcacgaacttctcgacataatcgctcatgaacgatctcccatcaggtggtcctcgtggcggcccacgatcttctcggtccgcgccatgctctgggacatgccgagcatcgtcgccgacatggccttcatgtccccggcgatctcgctcagctggagctcgagccggtgcatgtcgtccttcccaggcatgccctgcacggtttgcgcgagctcctgcagacgcaggtcgtggcgatccatgcgcttgctgccttcgtggaaacggcgctcgatgtccttccgccggttgccgacgacggcatagatcatggagatgaccgagatggcgaacgccaaaaccccggtcagatccttgaggaagttcaggtcaagcgtcaccccgggctccccttgccggcccatttggtggcgaagtccttgacggtgtggccgcccatgtagagcgccatgtagaggccgctgagctgcagcagcaccgagtagtccatcggcggcaacgcgatcttgaagatggcgttcagggcatgcagaccgacgacgctccagagccagaggaagccgatcaggtacatgcccagagggcgccaggcgcgcatccaggcggggtccttgccttcggtctcgatcaggagctgctggttccgggcctcctgctcgtagacccggatcaactccggcacgaccggttctgcctccatgatcgcggcgcgtacgacctccggatgctgttgcgcctcatggtcgaggtcttcgatgccgacgccggcactgtccgcaatgacgcggagcacttcgccggcgatcttgccggtggtatcgccgagcttgttgctcaggaccttcacgacaagcggcgcgccgagttcggcggcaagggaaatcagggcggcggacatcagaagctcctcaagatgttggccagacggggcgcgaaggattggacgcgggcggccacggcgtcgcggtaggaccagagccgccaggcaagccagagcagcccgaggccgaggacgacccagccgatccagtccgggagggatgccagatcgggggcggcgtccggcaggtcggttgcctcgacggtggcaccggcgccggcggtggccacgggggcggcaatcttcgtccgggcgtccagcatccgctgcagcgtcgagagcgtggcgcggccgaccagcccgtcctggacgaggtcgtgatcggcctgaaaggccacgacgctggtctgtaggaggcccgccgtatcctcacccggctcatagccgagtttgcggaacccgacccgctcgatccaattccagatcgaccgcgaagacaatttcctgtcgtcggccacggcttgcacagcgtctgacctggtcgggagggcggtctcgagatcggaaaccgcaatcaaggcctggagacggccgcgtgccttcgtctgcgccgatgcgctggcggtctcgaagagggcccaggtctcttcacgggttcgcgtggaaggttcattccggtcccgggaaaggcgaacgccaagctttgttcgggcgcgcaggggcaggacagtccagtggtacgccatgccgccgccagcgccctttcggcgccgcaccttgccgggcattttggcccagccctcgcggttggccatggcgttgacccgcctctttgtggtggggacgtccggtagcccggcttcggccagttccgccgctgtccaccattccttgtcgggaccgtcagccatcgcggtcccccgtgcggcccagatcgttgagaagcgtgtcaatggcatcgccgcgctcttccaagaacctcaggcatgcctcctttggcgcccgatcccaggcgtctttcagcttcgagaatgcggtgtccaccgggcttgccggggcaggggccagcccctgctcggccttccaaagcttgcgggccgcagacgcgttcttcgcggtgccatcggccaaacgatcgacaacgtgatagcgctcggccggattgcctaccttgccgatctccatgatgtccttgagggcgactggcttcggagctgctctgaggcggcggacttcgtcgggcccgaggttgtctccggcggagaccaggcggcgcacatggcgctccgtgaggccgaacttttcggcggttgatgtggtgaaggacatgatgtccgggaccagatttccggtgtgttggttcccgcgaaaaccaccaaccgccatctccgggtgcatcttttcgtagagtcgtttccgagctgcgagaaacactgcggtatccagggcggtaagctcggcgccggccaggttatcgtcgatttccatcaacctggcgaagtcatcgttgcaggtccagcaggtgaccttaacagtctcccatccaatctgtttggcggctgctagacggtgcgcgccggccatcaggaccagttcccccttacggtgcttcaccttccgaatgtggatcgagtccttcatcacgccgagctcgccgaccgatgcgatgattgccgcaactcctgcctcggagacgggccgcaaacgatccttcacaacgatttcttcgatacggacttcggtaatggtggtcaggatctcagccattgtcgctcaggtctttcattttgcttttggagacgtgcctggtgccgtttatgtcgcgccgaacgaaaccaacctcatgaccagtcaccgcctcggcaatgcacaacggtttgccgtggaacggcgaggggcctttctgcaaacgcggtgatgcgaggctgacggttggcactgtcagtaccccgtcccgtaaaggacgccgcctgcgatcaggatcatgatccagcttaggatgaggcagaacgctcccagcaagtcgccccagatgctggccgaaaaccgacgctcagcgcggcgcacccggatccagatcgcgcgcaacttgcctgcgcgcggtccggccccccgttcgggtccgtgagtggtggcttctgacggggggactgctcgaggcttcggcccgagttcggcgattggtgcggtgggttgagtggcttctggcacttcaacgatctggtcggattgctggacctggtgttccattacacctgctccttcggatcgttggaattgggccgctcgatgcccgctggccaatccaggtcttccttccagttctcccagaaccacttggacactttgctcgctgtctccagcgtacagcttgcccccgcttcaagccgcttgaagaacttcccgtcgttcgcggcgtagacacctagcgtggtcatcttcagcccagtgtgtgccgcgtaaacatggcctattttcagaagctgctcttttgtcatgccccaaatccaacgtttggcgtttgcccaactgtatgttagggaaatgccaaattgcaagatgtttttgagtagggcattttcccaacttggatttcaggagaagccatggacttcgcgtcgctcgtggaagctcgcctcgccgagctaggggaaaacgtgaacagcttcgaagcccggcaaggttggagccagggctatctccgagcagttgtccggaatgatgacaagcgcaccgtaccgaacatcgagcgtgcagagaaaatatccagagctctggggtttgacttctacatcgggccgaaacgcgaaaccggcccggtcacgcaaattcagatacagggcaacgacttcgcacacgttcctctctttggcgcatcgctgtcagccggcaatggttcggtgaactctggcgacgtcgttgtcgaccacctcgcgttccgccgggaatggctgcggaagatcggcgtgtcgccgtccgacgccgtcctggccagggtcgtaaacggcgaacttggcgagagcatgatgccaacgatctctcctggcgatatgcttctgatcgacacgtccaagaaggagcttcctcaggagcgggcaactgcaaaaggtcgaaagaacccgatctacgccttcacgacatcagaaggtgcccgcgtgaagcggatcgcgcggaacatgggcacggtgttcttgatttcagataatccggatgtggcgccggaagtcgttgatccagcggcctgggacggtgtcaacgtcatcggcaaagtgatgtggtgggggcatacagccgaggagtgaaggcgccatgctgaacgctttcgccagagtagttcccgaggaattccttggctcaacaagtctgaaactaacgcgctcgatgccaaaaaaggaaacgcgccccgtaggacgcgtctcaatgtggtgctacttcgagcttgttaacggctcgaccgcgaattctgaacaggccattcataacatagttcgatcacattttcaatttgcagaagccaatttctgtttagagactgctcaagaggactcgtaggaggatgaaatgcggctgggcttggatattggaacgaattccatcggttggtggctctgtgaaactgacagagccgatgccagagtgcgaataaacggtgtcttggccggcggtgtgcgcatcttctctgatggccgcgatccaaaatccagagcgtcgctggccgtggatcgccgtgccgcgcgcgccatgcgtcgccggcgtgaccgctatctgcgccgtcgcgccacgctgatgaaggttctcgccaatgctggcctgatgccttccacccctgaagaggcaaaagcgctggaacttctggacccttatgaactgcgggctactggtttagatcagatcctgccgctgacccatctgggacgagcgctgtttcacatcaaccaacgtcgtggtttcaaatctaaccgcaagacggattggggcgataatgaaagcggcaaaatcaaggatgccacagcgcgactggatctggctattttggctaacggcgcccgaacctatggcgagtttcttcacaagcggcgccaacgggctgtcgacccgcgccatgtgcctaccgtgcgcacccgcctctctatcgccaatcgggacgggccggacggtaaggaagaggccggttacgacttctacccagaccggaaacacctggaagaagagttccgcaagctctgggcagcgcaagcaaactttcacccagaactgactgaagatctgcatgatctgatctttgaaaagattttctaccagcgcccactgaaggaaccgaaagtcggtctgtgcctgttcacctccgaagaacgtctgcccaaggcgcacccgctaacacaggcccgggtcctttatgaaacagtaaaccagttacgtgtcatagcggacgggcgcgaaacccgacgactcacgctggaggaacgcgatcagatcatctacgtgctggacaacaaaaagcctacagtatcgctgaagtccatggctatgaaactgcccgcattggcgaggactctgaaattgcgcgacggggaacgcttcacactcgaaaccggcgtccgggatgctatcgcctgtgatccagttcgatccagcttgtcccatcctgaccgtttcggcccgcgctggtccacgttggacgcgaccgcacaatgggaggtggtctcgcgtgttcgcaaggtccagagcgaggctgaacatgccgcgctcgttgattggctgatgcaggcctattcgatcgaccgaaaccatgccgaggccacggcaaacgcccctctgcccgaaggcttcgggcggctgggacagaccgccaccactagcattctggaaagactgaaggcggatgtcgttacctatgcggaagccgtcgctgcctgcggctggcaccattcggaccagcggacgggcgaatgcctggaccgtctgccgtattacggcgaggttctggatcgccatgttatccccggcacctatgacgcaaacgacgacgaggttacccgctacggccgcatcaccaatccgaccgtgcatatcggactgaaccaattgcggcggttggtgaacaggatcatcgagacctatggcaagcctgaccagatcgtcttggaactggcgcgggagttgaaacaatcggaacaacagaaacgggacgcgattaagcgcatccgcgatacaacagaggcggcgaagaagcggagtgagaagctcgaggaactcggtatcgaggataacggacgtaatcggatgcttctccgtctatgggaagatctgaatccggaagacgcgatgcgccgcttctgcccctataccggtgaacgcatcagcgcgacaatgatcttcgacggctcgtgcgatgtggaccacatcctgccctattcgcgaacgctggatgacagttttgccaaccgaacgctctgcctgaaagaagccaaccgtgaaaaacgcaaccagaccccttggaaggcttggggcgacgccccgaaatgggatacaatcgaggccaaactgaagaacctgcccgagaacaagcgttggcgctttgcaccggacgcgatggagcgatttgagggtgaaaaagactttctcgaccgggcacttgtagatacccagtatctcgctcggatttcccgcacctacatggacacgctcttttccgagggaggccatgtctgggtggtaccagggcgactgaccgaaatgttgcggcggcactggggtctaaattctctgctgagcgacaaggatcgcggcgcggtcaaggccaagaaccgcaccgatcaccgtcatcatgccatcgacgctgctgtggtggctgcaacagaccggagcctgctgaatcggatcagccgtgccgccggtcagggtgaggctgcgggtcaatccgccgaacttatcgcccgcgatacgccaccgccatgggaggggtttcgtgacgatttacgtgttcaactcgacaagatcattgtcagccaccgcgccgaccacggtcgcatcgaccgggaaggccgaaagcaggggcgtgacagcacagccggacagttgcacaacgacaccgcttatggggtcgttgatgcgatgacagtggtcagccgcaccccactgttgtcattgaaacctagcgatatcgccgtgacacccaagggaaagaatatccgtgacccgcaactgcaaaaggcgctagaaatcgccacccgtggcaaagagggcaaggcattcgaagccgccctaaggcagtttgccgagaaggcgggcgcctatcagggccttcgccgagtccggttgatcgagactttgcaggaaagcgcccgtgtcgaaatcggcacccgttcggaaggtggacctctaaaggcatacaagggggacagcaatcattgctatgagctttggcgcctgccggatggcaaggtgaagccacaggttgtcacaacctatgaagcccacgccggcatcgaaaaacgccctcacccagcagctaaacgcctgctacggaccttcaagcgcgacatggtggcgttggagcggaatggcgagacggtaatctgttatgtgcagaagttcaatcaagcggggatattgttcttggcatctcatttggaaagcaacgcggacgctcgggatcgtgatccaaacgacagttttactttgtttcggatgagtccggggccgatgcacaaggcgggcatccgccgcgtttccgtcgatgaaattggtcgcctccgggatggaggcgcggagacacattgaccccgattcgcccgaatcggcgaaatatgccatccttccgagggtttggaagaatgagatatggatcagatcgtggatatcgctacggacgggcggcatctgtcgcgtgaacggggctttctgaaaatcagtgaaggagccgaggagataggtcgcgtcccgctggatcggatcgttggggtcatcgttcacgcccatggtacaacgtggtccacttcgctgctgaccgaacttgcggaccgtggggcgccagttgttctatgcggatccaaccatgctccgcgctcggttctcctgcctcttgaggggcatcatgcccagggcgcccggttacgcgctcagtggcagagcaaggtcccgtttagaaaacaggcatggaagcaggtggtgatttctaaaatcactatgcaggctgccgcgttgggggcgatgggggaagctcacgcacccgtcgccatgctcaagcgcaaggtcaccagcggcgacagtaccaatgtcgaggctcaggctgcacgctactactggcctcggatgatgggcgaagatttcagacgggaccgcacggtgcccgatcttaatgcgatgttgaactacggttacaccgtcctgcgggcgaccgccgcacgcgctgttgttgccgccggtctgcatccaaccatcggtttgcatcattccaaccggggcaatgcctttgccctggccgacgacctgatggagccgttccgcccgctcgttgattgctgcgtgcgcgggctggccgccagaaacggtccaatagtggatacagaggcaaagcaaacattggcacgcctcatctctcttgacatgccattggggaacggcgtgacaccagtttcggtggcgctcggcaagctcgccatttccctggggcagagtttcgaaaccggaactttgaacctcgccctgccagcgccacccgatgcactcgccctcgttgggctaggcacatgactactgcccatgcctttctgtcgggataccggatcatgtggatactcgtgatgttcgacctgcccaccgacaccaagccacaacgcaaggcggcgacgggttttcggaatttcctgctggacgaagggttcgagcgtagtcagttttcggtttatgctcggttcgttaacggtaaggaagctttccaaacccgagtgaacagaatcgagcggcacctgcccagtaaaggcgacatccaaatcctcaacttcaccgaccggcaatatcgtgatatcgtgcatttttcggatcagggccgaaggtcggctaggcagaatccggaacaactggcgctgttctgatgggaattgtccagattgctttgcccgccctcttccagaacctctgttgtttcaggtgcttggaagaggaacgagtgtagctgttcagaattcgaggtccagccgcaacggtctatcctatgttgcccggctggtcgggagtgtagctgttcagaattcgaggtccagccgcaactgtcgccaccgactttgatgaagcggtggaagtgtagctgttcagaattcgaggtccagccgcaaccgccctgccgccccggctgcgcccgtccctagtgtagctgttcagaattcgagatccagccgcaacttcgatgctttccaggcgcatggcacgggagtgtagctgttcagaattcgaggtccagccgcaacttcctcgcgaaggcggcgcgcttctgcgagagtgtagctgttcagaattcgaggtccagccgcaacttgggcgcacgacgagaagccaggctgcagagtgtagctgttcagaattcgaggtccagccgcaacaggcaagcgccatctgggtcggtgtcaggaagtgtagctgttcagaattcgaggtccagccgcaacgacgggcacggcgatagccagggtaatggcagtgtagctgttcagaattcgaggtccagccgcaactgcgaggcccgacgcaggagcaagaggccagtgtagctgttcagaattcgaggtccagccgcaactgtgatggtgaggcgcagcgtgcgcccgtaagtgtagctgttcagaattcgaggtccagccgcagtcttgttggccacctctttcctcccttcgcgcttgtgccaaacggcgattgctctcaggaaatttcttaaatcgcgtcccacttccccgctcgctttgggcatccggagaactcagtaagtatctgtatcggaaagaaaaaaccgggaagtgggacgccgaaaaagaagtgggcgcctcgcgtcccacttcctgggcccttcagcaccgttcaaagtgaacataatgggccttctgagtcccgttttatcgaagtttcaaaagggtttaggcgcgctgcggttccgtggcctttggatggcgttctgaggcactgttacccgcttttgcgccctgtgcggggtgttgagaaaaacatgtttcggcgcagtttccggacgacgtcaatccttcaagtccttgatacctcgcgcatccaccgtcttccgggaactctcgtcctcttccggtatccgctgaaagactgactgtcccccaacatttgcagtgattgtagcgtgacagcgaagtttgcagtgattgacagcgaagtttgcagcaaacgacttttcgcctaagggctgtttcaaaggccgttcaagcgcggttataggtgacttgtggctcaggtggagggatcagacgtcggcgttgacgatctcatgcagccccagcccgaccaggaatgcagcccatccggcgcgcccctgatcgcccggcccgctccgatccgcgaactcggccgacagcgcggccatctgagctaccccccgaaattcggacactgacataagctacgatttgcagtctgctgatcttcgacgagaaggagatcagagatgtcgaaacggaagcagcacgcgcctgagttcaaggcgaaggtcgcgctggaagccctgaaaggcgaggagacggccgccgagctggcaagccggttcggggtgcatccgacgatgatccatcaatggaagcgagccctgctcgaaggcgcctccggtgtgttcgagcgcgggggccgcaagaagcccgagattgacgaggagcaggtgaaggagctccacgccaagatcggggagctggcggtggccaactcttttttggaacgaaagctgaagccctggggcgggaagtgaggcgcggcatgatcgagccggaccacccggacctgtcgatcggccagcagtgcaagctgctgtcgatcgcgcgctcgtctttctactacacgcccaagggcgagtctgagcggaacctcggcctgatgcggcggatcgacgagcagttcctggagacgccgttcttcggcgttcggcagatgacctggcatctgcgtaacgacggacaccttgtgaacgagaagcgcatccggcgactgatgcgcctgatggggctaatgccgatttacgagaagcccaacacgagcaggccgacgaagggccacaagacctatccctacctgctcagaggtctgcgggtggaacgcccgaaccaggtctggtgctcggatatcacctacctgcccatgcggcgcgggttcctatacctcgtggcgatcatggactggcacacccgcaaggtcctgtcctggcggatctcgaacacgctggaggccgacttctgtgtcgaggcgctgaacgaggccatccacaagttcggcccgccagagataatgaatacagatcagggatcccagttcacctcctttgcctggacggatcggctccgccggtccagcgtgcgcatatcgatggatgggaaaggccggttcctcgacaacatcttcatcgagaggctgtggcgcaccctgaaatacgagtgcgtctacctgcatgcctgggagaccggatcggagacgaaagcggccatccggaaatggatgagcttctacaacaaccagcgcccgcattcagccctgggcggccagcctccggcgctggtctactggcagagaaatgatatcaaccaacccgatcagcaggtgcaacgagtagcttaatttacgccagatcctgtccaatagatggggagtagctcaatcaccgccgcaacggccagagggtccgccccatcgaccgtgatcgaccccgcaccgacatcgacgatccacgcctcaaacgagggccgcacgactgtgcggatgccgagatgtgttgccgtatcgagcggccctaggctccagactcattgagtttcacagccagaacaagacggttgcggcgagcataatcgctgagaagaaggtttccgggcagcggtcataacgggttgcaacgcgccggcaatccttcaaccgcccgaacatgatctcgatgcggttgcgccgtttgtagcgcctcttgtcgtatttcaccgcggtcttgcgggacgtccggcccggaatacagacctttatccccttgtctttcaacgcttctctgaaccaatctgcatcatagccccgatcggccagaagccaacctgcctttggcaggcgactcagaagagccgccgcgccggtgtaatcagtgaccggcccggcagacatgaagaacccgatcgggcgccccttcgcatcggcaacggcgtgcagcttggtgttcactccacctttggtgcgcccgatctggcggccccgcccccctttttcaccccaaggcgtgatgccgtgcggtgtgccttgagataggtcgcgtcgatcatgattgtcttgtgctcggcacgctcagtggccaggccgaccaagatccgggcgaagacccctttgtcgctccagcgcttccaaaggttgtagagggtcttggccgggccgtattccttcggtgcgtcacaccagcgcaacccattgcgattgatgaagattatgccaccaaggacgcggcgatcatcaacgcggggcttcccatggctcttgggaaagaacggcttcagacgctccatctgggcgtcggtcagccaataaagattgctcatcgatcaggtctccttgcggagcctgaatcatgccaaaaacccgaaatcaatgggtccggagcccagaccggttttaacgcggatgccaaaggctttaggtgcctctgggcttccgaggtcttggtggtcgcaggaaggctccgacgggccttccacggcgttttcagcgtgaccggaaaaacacctcccagcgcttccggccgtgggtctcattccttcaagtccttgatattcgacgtttccgtggtcttccgggaactcccgccctctttcgatatccgctgaaagactgactgtgccccaataggcgcgccggtgagcgcctgcaattgcgcgggcgttgcggggaagacgtggtgcggtgtgccggcagctgcccagacctggtcgaactccatcagccgcgggtcgatccaggcccggatcggggtcaggtgtcccacaggggacacgccgccgatggcaaaaccggtctgcgcgcgcaccaaggccgcatccgccttgcccagcggttcgccggccagcttggcggcgcgcgccacgtccacctggttgccgcccgccgtcaggaacaggaccgccgtgccgctgtcttcgccgcgaaagatgatcgacttggcgatctggtcgaccgcgacccccaatgccgcggcggcgtcggcggcggtgcgcgccaacggggtttctacgatctcgacggtcagaccggcggcatccagcgccgcgcgcacgcgtttcttgctcttgctcatggcgcggacgatgcccgccgcgggcgcggggatcaagcgcgcccgttgactgtgcgcctgtcccgccgcaggtttgcgccatgacgcccgatgatgacgcccccctgtcggcccgcctggcccggatgccgctgccgcgcgacgccgatcttggcgccgaagccgccgcccgcgtgcccggtgccgaccccgatctgcgggccctgttgaccggcgccgcagggtccagccccttcctgcagggcctgatcacccgcgaggccgaatggctggcggaggcggcgcaggcgcccgccgcggcgcttgaccaggtgctgatcgacaccgccgaggcgccgcgcgacacgctgggcgccacgctgcgccgggccaagcggcgggtggcgttgatgacggcgctggcggatctgggcggggtctggccgctggaaacggtgatggcgcggctgaccaacctggcggggctggcctgcgacctggcaatccgcgccgaactcgccgccttcgacaagcgcggcaagctgcccgcccccctgcgcgaggatcgcgacggggccttcgggctgttcgtgctggcgatgggcaagatgggcgcgcacgagctgaactattcctcggacatcgacctgatctgcctgttcgacgacagtctttatgccgaggccgatgtgcttgacgcgcgccatgcgctggtgcgggtgacccgcaacatgtcggcgatgctgtcggaacgcaccgccgacggctatgtcttccgcaccgatctgcggctgcgccccgacccgtcggtgacaccggtctgcatctcgatggacgcggccgaaagttattatgaaagcttcggccgcacctgggaacgcgccgcgatgatcaaggcgcggcccgccgccggggaccttgaagccggcgaacggttcctggaggcgatccgccccttcatctggcgccgccacctggatttcgccgccatcgaggacgcccatgcgatccgcctgcgcatccgcgacaccaagcgcctgcatggccgggtcgaggtgccgggccacgacatgaagctgggaaggggcggcatccgcgagatcgagttctttacccagacccgccagctgatcgccggcggccgcgacccggggctgcggatgcggggcaccgaaccggcgcttgccgcgctggcgcgcaagcgctggatccccgaagacgtcgccacccgcctgcgcgaccattaccgcgccttccgcgaggtcgaacatcggatccagatggtcaacgatgcccagacccaccagatgcccgcctcgaaggaggggatcgaacgggtggcggggctgatggggatcacgccgtcggagatgttgcgcgacctgtcccgcaggctggccgaggtggccgagctgaccgaggatttctttgcccccgacgcggcgcccgtgcctgcccagccggagcatgaattcgaccgcgatatcctgtcgcgctggcatcagtacccggcgctgcggtcgtcccgcgcggtcgagatcttcaaccggctgcgccccgaactgctggcccgcctgtcgcggtcggcccgcccggacgacgcgctggtggccttcgaccggttccttgcggggctgccggcgggggtgcagatcttttcgctgttccagtcgaacccggacctgatcgacctgctggtcgatgtcatcgtcaccgcgccggcgcttggcgaatacctgtcgcgcaattcgtcggttctggacgcggtgatcggcggcgccttctttgccccctggccgggcgcggcggcgttgaccgatgatctggccgcgctgatcgcgcacgaggacgattacgagctgaagctggacgcggcgcggcggtggaagaaggaatggcattttcgtgtgggggtgcaccacctgcgcggcctgatcgatggcgagacggcgggcgcgcaatatgccgacctggccgatgcggtgatccgcaccgtcagccccgaggtggtgcgcgaattcgcccgcaagcacggggcgcccccgggacggggggcggcgatcctggggatggggtcggtcggggcgcggcacatgaacgcgggatcggacctggacctgatcgtgatctacgacgcgctggacgtcgacagttccgacgggcgccgcccgctggccacgcgcacctattacgcccggctgacccaggccctgatcaccgccatgtccgcgccgatgtcgcagggccggctttacgagatcgacatgcgcctgcggccctcgggcaagcaggggccggtggcgaccagctggccgtcctatcgccattaccaggagaccgaggcctggctttgggaacacctggcgctgacacgggcgcgcggcatcgcgggacccgaggcgctgaccggcgatatcgaggcgttccgcgccgggatcatcgcgcggccaagggagattggggacatcatccgcgaggtgtcccagatgcgcgaccggctggcggcggccaaggcggcggcgggctggctggacctgcgcaacggggcggggcggctgcaggacctggaactgctgtcccaggccggtcacctggcggcggggatgcccagccggggggtgtccgagggcctgaccgaggcggagcgcgccggctggctgaacgagggacaggccgcgatactggccggcgcctatgcgctgttctgggaaatgcatacggcgacgcggctgatcggcatcgcgccgggcaatggcgacgacctggggcagggcgcgcgggacttcctttgccgccgtgccggggtcggcgacatggatgccttgcgggcgctgctggaagcgcgctacgacgaaacagccgctatcgtctcggcggcgctgcaatgcgaagaggctggcgatggctgacgatccgctcgaccccaaggggctgatccgcgaaagctaccggatcgagggcatcacccccggcgaatgccgcagcatcttcctggactgggccctgggcctgccgatcgagaccgataccgaaaccgcgcgccaggcgcttctgacccgctaccaggtgtcccggcccgaccacccgatgaccgacgtgctgcgcgaagggctcggcgacgcggcccgcccgcgccgccgcggcggctggcggtcgcgggatcgtggaaccaacggctgagcgccgattgccggggcgctcgcgcatcgctatgagggcgccatgaacgcatccaacgaattgcctgtcgtcaggctgaaacccaagatcaacgcccgccctttgcggcacggcttcccctgggtctatgaatccgatcttgtcaccgaccggcgcaccaaggcgctggccccgggcagccttgccgtgctggaagacgcgggccgcgaacgggtcggcctggtcgccgtgaatccggggtcgaagatcatcgcgcggatgctggacctggatcccgacgcggtggtggacaaggcctggctgacggcccggttgtcccgcgcgctgtcgctgcgcgagcggctgttcgatgcgccgttctaccggctggtccatgccgaggccgacgggttcccgggggtggtgatcgaccggttcggcgacacctgcgtgatccagcccaatgccgcctgggccgacaccctgctgcccgaactgacccaggcgctggtcgaggtgaccggcgtgtccaacgtgctgaagaacgccggcgggcggggacgcggcctggaagggttggacgatgaaagcgccgttctggccggtgccgcgcccgaaggaccgctgccggtgccgatgaacggggccagctacatggccgacctgaccggcgggcagaagaccgggttgttctatgaccaacgcccgacccatgcctttgccaaggggctggtgcgcgagggcaccgcggtgctggacgtgttttcccatgtcggcggctttgggctggcgatgctggccggcggcgcgggatccgcgctggcggtggacggatccgccccggcattggcgctggcggcgcagggggccgaggtcagcggcatggccgaccggttcaccacgcgccagggcgatgcctttgacgtgctggcggccctggccgaggaaggcgcgacctttgacgtggtcatctgcgacccgccggcttttgcgccgtcgaaacaggcgcttgaggcggggctgcgggcctatgaacgcatcgcccgtctggcggcgacgctggtggccgagggcggcgtgctggggctgtgttcctgttcccacgcg

SEQ ID NO: 3677 - DNA, 23219 bp, synthetic construct
  misc_feature 1..23219: note = Synthetic
  source 1..23219: mol_type = other DNA
gcgcgaggttttggcgcctccgccccctcctgcacaacgaacccgcgcaggatcgagacctcgcgggcgctgtccctgcccggttcgctcatcagcgcggtgctgacctgccggatcaaacccggttcggcatccagtttgcgtttcagctccacccccacattccgcggaatgtcgttgggatacatcagcaccttttccaacatcgccagaaggctggcaaaggcgcggatatagctgcgcttggtgtagcttgccgatttgaacagggtcgatacggccttgtcgacatccgggcagtcatttgcaggatcagcggcataggcgcgggacagcgcgcccatctcggcaaacgagatgtctttgcggatcaggttctcgtccaccatgcggcgataactgtcatccagattcgccggatcggaaatgcctgccgggatcgctgcgtaaagatcgtctccggtttcctcaagcaatgcgcgataggccgacaggcgccgcatgccctggatcaactcgaaccggccgtcagcgcggcgctcgacccggatggggttggataggccgacatcctggatcgaggttttcaactcgtccaactcggggtcagggcccggcatccggtcgcgcgtcagcctttcggtgaccacgtctgccagggcaatccgttcggttacgaacccttcggcgcgcaggcgcaccagctcatgggccagacggtcgttctcgacgcgaatcgcgtcctcggtggattgctgatcgcgcagcgcgtcggcgttttcggaaatggccgccgccatggggccgcgccgtttttcaagaacccggtccgggaccttgccaaccgggatatcctccatcgccggcatgtcgatatcgaacattctgcgtttgcggctcatgcgtcatcctccagcttgtcccaggccgacagcatgacgccccggaattcatcatagacattgtcaaaggtcgatcgtgcgcgacgccaggtttcccgcgtcatctcgcgataatccatctcgtaaaccgagcttaggaaccggcccgattgctcgacggcccgggtcatctctaccgggtggtgggcgaggtgttcgccaaagaccttgcggaacgcgtcatacattgcggtgtgaagcgcattgccgggctcgtagcgggtcagcagaaagcggacctcgcaaaaggttttgggcaatccgatcttacccgtgggtaaggtcttgtcgaaaccgtaggccagatcctccagcgcttcggccaactgaccgatgaaagaggtggtcgagtcgtattcccagtaaccgggccccgacgggatataaagcatgtcggcggcgaacaccgcgttcatcgactggtacccgatcgcgggcgggcaatcgaacaggatcaggtcataggcgtcatctgggatctgatccagatagcgcgagaccgccgcgaaaaacgaccactcggggttcaggtggcgatactgcgccgaggcaaactccacgaaggccgcgttggcgcaggaggggatcgcgtcgatggtcgaccatgaggtcttcttgatgaagtccgaaatgcgcagatcgccaagccccatatcggtgatcgaaggcggcaattcgcggcggggcagggcggtgccggattcagcggcggcagggcggctgttcatccgcgccgtctcgcggatcaggtcgcgcgccatgatgccccagacggtatagtcctcggccacgtcagtcaggcccatcgaatggctcagcgtggcctgcgggtcgaaatccaccaccagcacgcgatacccgtccagcgccgcggcatgcgccaggtgcagcgcaacggtcgatttaccggcgccgcccttgaagttcgccaccgccgcccggatcgcgcgcttgcccgccggacgcggcggcgtcagcgccttgcgattgatcttgagccgccgccgcagttcgttgacctcttccaggctgaaccagcgctggcggccatcgggctcgacctcacccccgggcagggacgggtcagcggccagtttgccccgaaaggtcgactgattgaccttgaagatcagttccgacacctcccagcttgagaagcggcgcagggtcttttccatctcggggctgaaggtctgctggcgaatccaaccctgcagcttgagggactgggtgcgcaatgcgctcaggtcttcgtgcgtgtacatgcctcaattctcattctattggacgctatttttgctctgttcgttatttacgcttgatttgcacttttggcaaaagaaattattgtatggatgtgaacttacccgtgggtaagaaaacaaggccctgccgggcctagaccgattcggggcagggctgagtcgcctccaggagtccgaagcgattctcaggcaagatttggggggacgcctgcgagaggaatgccccatttggggggacaacataggcctataaggggtcagataggatgtcccccatcaccaaaacttcacccatttcttttgttttttgagtgcgagctgagggccgctacggacgctgtttcaacgaactcttgacagaatcgaagtattggacgctaatcagggcacaatcacgaaaagcgttgggaaacggcgcattccaagcgggatcaaacccgtattgaggctgaaagagcggcgaggacacgaatgcaggttgcgaaaccggtcgggcgcaatgcgcctgcgctgaaatacgacattctgtcagcattggctgttcacgccctgtcgggcgacaagcaccgtcaccgcagtgttcttcgcatcatgaccctgatcaccacgcgctacaactggcgctcgaacgaactgtcaatcgggcgggaagagatcgcgcgcctgtggtccgtcaatgagcgtaccgtcaaacgcgagatggccaagctgcgcaacgccggctggatcgcggtcaaacgccccgccgcgcgcgggcgtgttgcggtttacgagatcgacctcaagcagatcatgctggacacggtcgagatctggcccgtgatcggcccggacttccaggatcggatgcagcaggaaccggcgcaggacaccaatgtcgtcccgtttcaggcaagaccagcgattccgccgccgcagggcgaagatacctgggcgcaggttcagtcgatacttcatgggcgcgaccccgagctttgggccagttggttccagcacctgaacgaggccaaaagggcagggggcctggccacgctggtcgcgccgtcgcgttttatggcggattacatcgcgcagaaatggtcgggtcgcgttctggcggcctatgcgcgggtggacccgtcggtacgggcgctgcgcatagaagcagcggaatagggcagggcgcgggcttgcccaatgcggcgcaggcgactatctagcgaagattgtttgcgggcgggccggcgcggcctgcctcaaccccggtcactgtggaagtgtgcattgaaaaagatcaaagcgaaattggcggcagcgcgggacgattcggtcctgtggcggctgctggccgaaaacatgcgggcccagatggtgccgtatatcattgccatcatcgcaatggtttttgtcgcggcaaccacgtccgggattgccttcatcatgcgcgacgtggtggattcgctgttcgacagcgagaattcggcaaagatcgtgggcgtttccatggcggtttttaccatatttctggtcaagggggtggcgacctatgttcaggtcgtggccttgacccgggcgggaaaccgcattgtcgcgcagaaacagatcaagctctatgacaagctgttgcgccagggtgtgtcgttcttcaacctgaccgaaagctcggatctgctgctgaaggtgacgcaatcggcgcaggcggcgcgtaccgtgatcgagatcatggtcacaacagcggtacgcgatacgctcacgttgatcggattgctggcggtgatgttctatcagcaaccgatcctgtccctgtttacgctgattgtcgggccgttggcgatctggggggttcggaccttgctgcgcaaggtgcgcgagatcgcggatatggaactgcaatccatgggcgcgatcatgagggtcattcaggagacctcggccgggattcgtgtggtcaaggccttcgggcttgaagaacggatggccggacagatgaatacggccgtgaaaagcgtggagaaacgccgcaacaagctggcgcggctgcaggcggcgaccagcccgttgatggatattctggccgggttcgccatcgcctcggttattggcctgagcgcggccaacctgtttggctcggcagggtcgaccccgggtgaattgatgtcgttcgtgaccgcgttgatgatggcctatgagcccgctaaacgcctgacgaaggtgcgggtcaagatggaactgggactgcggcgggtgcagatgctgttcaccctgctggatcagcccgaaaccctgcccgaagaggccaatcccaaaaccctgcccgacggcccgcgcgaggttgtattcgacaatgtggatttcggctatcgcagtcgggatttgatcctcaagggcctgtcgctgaccttcgaggccggaaaaaccaccgcgctggttggcctgtccggtggcggcaagtcgaccatcctgaacctggcgctgcgcctttatgatccgatcagcggcacggtatcgatcgacgggcaggacatcaggttcgcgtcgttcgagacgctgcgcaagaacatgtcctttgtgggccaagagacgttcctgttctcggcctcgatcgccgacaacatccggtttggccgcgaaggggcgtcgcaggaggacgtgatcgaggccgcgaaggccgcaaacgcctatgatttcatcatgaatctggaggatggctttgacacgctggtgggcgaaaacggcgccttcctgtccggtggtcagaagcagcgccttgcgattgcccgcgcgttgctgcgcgacagcccgatcctgctgctggacgagccgaccagcgcgctggattcacgctcggaacatcttgtgcaggaggcactgaaccggctgacggcggggcgcacgacgatcatcgtggcgcaccgtctgtcgacgatcatgcatgccgacaagatcgtggtgatcgaaggcggcgaagtgcttgagcaaggcagcgcggcacaattgctgaaagcgccgggcccgttcaaaacgctgtatgaccaccaatacgccaatgtcgtccatgcggaatgagcccggcatgacgcaacgccccgacagcatcacagcgccgcaggttgaggcgtcggtcatcattccgacctatcaatgctgggaccagttgcagacctgccttgacgggctggtcgcgcagacgctggatgtgcaccggttcgagatattggcggtcaacaacgatccgtcggacccggtgcccgaagggtttcgcctgccgcccaatgcccgcatcctgagcgaggcgaagccggggtcatatgcggcccgtaaccggggtatcgaagaggccgcggcagagctgctgttctttaccgattccgattgccagcccgatccgctctatctggaggcaggtctgaagatcgcgcgggatcaccccgaaattggccggttcggcggcaatgtcgtgctgatcccgaatgggcaggattggacaaccaccgagctatatgaccgccatctgggtctggaacagcagaaatgggtcgagcgcggccgcgcggtcacagccaatctgatcgtgcgccgcgcggtgatggaccgggttgggcggttcaacgatacggttctgtccggcggcgatatggagtggaacgaccgcgccaaggcggcgggcgagccgatcctgttcgccgacgacgccatcgtacgccaccctgcacgcggcagcctgaacgagcacctcaccaaggcccgccgcatcgaaggcgccaggctgcgccgcaattccaaacgcggattcctgaattacatcccgcccgtgcaaaagctgatcccgtccttcaagacgctgaagaacctgctcagaacccctgacctgacgaccgggcaggcctttggcgtttggggggtccattatgcgatccgtgtggtgaagatcaccgaaaccattcgtcttctctggctgcgccgcccggatcagcgccgttaaagctgcaatgacccgcaaaaaacagcgcaatgcgacccggccggtgctggcgtggctgtgtttcggtttgggcgcggttgatcataagtgcgcattaccgtcgaataatgatcataaggaagattgcatgccaaccccacaaggactggagtgatagtggggttctgttgcgaacttctacttggccgaaaagatagcaccgtagctgggttaagcggccagttttgcgaatttgagaaacgggcagattccgggcttgaactggcctttgcgtatcatgtgtgccgcttcaattccggcgagggttgccgaagctgattcaaatgacttgaaacctagctgtggtggggcccgccgcttgatgaaacggcggtccagttcggaaatgttgttcaggtatttgcgccttaacatctctatcggaatcggacatccgaagtcctttacatcttgttaatcgccttgatgcctgccgtgttggcactgcttttgtcgatgacgttctttctcggcaatccattcgtctccaacatccgggcaaagaagcgtgtggccgcaggcttgttttgacgtcgtgaaagcatgaaatcgagcgttttgtcgttttgtcgaccgttcggtaaagatagacccaagcacctttcaccttgatgtaggtcctatccattctccggcagcgatcgcatgggcttttcggtaagcgggctgcttcagacgcgccaaattagcggacctcggcggtcaaagttctcaacaaaacccgatataggcgctgcatggcagggcgtggcttagccgcggcgctcctggaggcaggtgctggcggatgggggtcgggcccctgtgatgtcggcaagggcaggctccagttccgggtgtgagaaacggaacccgctgcggagcagttttgccggaacgacacgttgcccccccagcatcgtctcgcgccccatgtcgcctgcaacgcccgcgatcagccagccgggaaggcgcagcagggcacggcggttcagcgcgcctgccagcgcttgcgtgaagtccgcgttttgcactgggtgcggggcggtggcgttgatcggcccgctgatgttcgggcgcgacagggcaaaggcgatgacgcggatcaggtcgtcacgctcgatccatggcatccactgttgcccgtgccccagttgacaaccggccccaaactcgaacggcgtcagcaaccgggcgagtatcccaccctgagtgcccagcacaaggccgatccgtagcagcacgacccggacgcccatctcggccattgggactgtggcgcgttcccacgcatcgcacacctgatgaatgaacgcggggcgcggggtggcgtcttcggtcagggtctcgtcctgtctcagcccgtaccagcccacggccgagccgttgatcaggcagtctggcttgtggtcgagccggcggatcagcaccccgagcccttcggtcatctcaacccgtgaccggatgatgcgcgcgcgtttccgggcggtccagagcccatttgccaccggctcgcccgccaggttgacgatggcgtcgaaccgctcggtactgtcgatctggtccaggtgggtgatcagacgcaccggatgggccagcatttcggctgtgcgcaggtcgcgcgtcaggacggtgacgtgatgcccggcggcgaccagcgcctcgaccagcctctgaccgatgaatccggtgccgccggtgatcagcaggcgctgccggggcgcaaggggcgcgaccagagaagccgggttgacagctgtcaaccgtgtgctgcgtttggcggccagcaaatcgcggacgctgaacagggccaccccgagcgccgcgagggtcgccatgacgctccagccgccataactgaccgggatcagcgccgagggcagggcggaccagtgccaaaggtaaggcgcggccagcgcaaggatcgcgccatagtttagcgccagcagggtgtgattgacccgctcggtggcgggcaggcggcgggtcaggtcttcttcgacgaaatcccaaagggtgatcaggacctcaaggctcaggatcacgaccagaataagggtaaaggtgccgcggggttcgaaccagccaaggcacaggaagatgacggcgtagaacgcgttgcggaccgcgtgcagccgcagctcggtctgttgcgaggggcgccatgccagccgctcggtgccttcgtgatgcaccagcgtgtcgaaggcgcccatgaaaatctgaagggcgatcagggtccagagcagtgggtcggtcatgacaggtcctcgttgtcttgaaaagtggcgtcctgacggatcatctctccgaacaggcggctgcgcaggctgagcgaaaacagaaaccgcgcgtcgcccagatcggtatgggcgatggtcagaacgccggggcgcagccagctgggcaggcgcagtttcccgcggcccagttgcacaaagtaatgatcgctgagaaaccggatgccgctgcggtcggtctgcaagcgcagggcaatgccgatgcccgcgccgatatattcctcgatcccggttggccccgcgaaccgtttcgaactgtggatgacctgcggaaacccgactgcgcggccgtattggcgcacccagaactggccccgcccggcgcagtcttcggtcacggtaacaatggcgggctgaccgacgcacgcggtgtcaaagggcagggggccgcccaccagccgtgccatctgcgccagcaggcggcccgcccgcgtcatctgcatcgtcaccactttgccctgatagaccacgctggccccctgggtcaggcaatggccaaagcggtgccgcacggcgcggggcagggcggcccaggcagttggaccgatcagatcgcgaaaccgtgtgtcggcctggggtccgtggggcgagaaattgatctgtttcatcagacaccttatgcgttacgtactgatatttctgaattaagagaaactgaggggcaaaattttttacgggccggtcttcttgcccccgatcttcagaagcgagaggatcttatcccccattttcatcagggccgagagtttcgattttggcaccgacagcatctggtccgaccatttatccgccgtgttcaggaaatcctgcatgttctgcatccgctccagcacgacgggggacaggcctttttcggtcgcggcctgcgagacgcatatgtcgagcgcgcgcatcgcggggtcgatctcgcgctctttgcggcccttggcgatcagcagggccatgtcccagacatcggtctcggcagcgaaatgttcccgccggtcaccggggaccggcacccggtggatcagacgccagccggccagctctttcagcgaattcgagacgttcgagcgggcaatgcccaactcgttcgaaatctgttcggcgttcaggggggcctcgctcagatacaagagcgcatgaatctgcgcgaccgagcggttcaccccccattggctgcccatatcgccccaatacaggatgaacttggcccgcgcggttgattcggatatatcggtaatttctgtcatgacagaattatgagatggtttgtgacaaaggtcaatccggtttgtgtgggtgccccctggattggtggagctgggggcgcagtttttacgggtgctgaacgtaaaacgcaggccgtagcctgcgtttcaatgtggtgcaatcgaatgcttgttaacggctcgatcgcggattttgaacgggttgagtattcgccgaaaaccgcctgtttgcaagtgtttattccggttgaattgcgccggtgccagtgtcattttgatcgcatttgttgatgggtgatttatgcggcttggactcgatattggcacaaattccattggctggtttctatttgaaacagagaatggcgcgattacatctgttctggatggcggggtgcgcatcttttcggatgggcgcgatcccaaatccggggcctcgctggcgttggatcgccgcgcggcccgggcgcagcggcgcaggcgggaccggttcctgcggcgcaaggcggcgctgatgaagcggatggccgaggtcgggctgatgccccgcgatccggcccaagcgaaagagctgcaggccctcgacccctatgcgctgcgggccgaagggttggatcaggcgctgccgctggcccatttcgggcgcgcgctgttccatctcaaccagcggcgcgggttcaaatcgaacagaaaaaccgaccggggcgacaacgagagcggcaagatcaaggacgcaaccgcgcggctggatcaggcgatgatggccaaacgcgcccggacttatggtgagtttctgcacatgctccgcgcagccgcgcccgatcccaaacggatgcccacagtgcgcgcccggctgagtgtcgccaagcgcgatctgtcggaaaaggaagaggccgggtatgatttctatcccgatcggcggcatctgtcggatgagtttgaaaagctgtggcaagcgcaggccgcgcatcatcccgacaccctgaccgacgatctgcgcgacgagattgccgccatcatctttcaccaacgccccctgaaggcgcccgaggtcggcctgtgtctgttcaccgaggaacggcgcatccccagcgcgcatccgctgaaccagcggcgcattctggtggaaaccgtcaacgccctgcggatcgctgcacggggcgaggccgcgcggcctctgacgcgcgaggaacgtgaccagatcgtccatgcgctggacaacaagaaacacaccagatcgctgtcgggcatggcgatgaagctgaaggctctgggcaaggtcatccggctgcgcccggatcagtcctttacgcttgaaaccgccaatcgcgatgccatcgcctgtgatccggtgcgggccagcctgtcgaaccccgaccgcttcggggcagggtggtcggcgctggatatggaggcgcaatgggaggtgatcgaccgtatccgctcggtccagagcgatcgggatcacgccgcattgaccgattggctgatgcgggaacacgggcttgatcgcaaccgggccgaggcgaccggaaacgcgcccttgccagagggctatggccggttgggggaaaccgcgacccggcgcattctagccgcgctggaatccgacgtgatcccctatagcgccgccgttgcggcctgtggctggcaccattccgacgggcgcacgggcgaagtgctggatgcgctgccctattacggggaaatcctcgaccgtcacgttatccccggcacttatgacgaaaaggacgacgacatcacccgctatggccgtatcaccaaccccacagtgcatatcggcctgaatcagttgcgccggctggtgaaccggatcatcaccgtctatggcaagcccgatgagatcgtggtggaactggcgcgcgatctgaaactgtccgaagatcaaaagcgcgaggtgcagcgcggcatcaagaagaacaccgatgccgcgattgcgcgggggaaaaagctggaagagctgggtgttccgaacaccggtgccaaccgcatggtgctgcgcctgtgggaggctttgggcgacgacgcaatgaaacgcagctgcccctacacaggtcagcggatcagcgtcgggatgctgtttgacggctcttgcgacgtggatcacatcctgccctattcccgcacgctggacgacagtttctcgaacaagaccctgtgcctacgtgaagccaaccgcgccaagaccagccaaaccccgtgggaggcctggggcggcacgccgcaatgggacaaaatcgccgccaacctcaagaacctgcccgacaaccgggcctggcgctttaccccggacgcgatggagcggttcgagggtgagaacgatttctcggcccgcgcgctgaaggatacccaatacctgtcgcgcatcgcgcgcagctatcttgaggcgctctacgatggcggcgacggcacaagccatgtctgggtggtgccgggcaagctgaccgaaacgctgcgccgccattggggcctgaacgggatcgaaaacctgacagacaagggcagtcagaccgtcaaggccaagaaccgcaccgatcaccggcaccacgccatcgacgccgcggtgatcgccgcgacggatcgcggcctgatcaaacgcatcgccaccgcccatcaccgcgaagagaccgaggggcttgaggatcaggcgcgctcgacctcgccgccgtgggaggggttccgcgccgatgtcgcggcacagatcgcccgcatcaccgtcagtcaccgcgccgatcacgggcgcatcgatccaagcgcccgcaaggccgggcgcgacagcacggcgggcgcgctgcacaaagataccgcctatggccttgtcgatgaaaaccatgtcacccaccgcaaaccgctgatgtcgttatcggccagcgatatcgccaagaaagtgcgcgacccttttctgcaacgccaccttttgcgggtgacccgtgggctggataacaaggagtttgaaaaggcgctggacgatttcacaaagacgccgctgctgccggatcatcgccccaacccttatctgggtctgcgacgtgtgcgccttgtcgagcccttgaaatccgaggcgcgcgtcccggtcacggacgccaccggcaagacctacaaggcgtataaggcaggccggaaccaatgctatgaaatctggaaaacgcccgatggcaaagtcgtcccgtgggtgatttcggcctatgacgcgcatcagaccaccgagaccagcaaaccgcatccggcggccaagcgcatcctgcgcgtccacaagcgcgacatggttgcgatcgaacgcgatggccgccggctcatctgctacgtgcagaagttggacatcaacaacggcctgtttctggtacccgacaccgaagcggatgccgaccgccgaaattcggacaaaagcgatccgttcaaatttatccagatgagcgccgggccgctgttcaaagcctgcattcgccgggtttacgtggatgaaatgggccgcctgcacgacccgggcccgaaggtctgattttgcgaatccggcaattggcaataaaatcagcatattactgattcgtctattgccggatttcttgatttggaccaggttattgatatcgcgaccgacggtcgccatttgtcccgcgaccgcggtttcctgaaagtctcggaagatggggccgaggtcggacgggtgccgctggaccagatcgcggcggtcatcgttcatgcccatggaaccacatggtcgacctcattgctggtggagctgggagagcgcggagcgccggtggttctgtgcgcggccaatcacgcgccccggtcggttctgctgccgatcgagggccaccatgcccagggcgcccggatgcgggcgcagtggacggcgaagacaccgctgctcaaacaggcatggaaacgcatcgtcgcggccaaggtcaccatgcaggccgccgcgctgggtgccatcggcgaggctccggccccgctgcacatgctggtgcgcaagatcacctcgggcgatggcaccaatatcgaggcacaagccgcccgctattactggccgcgcatgatggggcccgatttccggcgggacgcagggcagggggacgagaacgcgctgctgaattacggctatacggtgctgcgcgcggccaccgcgcgggcggtttcggcggcggggctgcacccaaccattggcctgtttcactcgaaccgcggcaatgcctttgcgctggccgatgatctggtcgagcctttccggccactggtcgattgcgccgtccgctcgatcgccttgcagcacggcccgcaggtgggcagcgccgccaagcaaacgctcgcccgcctgatcgccaccgacctgccattgggcgagggcgtcaccccggtctcggtggcgctgatgaaactcgcaacctccctgggtcagagttttgaaaccggcacgctggacctggcgctgccgcagcccccggaccctctgacattggcggggttgggggcatgagcgccgaccggaccatactttcaggatacaggctgatgtggatacttgtgatgttcgaccttcccactgacaccaaaccgcagcgcaaggcggcaacggatttccgcaacttcctgctggacgaggggttcgagcgcagccagttttcggtctatgcccgcttcgtgaacggcaaagaggccttctctacccgcgtccgccgcatcgaacggaacctgccggatgcaggcgacgttcaggtcctgaacttcacagaccgccaatatcgcgatatcatccatttctcggaccagagccgcaagggtccccgaaaaaaccccgagcaactggtgatgttctgatgcgattcgtgtgttattgccacaacagatgcgggaataaatcctgtgattgcagggctttatcccggcatctattgtagctgttcaaaatccgcggtccagccgcaactgccttccagacgttcatcgccaaaggtcgattgtagctgttcaaaatccgcggtccagccgcaacagggtcggaactgatgcgcgaaacccttgaattgtagctgttcaaaatccgcggtccagccgcaacccccaatctgttcggaggaagagagtctggattgtagctgttcaaaatccgcggtccagccgcaacgggatggctatcgacgtctggcgtgagggtattgtagctgttcaaaatccgcggtccagccgcaactgcgccaagtggatggagctggtgctgttcaattgtagctgttcaaaatccgcggtccagccgcaacttgagccgccttggtattcgcctcctcgaaattgtagctgttcaaaatccgcggtccagccgcaacaatcagagtgacacaagatatggactggctattgtagctgttcaaaatccgcggtccagccgcaacaacgtcggtaactggaaggttgccgggtctattgtagctgttcaaaatccgcggtccagccgcaactatcgaacctctcgaagatcgtttccgaaaattgtagctgttcaaaatccgcggtccagccgcaacgggaggcggcaaccgggagttcccggtcaaattgtagctgttcaaaatccgcggtccagccgcaacttgagtgcctcgcgcaacgcggctctttgattgtagctgttcaaaatccgcggtccagccgcaacatgggatttctcgtcgacctcatagacaacattgtagctgttcaaaatccgcggtccagccgcaactgcggcggacgtgaccggccaacaggtcacattgtagctgttcaaaatccgcggtccagccgcaacactgaaccaccggcgctctttggcctgttcattgtagctgttcaaaatccgcggtccagccgcaacttcacgggcggcgtctggatgttcatggaaattgtagctgttcaaaatccgcggtccagccgcaaccccgcgccggccgcccctgcgccgccgccgattgtagctgttcaaaatccgcggtccagccgcaacgatcccgagagtgtagagatcgcggtgtttattaggtatcatctttacgcaaatgtcggcaatgcgcggtcgattcaggctgagtgcagaatagggcgttaagcactttcccgaataggccgaatactggttcctctcggcggcggtgcctatggcgggttttgggtcggctgtgccatccctgctgtttgcgcgcttaggttagctgctacgctcactgacataagtcccgttgaaattttgggattccagatcacttggtgaaatccagaaaacaatcgaaatcatgtcaccatgttggaaccgcagatccgggtcgctggaaaccgtcagtaaaggcaaatgtgttttgtcagtaactgaccagccgcgttcgcttgcatcgccccacatggcatgcatcgcgaaatagctggagtaccgggcacaattgcacgtccacgatctctgcgtgtcgcgcggtccaacttctcgtattggttctgatgtaagttgattgcagccttccagaactccgcatttgggaaaaggtcgaactcccaagtctcaaaaggttcaaaagtgaatggccagcgctcaagaccttccgttgggaactcacggtaaaaataggatacctcctcttctgagaaatgcgtgggcaacgctggcatcttgcgcaatggcacatttgatacatcatccggacaatagatgaccctgccagaacctggcggggtatcgtagactggtgctatcatcggatcgaagaagaaaaagagcgtacccgtctttggtagcgatggtgtgccgtcaacttccggaacagatgcgagattgatttgcgcgagaaagtgcattggagcctgaggttcttctctggccatgaaccaaggccaatcatagcgctcaggtaacgtaggcgacctgccaaaccagcaccctttggcactctcgccgtctgctgaagggcatttgcgcaaatggataccctgacgcttggcggattcaagcatcggggcaagctcctctgggttcagcttacgggcccattctgcttgtctggcttcacgttcaggatcagtcatctacgcctcgtttgttttttggtgacgttactgttgtgttgctgagtgtccagagcaggcagaattagagcatgagagccccgtccaaacgatccgggcagtcttgttcgccatggcgaccgtcgtaacttgagccgattggcactccagcaatgacgttggccactcacttgctcgttcagggtgtgattgcgtttggcgtaccaacgaggtcataacgacccacggtcgaggccacgctgaccaccgccatgagcgcaggtgggaggcggaaggccagttgcaacccgttgagtccgcctcatgagatgccgatcatgccgattttgttgtcgcgccaatcctgtgcgacgatctaattcaggacagcctcgccatcgctgagcgcctgctcggaatgctcatcatcgaaggcggccaggtgaagcatctcagacgctatgtcgggttctgtcattcgttcttttgcacgccgtcctggaagggacacatcttctgttctcttatccggcttaaggaagagcagcgtgtggtaacaatccggtcatacgagaacgccacatcccccgacaaaagcgttcggcagatttcgtgctgcatagggctggtgaccatgcgcggcaacaggatagctgccacggaacatgaatgcagcaaagaaggcagtatcgcgcagaccatcctttattctgcacatcgccagccgctgaagtatttgcgccgcctttacatgggtattcttgcggtcgtcctgcaaaagagacgtttttgcgccaacaagaccaaatctattcgacatacggtaatccgcgcccgcccggattgcgacgggcctggccgggtcagagatggtcgaacagccgccccggcaacccgctgtggcgcggcagcttcagttctttcatcaggcagaacatcagggcctggttcgaggtgataaccggcttgtccagttgtgcttcgatccgttcgatggcctcgaccgagcgcatgtccgtgcagcttagtacgattgcttcggccccgggatcgtcggcttgcaccgccagatcgtagacctcatccggtgtcagctcaccctggccataattgcccaactcgcggcctatatcggcgcatttgacggtttcgatgtcattctcggaaagaaacccgatcgcctgggtattgagctctccgagatagggggatgaaaacccgacctttcgcgccccgaccgccttgatccccgcgacaagcgatccggcggcggtcagtgaaaccgcgcccgaactggatttgatgcgctgggcaagatccctgtcgaaggacggcccatggctgagcgtggccgaggtgcatccgtaaagcacaacatgcggacgcaccccggcgatcatgcgcagatcgttgctgatatccgacgcgccgagtccggccatctggtccgagcctggtatctcgtccacatcgtagccccccatgcgctgggcgtgtattgtggtgcccggcgcccgcatcagctcaagatcgggttccagattgacgttggtaaaggggacgagcacgccaattctggcaccggtgcgggtttcctgtgtcacgacaaagctcctttcaatacgctcagcgcgcggtccatgacgtcaggcggacagatcgtggcgcgcaggcaatcgtccaggccgtatccgcccatcgcacgcatcagcagcccctgcgcccgcaatgcggcatccacggtctgcatctgtgccggcgtggcaaagcgcaaaagcacgaaattcgtgtggctttcgggaacggaaattcccagtgcccggcagtgtgccgcgaaccggtcccggatatcggcagtctggctgaccacatcagccatatgcgcttgatccagtatcgccgcggccgccatcgcctgagatggcgttggaatattgtttggattcagaatttttcgaacctcagccgcgatccccggggggaagtacccccaaccgacccgcgccccggccaggccgtaggccttggaaaaggtgcgcaatacgacggtatcgccccgatggatcagtgagaagatgtcggccggatcatgtgcggcatccgagaattcggcataggcctgatcgacgacaagcaggacgtcgccgggcagattatttcgcaggcgcagaatgtcgtcattgggtatcagggtgcccgtcggattgcccgggttgcagatgaacacgatgcgggtctgcgcggtgacggcggcaagcaggtcttcgactgaaaccgtcagatcgcgctcgggcgcggtcacgtagtcggcccgggcctgagccgaggcagaggctacataagcatagccataatccgagcccagcaccctgtcgcccggcccggcaaaagcgcggatcaggcatccgatcagttccatcgagcctgctccgcacaggatgttgtccgggttgaggctgtggatacgggcgatggcggcccgcaattcccgccattccgggtccgggtagagcgggatttgtcccgccgccgcgcgcgctacggtcatggcgtcagggctggccgggaaggcgctttcgttctgggcaagcgagacggtcccctcatccccgaggtccgccagcgcatagggctgcatatccgcaatgtgtgaaatggcctgaatcaacgcgcgtctccttttgtgcgacgtgtcacggttcatccgcgctgccggggttttctgctgggaaccattgtaccggatctcgaagttcagcttcggcagttctatcgcagtcttgtggtgctgagaaatgacagcctttgaaccctgcggctactgcgcctcatcggacgtaaacgcctgatccttgcaacaagatcgcagccggtcgcacggcggtcgaggcgtttgagaggttgaaagcgttccattgcgaccagcccgcccgaaatatgctgtgaattctgttcagaaaacgaccatcgccggtgaattttaaactacggcccccaacggcgttcattgcaggaggcccgcgtcgcttacgttcttggaacacccggggcgatcttcaggttcctttccctcagttgcccagcagcaaggtccgccgggcgtactggcatgaaccgccagcaacacctttgggcgcagatcaggatggttctaagccggcgaagacatctggcacagtttacagaaaaacgctgcgcgcaagattacgtcttttggaaattacatatcttgcacgagatcgcacggtccggttcggtcatatccgagcgcgcgccgccagaactgtattccacctgacaggtgcaaacagggttttccccagacccctcaggcaaccatgcgcttgcgaagttccacccgttttgccagcagtgtctttgccaatatcgggtccacgtcatttcgttcggtgccgacgatccgtgtcagaagttgcagcccttcaagcgtgtccataatttgagacgcgcgttgcctgtgccactgcaatccgtgttgcgtcagatgcataagctcttcatcggcatggagttcgcccagcatgtctttcagagccggcaggtggcgctgtatcgatgtttcctcgaccgtgttgaaattccgatcagcccaatatccgatgtcgatttccttgtgcgaacggttgggcagaccacgcgtggatttcgccagataggaaaaggcggatttgaccgaatagtggttgagacaggccaaatccatacccgcgagcggaccgtaagttattgtcccttcgtcctgaaaggatgccggtaaagggtgacctgaaccgttgacccaccggatcttgtgcttgcggtccgggtcgggtttttgtggccggtggacgcccagcttgcgataagccccatcattgcgaaacagcgtcttgaaataacttgccgtccagggggcgtgacagggaaacggggccgcgcgggtgaattcctgcaggacgggcagggcggacagatccactttcccgctattgccaaaaagcctccaggtcagcgcataggcatcggcatcgggggctgccgcgaacaggtcgtccagccgccccgcacctgctttgatgtttacgaactcatcgacatcagcaaacagtacccactcggcggttttggtcagctcatgcttgcctgcgagctccagagcggtccactgcacgccctttttctggtagttttcgttgcgctcgtgggtcagccagccacgttgagcaagcgcatccaacagtgtgtcggtcccatcatcgcagtcgtttgaataaacgaggaaatcatcgaaaccgatcaatcggtgataggccacccattccagaatataaggcgcttcattcttcatcgccgttatcaggaggcgtgtcatctgagtccctgccctgcgcttattgatcagagttgccccggtaaacgctgcgcgttgcgttatccgaggtctcgcgaatgccaaactcgcccgggttcggcggctctgccgtgatctttgccgcagtctaggcacaaaggcatggcgtcgcaaccgaccgtttggagggctttgccatcttgctgggcgcgtgatgttgaaccagcgatctgtcacgattgagaaccggctttcttcaagcagccagactggcaaggcctcgttacgctggtctggaacctggacagagatatgggtgcgaggcggcaagatttgccatgtgaggcggcgtccagcactggtgaaaggcggggtttggaagggttgctttcgcgtatgaaatcgaacaagatcggcagtcaacccatcgcaaagcgccatcagttgccgcgccaagcgaagccccaagccttaaagtgtcgtcgagctcattcatgatccgcccgcccgaaattgcatctgcagatgacattatcgggaaagacgcattttttcttcctgcgggccggatagatgcctggtttgaacgccgctctgacatattgatcgtgacgtttttcaatctggccacagtcggcgagcacgagattcctcacccctggttctacgggaatgtggccaaacagggatattcggttctgggtctgatcgccaagcgcagggattggtatcgcaacgaagatactccgcgcgtcattgaaaggcttcgcgacgccggcctgttcgacgagtttcgccgtgttctttttgtaggcgcctcgatgggcggctttgctgcgctgacctattccaagttggtgccgggttctggcgttcttgcgttcagcccccaaagctcactcgccccggatatcgtgccgttcgaacgtcgctatccgcgcccgcagaaacagtttgattggtccaaccctgaccaccgcgatgcggccgatgcgattgcgcaggcgtcggatgtcacaattgcctttgacccgtttgtggccgaggacaaggcccatgccaaacgccttgccggcccgaatgtcacgtttcttcatgtcagccatatgggccatcaggccatccgggttttgaaacatgtcggtgtgctgccgaccctctttgccgaggtcgcggaaaaccgctttgaccgggcggcgttctttcgcgcgctgcgcggacgccgccagcagatgcgctggctccgagagtgtttccgggtggcggaagagcgcaaccaccatcgtctggtcatgggcgctgcgaaatccatccaaaccaaagaccggcgcatgaaccggtaccgcgtgcgggcgcaaaaacgcatggccgctcttctggctgcacgcaaggatcatgtgatcacggttggcgatccggcccctgagggggtattcgcagggcgaatcgactcgcttgccaacgcgtttgtcgtgccgatcctgcccgacaatccgcccacctctttcggtgtccttcatgcggatggcgcgtggtgcgaaacgtcgcaatcatggatggaagcgcgcctgaagtcccagcagccgatcgtgccgccaggggctgaggttcgggaacttccgggcacacatcttttcggcggtcattaccgcggccatttcggccatttccttgtcgaggcggtcagcaggttgtgggcgcttgaccacattccgctcaagcctgccagtctgatctatgtcgcccacgggtccgcggagcgacagaaactggataagtacagatcattctacaaagcgctgggcctgaacatccccgtgcgcgcatatgacaatgtcgcccaagtcgaacatctgtacgtacccgagctggcgtttggctggggcaaccgctttgcgggttcgccagcgtttcgggcctttatgcgcacgcgtctttcccggtctgtcgaggccgcgggggcgagtgatctctatatctcgcgatccagactgtgggggcatatgggtcaggtcattggtgagcaggtgcttgaggccaacctggaagcgctgggatacgaggtgtttcaccctcaggaacacccggttgaggtccagcttgcaaaatacaaggc

SEQ ID NO: 3678 - DNA, 23219 bp, synthetic construct
  misc_feature 1..23219: note = Synthetic
  source 1..23219: mol_type = other DNA
  variation 14595..15153: note = note, n is a, c, g, or t
ggccccagtgttggtgagggattgcttgggcgcgaagtgaaactagctgcgcgcggcaaaccaggtggcgatgcgggctttcagatggtcccagatcgcaggcgcgcctttggcaactttccatccgacgcggtcttcgagctgttcacgtgtgacattgtattccggccaagtgccgccatcagtttccagattgccaatcaccggctgcacacggtcgatggatttggcaaagacggcatcgtcgctttctgctgcttcaaactcttcccagagcgcgcgcagatcccggctttgatcctccggcaacatgccaaacagccgatccgctgccgcgctttctgcggcttccatggcagcgatgtcatgatcgccgtggatcggactgtcgccgacgtcaatttccaccagatcatggatcaacaacatgcgaatgacgcggtcgatgttgatgtcgcggttggcatgttcctgaaggatgagcgcatagagcgcgatgtgccagctgtggctgccgctgtcttctttgcggtggccatccagcacttttgtggcgcgatatacggatttgagcttgtctgcttcggtcagaaacgccagttggcgatcaaggcggtctgtcatggggtgtctgtggcggctttggcggcgcgggccgctttgactttgttgatgaggaacgcgcgcgccttctcttcggacatgcgcacgcgaacttctgtgagataggcctcttcgagcgattgagaggacgcagccagaatgttgctcacctcgacgaacaggcgttcgtcacccagctctttctgagctttcatggtgtcttcggcaagcttggcggccagcgcctccaatgtgctcatcagcggctgttctccgtcaggcggcgtttcacgtagtcggtgacgtggcctgtcatctggtccatatgctcttcggtctcaaagaagtgacctgcaccttcaatctccgtatgggtgattgtgatgcctttctgctcgtgcagcttgccgacgagattgtgggtctccgctggcggggccacacggtcattggtgccgttgaggatcaggccggagctggggcagggggccaggaaggagaagtcatacatattggccggaggcgcaatggagatgaaccctgtgatttccggacgccgcatcagcagctgcatgccaatccatgccccaaaggagaaacccgcaacccagcagtgcttggagttgttgttcatggattgcaggtaatcgagtgcggatgccgcatcagacagttcaccaacgccctgatcatactcgccctgtgagcggcccacgccacggaagttgaaccgcagaacggtgaaacccatgttgtaaaacgcatagtgaaggttgtagaccaccttgttgttcatggtgccgccaaattgcggatgcggatgcagcacgatggcaatcggcgcgtcccgctctttttgtgggtggtaacggccttcgaggcggccttctggtcctggaaaaatcacctcaggcatgtttgtcgcttttctccctgaaaagatggcctgctattcttgacgaatttgcgtagtcatcttagaacgcttctaaatcgtttcgtgcggatgcgtgaaacgggtcttagcgacttaagcacagtgatggctgaggtcaatcaattcgaaggggagtgtgatgaaactgtcaacaaaaggccgctacgcggtcgttgcattggctgatattgcgcttcagccccctgagaacctcgtgagcctcaatgaaatctctaagcgacaggacatttctttgccctaccttgagcagctatttgtgaagctgcgccgtgcgggattggttgaatcggtgcgcggaccggggggaggctatcggcttgcccgcgttccgtctgagattcggacggcggatattctggcggccgttgatgaaaccgtctctgcgctgcacactggcgcgggtgcgagtggcggttctagcggatcacgggcgcaatccatggcgaaccgtctgtgggaagggttgtctgcgcatgtttacgtgtttctgcaccagacccgcctgtctgacatcgtacagaatgatctggcaccttgtccggctgtgccaacgttgtttgccgttgtcgacgaagaagggtgatgcgcgtctaccttgatcataacgcgacaacgccgctgagaccggaagcccgagatgcgatgattgcggccatggatgtggcgggcaacccgtcttcggtgcatgcggaagggcgtgcggccaagagcctgcttgagaaggcgcgcacagaaatcgcgagcgcttttggcgcagatggggcggatgtgattttcacctccagcgccacggaatctgcggcgcttgcattgcgtgggcgcgagctgcatgcgggggatgtggagcatgatgcggtgggagcttgggtgaccccggatcttgcggtgggccgtgatggcgaaattgtgatcaccgatccggcggcgagctgtgtgcaattggcgaactccgaaaccggtgtggtgcaaaagctgcccgaagggatcgcggtgagcgacatgacgcaggcctttggaaagctgcctgtggcctttaactggagcggggcgcagatggcgctgatctcagcgcataagctgggcggccccaaaggcattggcgcgctggtggtgaagcgtggcaccgatatttccgcacagctgcgcggcggtggccaagagatgggccgccgtgctggcaccgaaaatatcattggcgcagcggggtttgctgcggcggccacggcggcggcgcgcgatctggctgatggggtatgggaccgtgtcgcccaattgcgcgatatgttggaagcccgccttgcagagggcgcgggcaacaccatctttgtgggacagggcgccaagcgtcttcccaacacaagctgcattgccacccccggttggaaaggggaaacgcaggtgatgcaaatggatttggcaggctatgcggtgtctgccgggtcagcctgttcctccggcaaagtccgggcgagcaaggttttgaccgcaatggggtttgatgaaaccacagccgcaagcgcgatccgggtcagtcttggacccgtaactacagaacaggacgtgatgggatttgccgacaaatggctgtccattcacgggaaacatcttgcccgctccgcataagagcgtgtgagcctagcgaacatacaggagtagctcatggccgcaatcgaccagacgcaagtaaaagaaggcgtcgatcaggagaccgtggatgccgtccgcgaagtgggcggcaaatacaaatacggttgggaaaccgaaattgagatggaatatgcccccaaggggctgacgccggatattgtgcgcctgatttccgaaaagaatgaagagccggagtggatgaccgaatggcggctggaggcgtatcagcgctggctgaccaaggaagaaccagactgggcgatgctggactaccctgaagtggattttcaggatcagtactactatgcgcgccccaagagcatggaagagaagcccaaatcactggatgaggtggaccccaagctgctggcaacttacgaaaagctcggtatccctctgaaagagcagatgattttggcgggtgttgaaggtgccgaggatgcgcctgcggaaggccgcaaggtggctgtggatgcggtgtttgactccgtttccgtgggcacgaccttccagaaagagctgaaagaggcgggcgtgatcttctgctcgatctccgaggcgatccgtgagcatcccgagctggtgaagaaatacctcggctctgttgtgccggtgagcgacaacttctatgcgacgctcaacagcgcggtgttctctgacggctcgtttgtttatgtgccgcccggtgtgcgctgcccgatggagctgtccacctatttccggatcaacgcggaaaacaccggccagtttgagcgcacgctgatcatcgccgacaaaggctcttatgtgtcttatctggaagggtgcaccgcgcctcagcgtgacaccagccagctgcacgcggccgtggtggaaatcatcatcgaagaagacgccgaggtgaaatactccaccgttcagaactggtatcccggtgatgagaacggcaagggtggcatctacaactttgtgaccaaacgcgcggattgccggggcgatcgctccaagatcatgtggacacaggtggaaaccggctctgccgtgacctggaagtatccgtcctgcgtgttgcgtggcaatgacagccagggcgagttctactcgattgccatcacaaacaaccaccagcaagccgataccggcaccaagatgatccacttgggcaaaaactccaagtcgcggatcgtgtccaaaggcatcagtgcaggtgtggcgcagaacacttatcgcggtctcgtgtccatgcacccgaaagccaagaacagccggaactacacgcaatgtgacagtctgctgattggcgacaaatgtggggcccatacggtgccgtatattgaggtgaagaacaactcctcccgcgtggagcatgaggcgaccacttccaaggtggatgatgagcagatgttctactgccgtcagcgcggcatggacgaggaagaggccgtggcgctgatcgtgaatggctttgccaaggaagtgcttcaggcgctgccgatggaatttgccatggaagcacagcagcttgtggcgatctcactggaaggctctgtgggctgatggaaaccattcacgctctgatgcagcaatccgcaggtgtgggcgcggggatcgcgcttggctctgctgtgggctttggcttgcgccgtaagcgctctggcagctccgaaggtctgattggcggatcggtctttgtgacctccgctgtctgcggaattgtcgccatgggcgtgatgatgctgatcacatatgtgagcgcctgacggcgagcgccacgtaacaagatatgaccgggcgtgcgcgcctgaggaaacgcgaaggaatagaaaatgttggaaatcaaaggcctgaaggtcaaactggaaaatgaagacaagcagatcctgaaaggtgtggatctgaaagtggaagcgggcaaggtgcatgccatcatgggcccgaacggctctggcaaatccactctgtcttatgttctgtccggcaaagacggctatgaggtcactgacggtgcagcgacgctggacggtgaagatctgttggagatggaagcagaagagcgcgcggcgcttggtctgtttctggccttccaatatccggtggaaattcccggtgtgggcaacatgaccttcctgcgcaccgcagtgaatgcacagcgtaaagcgcgcggcgaagaagagctctctgcggcggatttcctcaaagaggtgcgcgccaaggcgaagacgctcaagatcgacgccgacatgctgaagcgtccggtcaacgtgggcttctccggtggtgagaagaagcgcaacgagatcctgcagatggccatgctggccccaaagatgtgcatccttgatgagaccgactccggtctggatgtggatgcgatgaaactggtgtctgagggtgtgaacgcgctgcgtgacgaaggccgtggtttccttgtcatcacccactaccagcgtctgctggaccacatcaaaccagacgtggtgcacattatggctgatggccgcatcatcaagaccggtggtccggagctggcactggaagttgaaaagaacggctatgccgacattctggcggaggtggcataatggccgctttggcaaaaaaacaagaggcaacggcggcgcggctcgcagagatggcggtgccttcgggtggtcagtggatcaccgaagcccgcgaagcggctctggcgcgcgtcaagggcatggggctgccggagcgtcgtgacgaatactggaagttcacccgtccggacacgctagtgcagagcgaggttgcagaggcggcgacctttgaaaccggcgaagcgccactgtttgatgagattgaacgtctcaaagttgtctttgtggatggtgtttttgacgctgcgcaatcggatgatctgagcgcggaaggtcttgtgatcgaacggttgcaggacgtagcgggcgcagacattcactgggccaaagacctttatggcaagcttgaactgaaaggtcaggacccggtgcagcgccctctggcggcgttgaatacggcctttgcgagcgatggtctggtgatccatgtcactggcaaggtgagcaagccggtgaacctgatctacaaacatgcagagacgagctcggatgcgattttgcaccatgtgatcaaactggacgcgggcgcagagctgactgtgctggaaaacggcccggcggcggcacgcttcaataaggtcatggaagtggatgtggccgatggtgcggcgttccaccatgtgcgtgcgcaggggcgtgatcatgaacggcgcgcagtgacccatatctttggccgtctgggcaccgaaagcgtgttcaaatccttcacgctgacagtgaacggtcgcctgacccgcaacgaagctgtgttggagttgaccggggatgatgcggtggcacatgtggccggtgcctgtcttggcgatggtgatttccatcatgacgacacggtgtttgtgacccatgatgcgctgaactgtgaaagccgtcaggtcttcaagaaagtgctgcgcaacggggccgttggcgtgtttcagggcaaaatcctggtgaagccgggagcgcagaaaaccgatggctatcagatcagccaatcgcttctgctggatgaagacagccagttcctcgccaagccagagctggaaatctacgccgatgacgtggcctgttcgcatggctccacatctggggcaattgatgaggatgctttgttctatctgcgcgcgcgcggtgtgccaaaggatatcgcaaccgatcttctggtgatgtcctttgtggcagaagcggtggatgagattgaaagcgaaactctgaaggactccgttctggcgcgtctggaaggctggctggagcgtcgtcgcgactgatgtctgtcacgctggacattttggcaagctatcgcgcaccacggtctgtggtgcgcggtctgctggatatgggggagcgggaagatcgcgcgtttgcgatcctcatggcggcctgtatcgtgatttttgtctcgcgctggcctgcgttggcgcgtgaagcccatttgacgcagacggagctgaaccccttgcttgggggcagcctctttgccttggtgttcattctgccgctctttgcctatgcgctgtcctttgtcagccatctgattttaagggcgtttgggcgcaagcaaagtgcctttggtgcccgtattgcgctgttctgggcgatggcggcaaccggtccgctttatctgctggttgggcttgttgagggctttattggcgaaggcgtgccgctcagcatcgtcggggtgttgtggctggtgttctttctgcggatctggatttccgggttgattgaggcgggcaagacaactgcatgacacatccacttagtgctctgttctggctcacgctcaaggatcccggcgaagctgctttggtggtgatggggcggcccatgccacgcgagatcggctggcaggttctgggactgggcgtggtgctcaacaccgttctgacctttgccaccatttcgctcttccccattctggcgcagctttttgccccgctggatcaggcaccgctgttgtttgccgcgatcctgatggtccgtatgagcgcgatggttgccgcgcttttctggggcggtcaggccgttggcgggcgcgcgggctttgaggaattgctcttgggttttggctggctgcagatgtttcaggccggtgtccatgtggggatcttgcttttggcggtcttctcttcaaacctcgcgtcttttgtcgtgttgggcatgagcctttatggcatctggatcagccttcaattcgtaaacgtgttgcatggatttggcagcgttgccaaatctctgatgctgctggccgccacgatggtggcattggcgattggtctgtctttcttcgcgtccctgctggtgtcgctctttctgggaacttcctgagatgtatgacgtaaataaaatccgtgctgattttccgatcctcagccgtgaggtgaatggaaagcctttggtgtatctggacaatggggcctcggcgcaaaagccaaaagtggtgatcgacgccatcacgcgggcctatgaacaggaatatgccaatgtgcaccgcgggctgcattacctctccaacctcgcaacggacaaatacgaagtcgtgcgtggcatcatcgccaagtttctgaatgccaagagcgaagatgagattgtgctgaattccggcaccaccgaaggcatcaatatggtggcctatggctgggcgatgccgcgtatggaagcaggcgatgagatcgtgctgtcggtgatggaacatcacgccaatatcgtgccgtggcattttctacgggagcgtcagggcgtggtgatcaaatgggtggatgtggacgccacaggcgcgctggatccccaagccgtgattgacgcgattggtcccaaaaccaaactggtggcgatcacgcagtgctccaatgttctgggcacaatggtggatgtgaaaaccatcaccaaagccgcccatgaaaaaggtgttgcggttctggtggacggctcgcagggctcggtgcatgcgcctgtggatgtgcaggacatcggctgtgatttctatgccattaccggccacaagctttatggaccctccgggtcgggcgcgatctattgcaaagccgcgcgtatggctgagatgcggccgtttattggtggcggtgacatgatcaaggaagtcagcaaagaagctgtcatctacaacgatccgccgatgaaatttgaggcaggcacgcccggcatcgtacagaccatcgggctcggcgttgcgcttgagtatatgatgggtcttggcatggaaaacatcgccgcacatgaggccaaactgcgcgattatgcggtgcagaaactttcgggactcaactggcttcaggtgcaaggcaccacagcaaataaggcggcaatctttagcttcacgctggatggcgcggcgcatgcccatgatatttcaacgattctggacaaaaaaggcgttgcggtgcgggcagggcaccactgtgccgggcctctgatggagcatcttggcgtatcggcgacctgccgtgcgagctttggcctctataacaccactgacgaagtggatgtgttgattgacgcgctggaactggcgcatgaactctttgcctaaagcgtttcgacctattgtaaaggcacatggttaggcgaaacgcgcgcagccaatagatgttgtgggcgtttcgttatcaactcgatatctcaagttgctctcgaaacgctttaagcaggcattttacgattgcggggcgtagcgacactggctataccccgttttggaagcacccatagctcagctggatagagtgtcgccctccgaaggcgaaggtcgaaggttcgaatccttctgggtgcgccatgttacctccttaaatatatgataaattcatgcatttctttgaatgtttgaactggttcgtcttttcgggtgtgttgccctattcgtggttggcgcggacttcccttttcctcttccatgccgatggaaagcgcccctggctcctttcggcaggtttgctttgcacatcgcctattgggtaactggagagcaatgagtgctaaatttggggctttcctgtttgtataaaaaccgcgtgagaacggaaaagcgcgccccgtaggacgcgctttaatgtggtgctacttcgagcttgttaacggctcgaccgcgaattctgaactgcgctgagcgttacagattcaccactcactttcaagttgcaatcttatgcgatccggagaaaactttcctcttattttcatgaggtttattatgcggcttggtttggatattgggacaaattcggttggttggtggctgtacaaaacagatggcgaagcggcttctgcacggattgttgaggtgattgatgggggcgttcggattttctccgatgggcgtgaccccaaatccaagacctccctcgcggttgaccgtcgtgttgcgcgtgcggcgcgccgccgccgggatcgctacctgcgccgccgcgccagtttgatgaagctattggcacgcacggggcttatgcctgccgatccagtggaggcgaaaaagctcgaacgactggatccctatgaactcagatcaacgggtttggatgacgccttgccgctcacccatttcggccgcgctctctttcatctcaatcagcggcgtggtttcaagtcaaaccgcaagacagatcggggcgacaacgagaatggcaagattagggaggccaccgcgcgccttgatctggaaatgatgaccagcggcgcgcgcagctatggcgagtttctgcatatgcgccgtcagcgtgccagcgatccacgccatgtgccgagtgtgcgcacgcgcttgtcggttgcggcccgtggcggccccgatgcgaaggctgaggcgggctatgatttctatcctgatcgccatcatctggaggaagagtttcatgcgctttgggcggcacaggccacgcaccaccaggcactgacggacgatctacgcgatctggtctttgagaagattttctatcagcgcccgttaaaggagccgaaaatcggtctgtgcctgtttacagcagaggaacgtatcgccaaggcacatccactgacacagcggcgtgtgctttttgagaccatcaaccaattgcgcgtcacggcggatgggcgttcgacccgtccgttgacactggaggagcgggacacacttgttcacgcgctggataataaaaaaccgaccaaatccatgacgtctatgaatatgacgctgaaggcactcgccaagttgcttaagctgcgcgacggtgaacgtttcaccctggagacaggtgtccgtgaaaacatctcctgtgatccggtccgcgcctgcatggcccatcccgcacgctttgggccccagtggtcctcccttgattgggaggcgcaatgggatgtgatttcccgcgtgaggcaggttcagagcgagggtgagtttatagagctgaccgactggttgatacagggtcatgggcttgacgcggatcacgccaaggccgttgggaacgccccgttgcccgaagggtacgcgcgccttgggttcagcgccaccgagcgtattctggaccaattgaaagccgaggtttgcacctattccgacgctgttgcgaaatgcgggtggcaccactcagatcagcgcacgggggcgtgtctcgaggtgcttccctattacggcgaggtgcttgatcgccatgtgatccccggcacctatgacgcgaccgacgacgagatcacacggtatgggcggatcaccaatccgaccgtgcatatcgggctgaaccaattgcggcgattggttaataaaatcattgaagtccatggcaagcccgaccagatcgtcgtcgaactggcgcgagagttgaagcaatctgagccccagaagaaagacgcgatgaaacgcctccggaacaccacggccgatgcgatccgtcggagtgagcagcttgagcaacttggacagccaaacacggggcataaccgaatgctcttgcgtctttgggaagaccttggccccgcaatcgggccgcgctgttgcccctacacaggaaagacaatcagtgtcacgatggtgtttgacggctcctgtgatgtggatcacatcctgcccttttcgcgcacgctggatgacagctttgccaaccgcaccctctgcctgaaggaggccaaccgcgagaaatcagacagaaccccgtgggaggcgtggggcggtacggaccagtgggacgatatcgcggccaatctcaagaacctgcccgagaaaaaacgcaagcgttttggcccagacgcgatggagtggttcgagggggaaaacgatttcctcgaccgcgccttggtggatacgcagtatctggcaaaaatctcgcgtatgtatcttgatacgctctttaccaagggggggcatgtctgggttgtgccggggcgtatgacggaaatgctgcgacgccattggggcctgaacgcacttctgaatgacaaggacagaggcgccgtaaaggccaaaaaccgcaccgatcaccgtcatcatgcaattgatgcggctgtggtcgcagccacagactatcggctcatgcaaaaaatcagccgtgcggctggtcagggcgagaacgctggccaatccgctgagttgatcgcgcgtgacacagatgctccatgggagcatttccgcgccgacatcgccagtcagcttgagaagattattgtcagccatcgggccgatcatggccgcatcgacgtcgaggggcgcaaaacgggacgtgatagcaccgcaggccggctgcacaacgacacggcctatggcgtgattgacgatctcaccgttgccagccggaccccgcttatgtcactcaaaccctccgatatcgccatcacagaacgtgggaaaaacattcgcgatccgcaactgcaaaacgccctttatgtggcgaccaaaggcaaagaggggaagatgtttgaacaggctctggtggattttgcctccaaagaaggtccctatcagggtatccgtcgtgtccgtttggtcgaaacgctgcaaaaagcagcgcgcgttgagattggcaaaaccgagagcggccaacccctgaaggcgtacaaaggcgacagcaaccattgttatgagctttggaaactacctgacggaaaaatcgtgccgcaggttgtgacaacctatgaagcccacgcaggcagcgccccacgtccccatcccgcagcaaagcgtattttgcgcgtttttaagaaagacatggtgaaacttaccaaggacggtgaagaaatagtaggttacgtacaatccatgcacatcaagaacgggctctttgttgctcagcatctcgaagcaaatgcggacgccagaaatcgcgacaagaccgatccatttaaatttcttcagatgggtgcaggtacactcgttaaaacgggccttcgccgggttctagtggacgaaatcggtcgcctgcgtgacccgggccctcccaaactctgagtgcagtcgtgcgaatcgcgaaaatagatcatgcttccaaccatttggagtatgatttttggatcgtgttattgatattgccacggaagggcgtcacctttcgcgtgaacgtgggtttttaaaagtctccgaagcgggcgctgaaatcgggcgcgtcgcgttggatgaaatcaccgctgttatcgtccatgcccacggggccacggtgtcaggccaccttcttgcagagcttggtgatcgtggggtgcccgttgtgttttgcgcgtccaaccatacgccccgctctgtcctcatgccgatcgaggggcaccacgcacagggcgggcgcttgcgggctcaatggcaagccaaagccccaatggtcaaacaggcatggaagcaggtggtgatctcaaagatctcaatgcaagccgccgcgctggaggctatcgctgcgcctcatgccccgcttaccatgatggcccgcgcggttaccagcggtgacagtaccaatgtcgaggcgcaggccgcccgttactattggccccttatgatgggggacaactttcgacgcaatcgtgacgtccccgatgtcaacgccatcctgaactacggatatactgtccttcgcgcggcgacagcccgcgccatcgtagccgcagggctacacccgaccatcggcctgcaccattccaaccgcggcaatgcttttgctcttgcggatgacctgatggagccttttcgccctttggttgattgcgccgcgcgcgcgctcgctgagcgcaacggaccgcaggttgacaccgaagccaaacagacgcttgcgcgccttatcgcgcttgatctccctctgggcgatagtcagtctccagtctctgtcgctattatgaaactagcgacgtcgctcgggcaaagcttcgagagcggcaaactctcgctctctctgccacaaccacccgatgcactcaccctcgcagggctgggcgcatgacattttatccaagccatttatcaggatatagaatcatgtggatactcgtgatgtttgatctgccgacggacaccaaaccgcagcgtaaggccgcaacgaattttcgcaattttttgcttgatgaggggttcgagcgcagccagttttcagtctatgcccgtttcgtcaatgggaaggaagcattccagacacgggtgaacagaatcgcgcgcaatttgcccgataaaggtgacatccaaatcctcaacttcaccgatcgccaatatcgtgatattgttcatttttcagatcagggccgacagacggcccgaaagaatccggatcagttggcgctgttttgatgaaaaccccacggaaatatacaagtaaatccccctcaaaaccttgcgtgaacaaggggttgagnnnnnnnnnnnnnnnnnnnnnnnnnnnnnnnnnnnnnnnnnnnnnnnnnnnnnnnnnnnnnnnnnnnnnnnnnnnnnnnnnnnnnnnnnnnnnnnnnnnnnnnnnnnnnnnnnnnnnnnnnnnnnnnnnnnnnnnnnnnnnnnnnnnnnnnnnnnnnnnnnnnnnnnnnnnnnnnnnnnnnnnnnnnnnnnnnnnnnnnnnnnnnnnnnnnnnnnnnnnnnnnnnnnnnnnnnnnnnnnnnnnnnnnnnnnnnnnnnnnnnnnnnnnnnnnnnnnnnnnnnnnnnnnnnnnnnnnnnnnnnnnnnnnnnnnnnnnnnnnnnnnnnnnnnnnnnnnnnnnnnnnnnnnnnnnnnnnnnnnnnnnnnnnnnnnnnnnnnnnnnnnnnnnnnnnnnnnnnnnnnnnnnnnnnnnnnnnnnnnnnnnnnnnnnnnnnnnnnnnnnnnnnnnnnnnnnnnnnnnnnnnnnnnnnnnnnnnnnnnnnnnnnnnnnnnnnnnnnnnnnnnnnnnnnnnnnnnnnnnnnnnnnnnnnnnnnnnnnnnnnnnnnnnnnnnnnnnnnnngctcctgaacgggcatggcgctgttaagatgcggacgggataccgcgttcgctgcttggggaggccccgaaacgtttgcggtattgtttggaaaaatgcgatgtgctggagaaaccgctggcgatggcaacttccagtacactcagtttggtctgctggatgaggcgtcttgcgttttcgaggcgcagtttgttgctgtagcttttgggcgacatgccgaggtgtttggaaaacaggcgctccaactgccggcttgagacgccaaccgttttggcaatcacagtgggggacagagggtgttcgaggttctcgcgcatgatctcgaccgcctggaccagatgaacactcttggcaccgatttcacaggcggcggagagcgtttgtgcgttgctttgatcgcgaatgctggaacaggcgagggcggcagcggttttctgagcgcagtttgtgccctgttgcgtgccaatcacattgagaaacatgtcagccgtggcaaggccaccggcacaggtcagagatttgctgctggtgtcatagacctgttggcgcacatccagatcaggaaatgtttcctgtatcgacgttgaaatggcccaatgtgcggccacttttttgtctggcaacagacccgcttgcgcgagaatggcacagccgctgcccaatgcgcccaaagtggcaccatatcgggtggctttgcggagcaggttaagcagcttctggctagccggtgcctccatgcgattgcctccgcagaggaaaattgttgcagtaagatcaatctcttccacaccgccttccacagccagagaaaggccgctttgcgagcgtaggggcaggccgtcttcgctgagaatttgccatgtataaggcgggtttgcaccggcggcattggcctcagacagagtctctatggcgaggctcacatccgccggtgaatgggttggcagcagcagaaagacaaaccgatgtgcgggaccttggctcgcgtgcggtgcttgcaggaacggtctggtgtcatggcaagtcatggcgtgctttctgctgtgacaaagaaggcgagcttagtcgttgggccgaacccgtgcggcggtctttttggcaaaggcatcaagacgggcgcgggcgtcaggctgggtgttgaccacgccagcaatcacggcttcgcaataggcggcatccagcgcagacatgttttgcatatggctgacggcggagcagattgcgaagttggacagtggcaggttggcggcggcacggcgggcgagttccatggctttgtcaaagctggagccagacacaagatattgcatcaatcccacgtccatggcttcctgcccctgatagacacggccggtcagcatcatgtcgatcatgcgggacttgcccacgaggtccgccacacggatggtggcaccgccacccgtaaagaggccgcgttggccttctggcagcgcgaaataggtgctttcatccgccacgcggacatgagccgagctggccagttcgaggccgccaccgacaactgcgccatgcagagcggcaatgaccggcacgccgccgtattccattttgttgaaggcttcatgccagcgtaggcagacatgcatgaagtcggctgggctgcggtcttcgtcatgatgttcgataagatcgaggcccgcgcagaaatgatcgcctgccgctgccagcacaatggccttggcacccagacgtggcgccttggaaaacaactcgatcagctcttcaatggtcgctgcgtccagcgcattgcgtttggacgcgcgattgagggtggcgacccagataccatcatcctcttgatcctgggtgacagtgacattggtaaaagaaaaggcgggatggtgttgcgccatgtgatgcggcctcagttcgttaagttagaaggggtaggcgggccccgaagggcccgacctgaaataagtttttactcagtatgtacgctttgtacaccaagggcttcgcgacgactgtcacgcaaaatgcccttgatcagcgcgatgcccatcaaagccatcacaatgctgaaggggagggccccgatgaccatggctgtctggatggcacccagtccgcccatgatcagaagcgcgcccacaaccagcgccagcgccacaccccagaagatgatatgcgggcgccctttggggccttcgtcgccgcctgagttgatggtgttcacaatcagcacggcgctgtctgcggaggtgaccagataggtcagcagcaaaaccaccacgatgaccgccatgatccatgcgaaaccactggaaaggatcacatccagcatggcaaagagctgggcctgctggcctgcgccggaaatggcatcgccggcggttccgttcaaggtcagatcaatggcggtgccgcccacgattgtgaaccagaagaaacacatcacggatgggatgatgatcgcgccaagcacatattcgcgcacggtgcgtccgcgagaaatacgcgcaaggaacacgcccacaaatggggcaaaagcaatccaccaggcccagtagaagaccgaccagccaccttgccagcccgccagcgcatcgccaacctcggtgccatccggccgccacacggtgaacaacaggcttggcagggccacgatgtagtcaaacaggccgacaaacagcgctttgagaccaaagaaggcagagccgaagatcaagaagaaggccagcaggaagaagctgaggcccatgttgatgttggagagccatttgatgcctttgccgacaccggaaagcgcggacaatgtggacgcgcccatgatgatcagcagggcaaagatgatggccgatgttgtggctttaccgtcatcattgagcagccagtccccaatgccgatgcggtgcatgccagccacaaattgttctacaccaaagcccagggtctgcgccacaccaagcacggttgccaccacggccacgatgtcgatgacatgtcccaatgggccagacaggctggagccaaacaggggggacaggccggaacgaattgtcagcggcaggttgcggcgataggaaaaatagcccagcgagaggcccacgagggcatagcaagcccaggctgagaagccccaatgcaggaaggaccatttgtaggcatagcggacattgtccgccgaagagccttcagccaatccctgaatgacttcagggttgttggcaaaatggtacatcggctctgcggtagcgaaggtcagcataccaatgccaatcccggcgccaaacatcatggagaaccaggaaaaacttgaaaattccggttcatcatcaggcaggcccatacgcaaccgtccggttgagggcaggatggcaagaacgacgcagacaatgatgaaaaaggcaacaacccagatataccaactggcgaaactggccagaaggaagctgttgagtgtgctgagaacgcttgcagcattgtctggaaatgcgattgcccagatgatcagggcaccgattaagatcttggccgtgatggtcacgtccttgctgaagccatcatagaagccgccttcggctgttttgatgggcaattccattagtggtggcttttgggccatgtgttcctccctagggtatttcttattacgcgttcaaggccacgggtcttgtgcgcgttagatccagaacgtctcctctatgatggcctcccgcggcccttcaggcgtttccacaatcaacacggtgccagcctcccagtggcccgcgtcaaccattccaatggcgacattggtatcaaagtccggcgaccatgtcgcggatgtgatttgccccacgcgtacgccatcacgcgtcagtggccaaatagcgcgcgctggcgagagcggtgcgccaatgaccgatattggccggatctgacgatgaggtccagcattgcgttcctgcgacatcgcttcaatgccgatatgggcaatgtcttcggcgggcgggcagaacttgccaagaccgcattccagcggcgagttttccatgttcatgtcattgccatagctcagcaatccgccttcgatccgttcaatcagattggggcagcccgggcgtacatggagatcttgacctgcgccaaaaagggcattccaaagcggcatgccgttctcactgccttcaacgtagatctcaaagccgccctgttttgagtatcccgaacgcgccacgatgaaagaggtctctccgaaggcgagccgcttgtagcggaagaaacggatgtcataaatctcctcaccaaaaacgcgcgccatcagggtttctgcctttgggccttgtacggcaagtggggagacatcaggttcaaacacccgcacattcaatccgcgcccgactgccaatcctttgatccagagtatcaagtcgctgtctgcgatggagatccaccaacgtgtttcgctgtgcttgatcgccacaggatcattcagcattttaccgtcttcgtctgtgatcggcacataataacactgatctgactgcatcttgcgcaagttacgcggtgtcatcaactgcatcagatgtgaggcgtccggcccgttgagttcaatctgacgctctacggacacgtcccagacctgaacatgttccttgagatgacggtagtcactttccacgctgtcaaaaaccgttggcagaagcatgcggttgtagacggtgtatgacgtgacgccagcggcttcgacaccgggagtgaagggcgttgaacgcaggcggcgtgaatgagagattgtatagaccatttagagtaccatggttttggccgcatcacgcagcgcaaatttctgaatttttccggtggaagtcttgggcagttcttgaaagacgacggcctttggcgctttgaaacccgccagatgggcgcggcagaagctgataatctcctctactgttgcctcggtttcagggcgcagttcaatgaaggcacaaggggtttccccccatttctcatgtggcatggcaaccaccgccgctgcttgcaccgcagggtggcgatagagcacagcctcaatttcaacagaggagatgttttcccctcccgagatgatcacatctttcagccggtcgcggatctgcatgtagccatcgggatgcaccacggcggcgtcaccagaccagaaccatcctttgtcaaagcttttggcggtggcctccgggtctttgtagtagcctttcatgaccgtattgccgcggatgccgatttcaccctgtgtcgccccatcacgttccacgggctggcccgtggcggtatcaatcaccgagaccgcttcgaccatcggcagggcgatgccctgctgggcttgcaattcggcctgttgaccgggggcaagcgcatcccagccttcttgccagaggcatttggagatgtggccataggtttcggtcaggccgtaaacctgcatcacgtcaaagcccatggcgcgggttttttccaatacggaagggggcggtggggcacctgccgtcaacacgcgaatgggtggatcaaagcgggcactgtcgcctgtttcagcctcagccagcatctgcaacacaatcggcgctgcgccaaaatgagtcacgccatgggtgcggatggcattgaggatcagatctggtgcgggtgtgcgggtgaagaccatggtgccccccagcatggcgatcacccaagggtgcccccagccattgcagtgaaacattggcacgaccgagagatagaccggataatgcggcatttgccatgcggccaccgtgcccagcgccataagataggcgccccggtgatggtaaaccacgcctttggggcggccagaggtgccggacgtatagttcagcgcgatggcatcccattcatcctgcggccagcctgcgcctgcgtcggtttccccatgcgccagcaaagtctcgtagtcagggccgcccaatgttgccgtctgcgccgcagcggggtcggtgatctcaatcacagggatcgtgcgaccaagcagctcaaatgcttgcgacagaagaggaataagctcccgatccacgatcacaacctttgtatcggcatgatcaagaatataggcgatcgtttctggctctaaccgcgtgttgagcgtgttgatcaccgcaccggtcattggcagggcgaaatgcagctcaaacaactctggaatattggggcacagtacggagaccgtgtccccccggccaatgccctgtgccctaagccccgccgcaacggcgcgcgtgcgggtcgccatctcggcccagctgcggtgcagatcaccatagatgacggctgtgcgctgaccatgcagcgcctctgcgcggtttaaaaatgacactggcgacagcggcacaaaattggccgtggccttgtcgaacttgtcaaagttctcttgcatggtcgctcctccctaaatgaccaatgcggattttctcgatgtaccgggcttcccggttgggggtcagctttcgccgaaccccttgggaactggtagatctggaagtgactttgcccgtttttgaagactgcggccaatcacaactcggctgatctcggtcgtgccatcgacaatgcgcagcatctgactgaggcgcgacaggcgatccatgccatagggtttgagcagccccatgccgccaagaacctgtgtgcaggtgttggccgctttgacagcggcgtctggcacgaagcgtttggcatgggccgccataaccgggccctcaggtgtgccaagagcattggccgcggcccgatagagcaggcgtgaggcttccaattcggtggccacatccccaagcatccattggatgccgtccagatcaaggttcttgccgccaaacatcttgcggttcttggcataggccaaagccgtgtccagcgcggcttccatcaggccacagcatcccgaggcaatggaaacgcgggcgatgtcgatggccatcaacgagccttgcaggccctgaccaactggcaggatgatgttgtcttccgacaccaccacgtctttcatgtacatctcagagagtggcaaaaactcataggatggggtgtcatagcgcgggccaaagctcagccccgctgcatcagccgggattgcaatcatggccatgtcatggtgaccgggttcatcggtggttttcacaacggtgaaatagatgtccgcttccccagccaaagacacccaggccttcgcgccattgatcgtccatgtgccatcgtcattgatcaccgcacggctgtacatattggttgcgtccgagcctgactgcggctcagtgagggcaaagttcgcaagtttgcggccagatgtcagttcgcgggcccatgtttctttgaacgcatctgtgccatagccgcagccggcaaaggtgcagatgttgtgcatggacagagcgaaagcatatgcgccatctcccttgccaagctcttcgtaaactcggatgccgtcgcccagagacagcccctgaccgccaaggtcttctggggcgtaaaggcccgtcaaacccagcgcggccgccttgtcagacgcatcgcgcggccaaacggcggcttcgttccaagcatttacattgggtttgatcacctcatcagcgtgcttgcgtgccgcttcgagaatggtgtcgattggtgcgggcatgggctctcctcatctcatgtacgcgtcttgaagcaattggttatttcgaaaatgacgtaagtggtataaggaaaaaattacggaggagattgaaaaaatttatggcagacagtttaccaaccctgaaaggcctgcgtgcctttgaagaagcttttttacttggcagctataccgccgctgctaagcgattaaatgtgcagcagccagcaataagctatcaaatcaagcgtttagaggatgatcttggtgtcactctctttgccaaagagcgtgggcgattgatcccgactgccgcggcccatgagctgtatgagactctgtcgcatgcctttgattcaatccgacgtacatcaaacagattgcggcaaagctctgagacatctgtcttcacgattgcgacataccccggaattggcacccactggctatcttcgaagctgcccgcgct

SEQ ID NO: 3679 - DNA, 23219 bp, synthetic construct
  source 1..23219: mol_type = other DNA
  misc_feature 1..23219: note = Synthetic
cgaccagcacgatcttgtcgcgaaacaggtgaaccagatgcatcgacatcttgtattcgccgacgctcgcctcgctcacgatggcgcagttcagtttgtgggtcgcgatcatctcgaccagttcggcggagccgagcgcccagacgaaatccacccgcgagaaatcggtgatttcccgcgacagggtcgccgccttttccatgaaccgccctctgagcgacggcgttgttccgaaacgcaattccagaccgcttttacctgtgcgggactggtgatcgacggtcgcctgatccagcgttcccaggatgctttgcgcgaccttgaaccagtgttcgcccgcctgggtaagctggccgtcgtgcccgcgctggcgatagatcaactgcgcgccaagaagctcctcgaacttggcaagttgctgcgaaatcgtcggctgcgacaaaccaagcgaccgtttggctttgctgatagagccgctcaccacgatcgcgtgcaggatttcaagttggcgcagggtgatgtccacgtcggtcctcgttaggcaggagcaattcggcgtattgatttttgcaatagttaacagggagtttggtgcgtctgaaatgtttttttcgtgatcggccaccagatcgtcggccgctacgtacacgctacacccccatttcgcatacaaaagatgagaaatgggaccaatgcaatcccttgtcgtccggcaattgcggtaaatcttcggtgggcgtcgatgcatgggcaaggagcaatgcggcgactcccctgttgtggagcgcttgaaatgaacaacgccgcttcccgtgtgaccggaaaagcggcgttgcgatacgaaaacccgaagcgacgggcttttcggtcttaagcgaacatggtcagtatcttcgcactttttaacggtctaccaaagcgtcagttgcgaaggtccaatccgaacccttcggcggcgccgaggttttccatcgattgttgggtgaagctcagatcgctcacatcggcgaagtcgatcaccgcgacaccttcgaagtccggcttggcgtagatgaagttcagggttttctccaactcggccggtgccatgcagccattgatgcaccagcgcgacgcgttcagttcggcggtttgttcaaggctctcacgggtcaggtccgggcgcgcttcggcggcgatgtcgatccagcgttccgggtcggcctgcatgtcgcgcgaaacctcgatgagggcgtcggtgaaccgctggatcgcgtcgcgtttctcttcaagcgtgctttccagcccggccacgaacttcgtcagcgccggcgagcggcgcgagaactcgtcgggcgggacgatgatgtggatgctgtcgacctcgcccacggatgagtaggttccgaacgacaccgtcgtcgcatcgaccttcccggcggcgagcgcctgaattcgcacgtccggcgcaccgatcgcgacgtattcgatgttgtcgggcgacacgccgtattccgtcagaaccgcctgaccgagcgcgtggtcgagactgccgaaatccgcgatggcgaaactgcgcccttcaaggtcttcgaccgtcgccaattcggtcagcccggcgatcaggaaggacgtgccaatggagcttgcgaccacgccgcgcaccttgacgtcgttgtcggccctgagacgcagggccgtttccagcgaaatgtcggcaaggtccacggacccggaataaagcgcggcggcggcctgtggcgtgccgtcgagtttgacataggtgacatccaccccgtgccgttcgaaatagccgaggtcgtcagccagactgaagatcgaagccgtggtcgggttgaaattcgcatccacgacaccgagcgcgacactgagttcgagcatgtcgtcctgcgcaagcgcggggatcgagagggccgcgagggcggcgagggaaagcgcgggaagtcttaggtctgcaatacgtgtcatgttagtcctcgtgttgtcggccaagcggcctgtcgttttttcggcccggcgggatcaggccgccgggcgaaagatcgggatcggggcgaagtcgtcgttcaggatcgtggatgccccgtcatggcccatccatccgctgatgagcgtggagtagatgcggcggaaatccgtcgtgtatttcaggttcccgtcgtcgaggtcactcaggctcggcacgccgccatagtggccgcccgcgatgggattgccgatcatgaaggccgggcctgcggtgccgtgatcggtgccgagactggtgttttccgggacacgccgcccgaattcgctgaacgccatcagcacgatgtcgtcgccgcggcccagccgctccatgtcctgcatgaaggcggcgatgtgatccgaggagtaagaccaaagccgcgcgtgcgggtctttctggtagacatgcgtgtcgaaggcgttgttgcggtaaggcacgtaatagacgcgcgtcgggaaatcggcggcgataagggccgcgaccttttccagcccccacggggcgaggccgtaatcgacgggggtggaataggaactccacgcatcgcgcacgagctgttccgaggtggaggcgcttgccgcgatctccttgaggaaatcgagcgcaccgttgtcgttcccgtttcccctgcggtccacggcggccatgacgtcggcctcagcctcgaacatctggcgggtgaacttgttcgggtcgtcgaaaaccagcggcacatgatgttccgcgttcacggcaagcgactggtggtcgtcgacattgatgaggaaattcgggttgtggcccagcgggtcgatggcgtcggccatgcgcccgagccagccatgcgcctcgccgctgttcggggcgccggtttgccaataggccatcgaggaaaaatgcgagaacgagggctggtcatagcccacgccatgcacgatccccatcttgccgtccttatagagcctctcgaacccggtcatcgtcttttgaaagccgaagtggtcgtcgatctcgatcaggttcttctgacgaatgccaaggttcggacgcgcgttgtaatacgcgtcgtcggcataggggatcacggtgttcagcccatcgttcccgccggagagttcgacgatcacgaggatgcggtcggtgctgtcggcatcggccaccttggaccacaccggcgaggtcgagatgccccctgccccttcgagcacgaggctgtcgtagccggacgccttcagccggtccttgtcggcgcgggtcagtttcgtctgtttcgccatataggcctcccttcgggtgcgtcaggccagttggtattgcggggcgctcatgatgccatgagcggcaaggcggagcggatattcgagatagctgtccgcctcggcgagcgtttcggttcccagttcctcgttaagaagctcgacgatcgcggcgcgggccggatcgtccagcggcacgcgcaggaaacggtcggacaacgcatcgaccgcgtcggacgtggtcttggcgtcggcgtcgcgcaccatctcggacaggctgaactgggccggggaccgggggatcggcttgacccgccgcatcgcctgctgccagccctgaaggctcgcgtaacgggtgttgaacgcttcctgaatgccctgggccatgctgtccgaggccccctcttccagcgtggccgccgtgatctccatgcccgcgttgatgttgttgttcacccgccgcacttcgccgcccgggttcaggttcgggtcgacgaaatttatcatgtcggggaacagcaccgattgcgcgaagttgcctcgctcgaacagaagccccggcgtgatccatgcgcgcccctcgccccagccggccacggtcggcggatagagcaggatctgacccagcgtcttgccgaccgtgtaggggtcgggcacgccgggcagcgcgtcgaggcccagtttgcgataggtcgagataagcagttcggtgggcgacttgatatggttcgcgaccgaggccggactgtagaaatcctgcgacaggaacagggtgcgcaggaacggtttcaacgcgtaatcatgcttgcgcagaagcgcgccaaggtccgccgccatcgcgggcgaaagatcgtcgcgcacgaagaacctgtaaatcttgctcgcgatgtaaagcgcggtctggtcctgatccagaatgatcctgagaatgtcgtcgccgtcgaaattgccggtctggcccagaaaacgcttttcgccgtcgtcgtgcttgtccgggtcgatcacgaacgtcaggtcgtcgttgccccagccggtgaatgcgcgggcggcctcacgaatgtcggcctcggtgtagttgcccacacccatcgtgaacagctccatcacctcgcgcccgaaattctcgttgggcgcacctttcacgttgtgcgaggcgtcgaggaacacgagcatcgccgggtctttagacacggcggtaagaaggtcgctgaaattgccgagactgccgtttcgcagggtgtcgagttgcagttggatcttgcggtaatcgcgcagcttttcctcgctcgtggcgaagtggccgtgccagaagagcgtcatcttttcctgaagcggatgcgggctgcgcaccatccggtccaaccaccagaagcccaggcgccgagtctcaagcacggtcgcgcgcagccagtagaagaaccggtcggtcaccggctgaagcggtcgcgcgccggaaggtttgacgcgaacccccatcgcctcgccggtgcgttcggccagttcggtggccgccgggcggctgggcggaaaatccttcagcgtcgcgtcccagaccccagagtgctcgaacggcgggagggacgaggtatcgccgcctgcgagcatgaaatcgacagcagcttcgggggtcatggccgccagatgcgcgatctcgtccggcgtgccgccaaacccggcacgttccagtaggtgtccggcgaattcacgggtccagacgtcgccattgatcggatcgagcgatccggaagcgagcgttgccattgttttcctcccaccgccaacggaatcggcggtgctgtcagctaaacgcgtcaggcgcctttcagcaccctataaaaacgatttggttttcctatatgcctttggtcgtacccggatcgaaggcataggcgagctcctcgagctccgccccgtcacgcgacatggcgtgaatccggttccaaagatcggcccgaagcgccgcgaaacgcgggtccgcccgcggatcggtttcccagcgcggctcgggcaagtcgaccgtcagcgtcgtttcgatcgcccccggtcgcggtctgagcaggacgatccgttgtgacagaaagatcgcttcgtcgatgtcatgggtgacaaagacgatcgcggtgccgcgccgcgcccagagtttcaaaagctcggcgcgcagcgtctcgcgcgtcatggcgtcgagggccgcgaagggttcgtccatcaagagcacgtcgggctcgacggcaagcgcgcgggccagaccgacccgttgctgcatcccgccggacagttcgtgcggaaaagcctcggcgaagtcacgcagacccacggcaccgagaagccccaacgaacgctcgcgccgcgccgtgcgggacaggccccgtagcgccagaacgaactcgatattgccaagcacgctgcgccacggcagcaggcgcgcggactggaacaccatggcaagatcggaattcggcgtcggcgcctccccccgcaccagaaccgtgccggtatcgggctggagcaagccgttcatcagccgaagcagcgtggtcttgccgcaacccgagggtccgacgaggcttacgaattccctcggcgcgatgtcgagggttatgtcctcgagcgcgacgaccctgccgtccttgaaccatttgccgacattgcggagcgagatgagcggtgcggtcatggtcagtggtcttcggacatcgaaacccgccagcgccccagccggcgttcggcgtatcgcagcgacgcggtgatcgcggtgccgagcgccatgagcacgaagaccaccgcgaaatacttgtccatctggaaccggttcccggcggctaccagcagcccgcccagaccggactgcgccatggtcagttcggcgatgaccgtgccgacggtcgagatcgcggccccgatgcgaagcccgctcaggattgagggcaaggcatccggcaccatcacctgccagaacagcgaccaccgccccgcaccgaaggattgcgccatctcggtcagatcccggttcgccgacgcgattcccgccgccgtgttgatgaggatcggaaacagcgcggcattccagacgacgacgatcttggcctcggtgtacaggccgaaccagacgatgatgagcgggatgaaggccgccccgggtgtcgagttcatcgcgttcacgaacgggtcgaacacgcgccctgcgaacggcaggccgccaaggaaaatcccgatcccgatccccgtgaccgccgcaagcaaatagcccagcacgagcaccgtcagagattgcccgagcgcgcgcgggatcgtcccgtcgagggtcatgccgacgccttcgcgcaccacgtccacgggacttggcatcaccagcttgcccgcgaccgcgttcagcacttccatcgacacgagaaggagcagcgtaatcccgatccaggacgaccacaggagaacgcgcttgcgggtgcgggccttcgccgcgcgtgccgtactgtcgtgaatgggacgggccgtttcggtattcgagtcgctcaaatcgaccatcctcgcgtggcacatttcccaagccggttcagggttctgttcggcttggcatgtgggcgggaatgtttcgcatctgcgagtcaaagtccagttcgacgcgttcggcggggcttcgaccgcacggcggagggctttgatcggatggaggttgtggttttcacggggccgacggcgaggtgggtgtgaggcgagtatttgagcggttttagggcaggtgtgaccagcgcacccgagaacgtagtgcaccggcaaacaatgcgacgcgcgagagggacagggtcggcgcgaagaacccgtactccagattgcctcccgacatgctcgcgcgccaagccacgttttcagcctaggtccacgtgggaagcccccgccccctcgctcgtcgctcaccggatgcccggcaccaacgcgccgttcgcccaaggcggcaaggtttttccgagcgcggacagaaacgccttgtaacccttatgttcccttggctatacgcgtcggcggagacgtggccgagtggtcgaaggcgctcccctgctaagggagtaggcgggaaaccgtctcgagggttcgaatcccttcgtctccgccacctttcatcgctaacttccagccctaatgcactgtttttgaagtgaaaataggcaacttccctgtctcagcttagtcgccccagccgattttgctatacaaatcgctatacgttttgctctacattgcgcgcgcgaaggtgaggtaacaatggcgatcaaaacccgtggaaagaagctctccctctacagaagggttccaaaaaggtatgaatcggtcgagccgcgcaagttcatctggctgtctttgcacacagacagcatgtcacaggccgaggcgaaagcaggtccggcttgggagcagttggtggccgggtgggaggcgaagctggccggtgacacatccgacgcagaacagcgttttgaggcggctcgtgaactcgcggaggcgcgcggcttccgctatatgcgcgtggaaaaggtcgcccaactgcccatggacgagctactagatcggatcgaggcggtcccggtcaaaaaaggcaagccagacctaatagaggcggccgcgcttctcggtggcgcgaaggaatccgagatcactgtcacacgcgccctgaagctctactggaatctggcgcgagagaagaccctcggcaagagcgctgaccaggttcgcaagtgggagaaccctcggaagaaggccatcaagacgtttatcactgtcgtgggcgataagcccatatccgagatcacaggcgatgacatgctcgattttcgcgcctggtggctggacaggatcgagaacgagggtctgtcccccggcagcgccaacaaggacctcattcatctcggagaggttctgaaaaccgtgaacaagatgaagcgcttgaacctggttctccccctgtccgatctcagcttcaaagaaggcgaagccgtcccgcggccgccattttcggacgcctggatcagagacaagatcatggagcccggcgccttggacgggttgaacgaggacgcacgtttcattctgctggcaatgatcaacaccggcgctcgaccgagcgagctggcagctctatcagcccctcagatatgccttgacggcgacgtgccgcacatttccatcgagccagtggtgcgccagctcaagagtgccaacgcgcggcgcgtgatcccgctgtgcggcataagcctgacggccatgcgcgcccgtccggagggcttcccgcgctattgggacagctctgccagtctttcagccaccgtgaacaaattccttcgggcaaatggtctcatggagacaccgaaacactcgttatatgggctgagacacagtttcgaagaccgaatgctcgccgccggcgtcgatgagcgaattcgacgcgacctgatgggccatgcgctcgatcgcgagcgctacggcaaaggcgcaagcttgacacacttgcattcgatcattcagccgacggccttgtaatctcgggctgcgatctgggcgcgccggaagacatcttcctggtctttcaacgcaatgatctcgcgctcgatcctttgaaagatcggcacgtaggcgcggtcgtgcgtgaccaacacagccaccttggcataggcagcttttagcctgtcgagatcggtgttcatactaaggctatagcgatcgcgatgacgcattcgcttgaagtgggtaaataatcccgagtgtcgcttttgcgcaacacccctaatcagccgcctcgcgaaaacccgaagccaaattcgtcagtaacggtcgaaactcatcgcaaacaatcgacggcgtcgtcggtcggcccgaaataatcgatgcagtcccgcatgtcctctatggcagaaagtgcatcgtcgcgctgctgcgtgacgaaaaggagatccgaccgcgcgtttgagagggcgcctcgcgcatcatctaggtcatccactgtcgatcggaaagcatcccgcatctcctgactgtcctcgagcagatcattgtagtcgtccaccagcgcgttgaagcgcgactgaagcccatcgtattcgtccgcgcactcggtcaggttcgatttgcaggtgaacccttcgtagttgcattggtagctgctgaaacaggcggcatcctggctcacgcacttgccctggctcgaacacacagtatcgccgtaacccaagcacgcggcgcgatcaccgtatgagcaggagaaggtctgctgcgcgtgggcgtggccgggggctatggagagggcgagtgccatcagcaggtgcttcatgtgggcaggtccagcttcggcagcgcgcttacgatcttcatcgtctccaggctcaccgtgatgacgcgctggaacagctcgaatgggtaagcgcggttgttcatggtctcgttggcttcgttgacgacgccgtcggcctcgcgaagagaaggacggcagcttgagccccgaattgtgtgaacccaaaaaacggaaattcgcaggggtcaagacagttatcctgcatttccgcaactaacgtttaaactcagaccaattacctttttgaaaagtattacgcgccccgtagggcgcgtaaaaatgtggtgctacttcgagcttgttaacggctcgaccgcgaattctgaacatcctaatgataacgtcctgtcgcactaattcaagttgatttctgaaaggagagcgggaagtctctatcggactggaggaagggtatttcgtatgcgcctcggcttggatattggcacgaattcgattggatggtggctatatgcgaccgcagggacaggagcttctgcgcgtatcgtcgcggtgatcgatgggggcgtgcgcattttcgcggatggccgagacccaaagtcgaaggcatcgttagcagtggacagacgagtggcacgcgcaatgcggcggcggcgtgatcgttatcttcggcgccgaactacgcttatgaaggtgctcgttgatgccggactgatgcccagcgatccggcagctgcaaaggcgctggaaacgcttgacccctatgagcttcgcgcgaccggtctcgacgtaatgctcccactcacgcatctcggccgagctgtgtttcatttgaaccaacgccggggcttcaagtcgaaccgcaaaacggatcgcggtgacaatgagagtggtaaaatcaaggatgcgaccaagcgactgacctgggcgatgcaggaggcgggcgcgaggacttatggtgagttccttcatatgcgtcgcgcgcgcgcatctgatccgcgtcaagttccgtccgtgcgcacacgcctttctgtagccagtcgaggtgggcccgactcgaaagaggaagccggctacgacttctaccccgagcgcgcgcaccttgaggatgaattccacgcgctctggtccgcgcaggccgcgtttcaccccgatctcacgtgcgaactccgcgacgtggtgttcgagaagattttctaccagcgacctctgaaagaaccaaaggtcggcctgtgcctattcaccgcagaagagcgcttgccgaaagcgcatccattgacaggccgacgtgtgctctatgagacggttaaccaacttcgtgtcacggcggacggtcgcaccacccgaccgctgacgctcgaagagcgcgacatgatcgtttatgcgctcgacaacaaaaaacctgtgaagagcttgtcgtctatgcacctcaagctcgtggcgttgggtaagttggtcaaactcaaggacggggagaggttcacgctggaaagcggtgtgcgcgacgcgatcgcctgtgatccgatccgcgcgacgatggggcacccggacgggttcggaccggcgtggtccaggctggactggcaggcgcagtgggcgctcatcgaaaaactgcgccaagtgcagtcggatgatgacttcgcatctttagtcgcttggctgggtgcgacacacaacctctccgaagaccacgcgaaacgcgtcgccaacctccatttgcccgaagggtatgggcgattgggcctcaccgcgaccgaggcgatcctgtgcaacctgaaggcggaggtttgcacgtattcgcaggcggttgagcgatggggtaaacaccactcaaaccagcgcacgggcgaatgtctggaggcgttgccgtattacggtgaagtgctggaccgccacgtcattccgggcacttacaacgaggacgacgatgacgtcacgcgctacgggcgcatcactaatccgacggttcacatcggcctgaaccagcttcgtcgccttgttaacaggatcattgcgacttatggcaaacccgaccagatcgtcgtcgagcttgcgcgcgagttgaagcaatccgaagcccagaaatccgaagccttgaaaaagatccgcgatacgacggccgacgccattcggcggggtcggcaactcgaagagatcgggcagaaaaacaccggcgcaaaccgcctgcttcttcgactttgggaggatctcggcccggccgtcggtccgcggtgctgtccttacaccggcaagccgatcagtgtgacgatgctctttgacggcgcctgcgacgtcgatcacatcctgccgtattcccgcacgctcgacgacagtttcgccaatcgcacgatctgtctgcgggaagccaaccggcagaagggcgaccggacgccgtgggaggcatggggcggcagcgaccaatgggacgccatcgaggccaacctcaaggacctgcccgagaacaaacgaaagcggttcgcgcccgatgcgatggagcggttcgagggtgagagggacttccttgaccgggccctggtcgatacgcagtatctcgcgcgcatttcgcgcgcatatctcgatacgctcttcaccgaaggcgggcacgtttgggtcgtgccgggtcgcatgacggaaatgctgcggcgacattggggcctgaacgcgcttctgtccgacaaggaccgtggcgctggtaaggtcaagaaccggacggaccaccgccaccatgcgatcgacgcggccgtcattgccgccaccgaccacagcttggtcaaccggatcagcaaagcggccgggcagggcgagagcgcaggccagtcagcagaattgattgcgcgtgacacgccggaaccgtgggaggggttcaggaatgacatttcagcgcagatcgcgcgcattgtcgttagtcaccgcgcagatcacggccggatcgatgtcgagggccgcaaacacgggaaagacagcaccgcggggcggcttcataacgacacggcctacgggatcgtggatgaccatacggtggtgagccgaacgccccttttgtctctgaagcccggcgacatcgaggttacaacaaagggaaaaaacatccgcgacacgcagctgcaaaaggcgctgtccgtcgcaacaacagggaaagatggcaaaggctttgaggaggcacttcgcaatttcgcagagaaggaaggcccttatcagggcattcgccgtgttcgtctcatagagacacttcaaagctcggcgcgtgtcgaagtcggctctgatgaggacggtcaaccgttgaaagcttataaaggcgacagcaaccactgctacgacctttggaagttacctgatggcaaagtcgtgccgcatgtcgtctcgacctacgaagcgcacgctggaacggacaagcgcccgcatccggcggcgaagcgcattctgagagttttcaagaaagacatggtcgcaatcgagcaggacgatcaaactgctattttttatgttcagaagctcgaccgcgccaacgggttgttcttggcccctcatttagaagccaatgcggacgctcggcatcgcaacccgaatgacgctttcaagttcctgcaaatgggcgcagggtcggttgtcagaaacaagttgcgccgcgtttatgtcgatgaaattggacgcatcaaggaccccggcccgccgaaacactgatcggagtcgtgcgaatcggtaaattctgccacgcttccaacaatttggagcgagaatttggaccgtatcattgatatcgccacggacgggcgtcacctgtcccgtgtccgtggttttcttctggttgagcaagatggtgccgaagtcgggcgcgttccgctggacgaaatagccgccatcctgctccatgcacatggcatcacgctgtcggggtctcttctggcagaactcggggatcgaggctgcccagtcgtcgtctgcggcgccaatcatgcgccgcggtccgtcctgcttccgcttgagggtcaccatgcacagggcggacgtatgcgcgcgcagttccagtccaaggcgcccctttcgaaacaggcatggaagcggatcgtgacctcgaagattgcgatgcaagccgccgtgctcgacgcctttggccaccccgcagcgccacttgggatgatgatccgttcagtcgtcagtggcgacgccggaaatgtcgaagcccaagccgctcgctattactggcccgtcctaatggggagcgatttccgtcgtgaccggaatgccccggacatgaacgccctcctgaactacggctacacggtgctgcgcgcgactgcgtcacgtgcagtcgtcgctgcgggccttcatccctcgatcggtctccaccattcaaatcgctcaaatgctttcgcactttctgatgaccttatggagccgtttcgaccgcttgttgatgcggctgtctgggggcttgtgaaacgcaatggcgatcatgtcgataccgtggcgaagcagacattggcgcggattattgcgttcgatcttcccttgggggaggggcagacgcctgtatctgtggcattgtcaaaactcgccacgtctcttggccagagttttgaagcgggcaagctgtctttgttgttacccgcgccgccggatgcgctcactttaaggagcgcgggattgtgaccgaaacacaaactcatttatcggggtataggatcatgtggatactggtaatgtttgatctccccacggacacaaaaccgcagcgaaaagcagcaacggggttccgaaattttctcttggactaggggttcgagcgaagccagttctctgtctacgcgcggttcgtaaatgggaaggaagcgttccagacacgcgtcagtcgtatagcaagaaacttacccgataatggcgatgtccaaatcctgaatttcacggaccgccagtatcgtgacatagttcacttttcggatcagggtcgaagacgtgcccgcaaaaatcctgagcagttggtgttgttttgaccgaagggtaaggaaaatgtatcttagcaccctcccaaaaccctgcgattacaggatcttgagagggtatcaagcgtagcagttcagaattcgaggtccagccgcaacaacttgctacgcccatggatcaggaggggcagcgtagcagttcagaattcgaggtccagccgcaactgaccttcgccacacattcgcgtcgtggtagcgtagcagttcagaattcgaggtccagccgcaaccgccgggtcaaacgattgacattgacggcagcgtagcagttcagaattcgaggtccagccgcaaccacaccagagaaggagacgagcgatgggtgagcgtagcagttcagaattcgaggtccagccgcaactggtgaggcgagccagccccacgaataaaaagcgtagcagttcagaattcgaggtccagccgcaacagttgctgccgcacctcgtcctgagttgcgagcgtagcagttcagaattcgaggtccagccgcaaccggccagttgatagggatagccagttcaacagcgtagcagttcagaattcgaggtccagccgcaacccacagcaggagtgagagacatgttagcagagcgtagcagttcagaattcgaggtccagccgcaacaccagagaacacctgacacgatgcccaagagcgtagcagttcagaattcgaggtccagccgcaacccagaaaggcggttatgtgcgcgggtctgagcgtagcagttcagaattcgaggttgtaacctgccacagttccccaacgacccctcgctataaagaagacatgcagcacacgctgcgcgatatcagcgaggaagaacatgaccacgaaaccgcacgagcacacccaacttgcaaaatttgtcgagcgccgggttctcgaactgaaatccaagaagacgcaggccgacatcgcggcacaggctggatacgtgaaccagaacatgatcacgatgatcaagcagggccgctcaaaggtcgcacttgatcgcatcccggcgctcgctggggctctcgaatgcgatgcggcctacctcatgcgtctcgcgctcgaacaggcgatcggcggcacggcggcggccacgctcatcgaggtgttcggcgaccccgtgacggcgaacgaacaggcgtggttgcgtgaaatccgtgccgcctctggacatacagacccgaggctcaccgcgcgctcacaggcgagcatccgcactatcttcgggaagtgacatcatggaaaagcgtgaaaatgaggacctgacaccgaacgagcgcgattggcttcgtttcttgcgcgacatatcgaacggtcgggatgtcgccatcactttgcgcagggtgcaggtgctcaggcgggtgtgcgagagaaagcgggcatagatgccgttaaccgggtaagcgggctaggatggatcgcggggcttattaggttccacatatgagtgcgacttggccccgccgcgcgcctaccgtgacgaggctgccacttctacactgaaagcccggcgtcctttcggcggacgcggccgccgtccgaaatccgacttgccttaacctagccgcgccacgatgcccgccaactccgactgcttggaaatcccgagcttgtcgtagacagtctttagcgtcgagcgggctgtgttttcggaaacgccaatgagctctccgctttcgcgtgccgaccgccccgaggccatagtggccgctagccgcgcttcagctggtgtcaggccaaggacttgaagcaatgctgcggcctcaggtgaagatcctgttgacgggtccgaaaacaagatcagaacagcgggttcgccggccagcacgctggaaacgggaagagctcgggctaggatcggaagcgcaccttcggggcgttcgatggcgatcggttccgacacgaggcggtggctcgtttccaaggccgaaacggcgccgtcaagcgcctgttggtcacgtcggcgccagaccaacagcttgccaccgatcttcgcagaggtaagtatcctttgcgcttcgggcgtcaagaacagcgtgcgaccgtggtggttcaccaaggcggcgggatgccctatcctagaaagaagatccatcaagcctacctggtgggcgcgggccgagtaatccgccgtctcccccgcgaaatagcggctaggtgcggaaaaggtcattggcatttgttcaatcaacatcgcccagacgacttcgcttggttgtagggatttcatgagtgctgacgcggcgtttccgattgagaattcgcggacggtggaaggcacgaaacggcccgtaaacgcgattgagaaaatgttcagtccgttgttctctgcttcgccaatataatagtgaatgccggattgcgggggcaatatctctgcgtaatgcggttcaaggacaatcgaagcttccagcccggtttgggtgtcaagggtcgctcgaacgaaggccccgtcaggcaccacatcagtggtgccccgtcgagcgcgtcgattgtagtctttgaagatgatcctttgacctgggccgccaaggacatgttctgaaaagaacaccgtcggcgacccgtcgggcgattgcggccctttgaccgaaatgccaaaaaaagtgccgcgaaggggcgcaagtccccatccctcgggagccacatacattccgacaaccccgctgaaatcatccagcggttccagcgcttctggcaaagccgcgcgcgtcgcttcaggttcgaatcgaacgccgagatagaaaaatcgctctgttttgaccatatagggtggggccggcgtatcgccgtcgtctgtgttcggctttcccagaaaagtggacgcgatcaagttgcttgttgatgtctttccatccgtgctcatggcctcatcccaacctcgccacgatgcccgcgagctcagtctgcttcgagatcccgagcttgtcgtaaacgaccttcagagtggagcgcgctgtgttgtttgtgaccccgaggtagtcggcgcagtcccctacggatcgccccgcaccgatccccgcggccaggcgagcctcggcgggggtgaggcccaacacctgcaagaccttgtcggcttcttcggacacgcgtgcatcgggttccgtgaagaggacgaggaaagcgggttcacctgccatcgccctggacactggcaatgcacgggcgacaatgggcaccgtcgaatccgggcgcacgagggctacaatgtccgagacgagcgatccggcctgccctgcccgaacaatctcggcatcaaggtgccgctgatcctctttgcgccaggtgatgagccgaccaccaacctgcggcatggccagcatcgatcttgccctttcattgagaaacaagagccggccgtcccgcgaaactaaggctgctgccagcccgatacggctaatgatgtccatcaggccaagttgatgggcctcggtgtccggtgcgccggcggtcgggtcgaacgggtgtggctcactgatagcgagtggtccactggggccgtagttcacgaaggggaagccggtgggcttcagcattttcaacatgtccgacgcagccggaagcacctcgtagtcgatgagctcggcgggtgcgaaccgcccggtataggtgacgtagaagtgggcgaggccgccctcgggagcgtccgaaatatagtgatggatgccggagacgggatcggggaagtcctcggttgtccgtctcatggtcaatcgcacttccggttcgtcgcgaccggcctctccataccaagtgaggccttcgttccactggttgcagtatccgatctgcatgcgcctgttgtagtggcgcctgaacaagcgggcgggctgcccggagtagtagttgaacgcccggaagagcctaggtgtcccgtccgcagaggccgcgttcttgacgtcgagcgcgatgtagaccagcgaatagggttctagcccccaacccccggttgacgtcgtcatcccgatgaagcctgtgttctcgtccgagatctcaagttcctcaggcaccgccgccctgaccgcatcgcgctcgaactctgcgcggatgaacagaaagtcccggacgttgatctgatatggcggcggaggatcatcgccgaacgacttgataccatggatggcatggatcgggttcacaccctgcgtgacgtcgctgtccatgtttcttgccccctgaacagatcatgacggtcgactgatacggcgcggatcttcgaaggaagccgctgtcaccgatacacagcacggggcggcaccatagggaaggaaccggcccggttgtcgagatcatgtcacgccgtcgtgggcgttcagcgcgcggcggggtggttgaccctcattatccctgaaaatggactatctggtccagaactttcgaaaagctccgcataggctcgaccaaagagccggcgcggccacgctgaatggaccggaaaagggccggccctgaaaatgactttcgacggaaaaacctgcctcggcaccccccaaacgtggggtgtgggactcgagtcgttctggaaacctgaagtcacagcctgagacggaacagacctccaggcacctcaacgcagaaccgaaacctgccccagacctcgaaaggacaagaccatgatccgcattgccaccctcaccgccgccctcgtcgtcgccactgccgccaccgcggaagatcgcgccaccgccccttacccgtcgccctcgaccgaggtgatgcagggcacggttccttacgccccgctgacggccaaacaactcgccgagaagaagcgccttcacctgctcgcgcaggccggaaccaccatcccgagcggcttctacctgcccgtcccaacggcggctcagcccatgcacatccccagcggcggctacctgcccatcccggttccgaccggaacgcacaaaaaacgtggcatgagctcctgagacctcactgtatcgggccggcgctgatccgtctctcacgatgtaatgcccaccggcgcccacccagaccgccccgcagaccggggcggtcatgcattttgcctgttgttggtcggacgacggtcacccactccgttgccagacacagggcgctcaacccgaccggcatcgttcccctcggaccggaccacctgctgggctgggggcgtcgatggccaatcgggttcaggagcctggcgcgcgtggggcgcgccagtcccgccagacgcttattactcggacggcgaaggcccccacgacgccggccgcagccgtccagccgtcagctaggccgagcgcaccgccagccaccacgatcgccgcgccgaccatggcggcgagcgcatagacttcttcgcgcaagacacgcgggatctcggcgacaaacaggtctcgcaccgcaccaccgccgacagccgtgagaacaccgagcaggatggccggcaatgggtcgagaccgaacacgagcgatttatggcaaccgctgaccgcgaagactccgagtccgagcgcatccagcaccatcacgggcttgttcagtcgatccagcaggcggtgcccgaagaacacgcagactcctgctgcaagggaggtgagaaggtagcgcggatcctccaacgctgtagggggcgtcgcgccaagaagcatatccctgatcatgcctcctgcgagaccggctgcgacagagagaaccgcgattccgaatatgtcgaggccacggcggaccgccacaagcgcgccactgatgccaaatacaaaagtgccgagtagatcgagccagaatgcaaggggtagtgattccatgtggataccgtggctacatgcccaatgcgcatctcgtgggccgctgatggcgaatggcgagtgagggtgaaattccgaaaggccctgacgtccgtagcagacaacgggacataccccaagctacacgtcggtcgcgtgaacatcgacctccacggacacggtggcggtaattccgtcacctacgaaaagggtcgcggctccaccggagcggagggcggaatccttgccgacttcgacggtgaacacggctggttctggcgcaaccgcgacagcgtgccggtcacggtgaccgtgctggtcaaaggcgagtgtgccgagttcaaggacgcaagctagaggagacgggctgccgttcgtcgacattgcggcggacggcggcgaccacctcatatttgtgaccaagaccggcaaccagcatttcgattgtgccccgtttcggtcgggccaggaatggctgggtcaatccgccgcgccggatccctttctttctggagaggaagttcgctgcggacagcctcgtgcgcgacatagcagacgagctcctcaagttggaagatcttctcgaatgccacctcaagcgtattctgccgccatccgggccaccgtcccatacattgaaaaggccaaagattctcgggtgcggaccgacttcgcgccagcccccccggcgcgatgctgcgtcagagacgctctgcgcgcgccctgggcgcgccatcataggcccggagtcctttggcgcctgcaatggccctggtgcgcctggcgggcagcgcagcgcctctgacagcacacacctaattgtccgtgaaactggccatccggatctggtggcccggtttaagcgctagtgcatgtccggctggttggaccccgatcgagtgaacggccctcggcgtgggttcatcgctttccactaaaaccggactagtccatgaggcacggagatgagctaggtcgaagtcctataaatttttgatacgcgcgagggggatcgtttccggcgccgacgtcaaaggcggcaccgaacctcccatccacccgacgccgtagcaaccggctgtaatggtttcatccccgcgtcaggaatgacgatcaaagatgcgcgggtcgttgaggcgactaggctcgaaaaggcgggaatgggctggtctcggtcgcgccgatcagctcgtcgacgagcttgtggatcagcgtggtgcgcaggacagtgtgatcggggtcgccccaaaagttccgggtttcgtcggggtctgtgacccgttcgtatagctctccccaatcctcgccctcgtagaccgtcatccgatgatcgggggttagaagagtgcgcgagttcgccggccggtcggtgaagtaaggcttgggataggcgttgtcctcaaactccatgagaagttcttcgcgtctctcaccgctccagaggctacgaccctgaatgccatggtaaggcgcaacgccagcacgttcgaggagcgccggtgcgatatcgatggaggaggcgagccggtcgtccgtagtgcccccgtcgcgttccgggtctcgccagatgaagggcacccggtaggtcgaattatggatgtagggacccttcagcagcatcgagaacgtgccgaggaagtcgccatgatccgcgttgaacacgacaaccgtattgtcccactggccattcgctttcagtcggtcgatcagtttgccaacctgatcatcgatcagggcaatcatcccggcagttagggccatcgcttccttcaggtgccgttcggtcgccatgaagttttcctgcccggccgtgaactggctcccatcgacaaacttctcgcgcagcgcttttaggaccgggtttggggtctcatgtgcttcgaatggcagttcaacctcgaaatcgtcagggtcatacatatcccaatagcgacccggcggattgaatgggtggtgagggtccggaaagctgacgagcgcgaagaaaggcgtgctggcgtcctgggcatccagaaactcgcaccctcgcatcccgatgtagctcgaggggtagagttccaccggcagtggcgtgcggtaggcctgggggcaggaataattgtgcggcaactggttttcgcggtcgcgtagcgcctgccagtcgtccgggcggctggtcttaagccattgcagatagtgaccgttcgggcggtcgccgtggtcggacgtgaagtcgacgtgatcgaagccgtaataagggcgcggcaccacgatctcgtccgccgtcaggttctcgggcgattccacgtcatagcggttcgcatccttcaccgcctcggaaatcggcccggtcacgggctgcgaccccttcttctgcggatggcccgtcatgcgttgaaggtggctcttgccgatcagtgccgtggcatagccggaggcccgaagcgcctcgacgaaggtgctttgcgaatagggcaggctcaatccattgtggcgcaggccatgaaccgacggatagcgcccggtcaggatcgaggcgcggttcggctgacacacgggggtcgccacgttgaagtcggtgaaccgggtgccctgcgcggcgagcgcgtcgatgttcggggtctttacgacagggtgcccggcgacgcccagccagtccgcgcgcatctgatcgaccatgatgacaaggatgttcgggcggtcggtcatgcggtctgttccttttgcgcgcgaaggtaatgctgccccacgatccccagcgccccggcaaaggccaccagatgcacggcaggcagcggcgcgatcagcagaagcgcaagccccacccgcagaagcacttcgaccgggtgcaggcggtggcggtcgaaccggctcatcgcgctggcgaacaggtagatcatggcgagcgtgcgaaagatcgcggacaggaacccgatcatcgagaaggccgcgccatc

SEQ ID NO: 3680 - DNA, 23216 bp, synthetic construct
  source 1..23216: mol_type = other DNA
  misc_feature 1..23216: note = Synthetic
agatcaccgtgttgatgttggtccctgcttcagcaaagctctctgctggcaaatccgcaaacataccccagcgcccgccaccgttcgctttctctgcccaccgacgaaactggagatgcgcgttggtctcgcccacttgcgcagaagcaggaaggatcgcgaccagctgaccttcgggcgcgaggaaatcataggcatggcggacatggtccatccaatgcgtgccgtagaacggcgggttcatcaccaccgcatgaaacttcgaactggcgggcaggttgaggaaattcccctcgatcacatcgcagttgggaccctcaagacctcggagcttcgcaacccggtcagcttggatttctaccgcagtgacctggtagcccttggtgaggagcgggcggaccagatgcccctcgccgccgctgggttccagaacgcgcatgccatcccggaaggagattgcatcaactaccgccgctgcggccgcagccggcgtgtgatagaactgcaggtcccggctcggcagggtcgtgcgtgtccgaaacgtcgcggcgtcctcgcccttctcggcggcgtcgggaaggactgcgccatagtagtgggcgagtatgcggttggccttctcgaccaggtcatcgcgcgcaaaccagagatgggcgttgccattcttgaagccccgaatgcggaagtaagtgctttcggtgatcgactgctgcggaccatatccggggcggcaggcgtcgatctcctgaatgaggccccgaccggcgggggtctggtcatccagtttggcaaagacccgttccacgtcgatgatggtctcttcggcccatgtccggttgaagctgcccgaatattcggagaaggcccggtcaatgattatgcgcgacccgagtttgaaagcgtcgtggctcttgaaccggcgatcaaggcgcgagaaggcaacggccagcccccgcgcgaagatcagatcagcgctgcccatgagcgtttcaaatgtggcccgcaggttctcgacggtgacctccggcacctcctcccgcaagcttctgtcgaaatcccgcgctgcagtcgtatccatcatgtcccgaatgccggtgtcttcgtagagataggtccaaacggacgcatccagctggcggcggaaggtctcgacggattgggccgcgtcgaagccatccgggaacatgatcgaatagtgtttgctgccggtccggtccaagcccctgtatttccggccgtgctgggccttcttggcgaaggcagcggcttccttggacagcccataggcgaggtccaacgtcgcgaccgcttcctgaatcttggccaaggcggcatcccgcgcggcgacaatgtcttcgatgcgcgacgtgagggcgggaagcggggcggcctgcgctgcctcctcttcgaggatttccgcaaggcagttcatcgctggccctccgcactagccggaggcgcgatgaaggcaaagccgccgccattgccttcggggtcgcgggacaggcacatttccagggttgtgccgtctgcggtgaccagtacaaatgtcggccaagggtcgtcgccgtagtcgtcgggctccagacggaagcccgtgatcttgctgccgaacagttgcgaataatatgcgctgacatcgatcatgcggccttctcctcaaggtaggtggaatatcccttgcggtcgcatagggcgaagttcagcccgcgcttgtcggcaaggtgacgaagatcgccaaggaggtttgccaggaggaaacccacatcggccgcatcgtcgggatagagctgctgcaccgcccggaacacacgatccgcttgaatgtcaggaacgttgtcgggcggagcatctgccgccccatccgtctgttgagaagcatccgaggcgcgatcaatcgcaacctcgatcaaactggtttcgcagccgcagtcgtcgcagaaagaccctttgtcgaagaggtctgccagttcccaaagctgcaactcctcgttccactcggcaaaggcatcgcgcttgacgttcgtccctccgcaagtttcgcagcacacccgcaagggcccatctagttcgacggcctcaaagggaagggcgggctggctatgcaaggcggcgctgatggcctcatgcatcttttgccaggtctcgcgcgacatgccttcccaaccgctgacggcttcgccccgctctgtccgatagaggaaggatcggtgggtggcttcatcgccaaaccgcgcgttgagggcctcgaccacgcggacggcaaggctttccgtcagaagatcggtcaaccagacctcgggaaaggtgccggtcatgacgatgtgaaaatgggtctgagtcatgatccaccccctcacatcgacagcgcgcggtgcgcatggctgtcttcgtagcggatgatcggctcgccggttgcggtcgtcccaccccagcaagggcctgcgtatcccgacaaccggggatggccctgcaattccgggcgctggcgcgggttgacgttgatcccgacaatctcggtgtccatcgcctcggcaaactcggcaacatcgtcggagtagacggtcaccagaccgtcgtcggtggacagaacaaattcgtaagcagccatttgtggcctctcctctgtatcgcccaagattgggcatgtctggcaagcgagccgcgccttggcgcgtgtctctcttgccggactggccctcgccgagagcaggaggggggcccgtcaagcgcggtgccggaccggatggggagggggatcacccggctgcacggagccgaaggcgcaggaagccggggacaccccttccggtcagaacagcatcgggctttacgggggaaccggcggttcccaagaccgggacggagcggcgttcggctcgtccgaaccccgacggccccagccatcgacaggatcgcctgaccggccagagcgcagcggcggcggggcagccccctgccctcgtgcgccagcacaccgccgatccttcgcggcccgaaggggggctcccctggaacaggggatggggcggcctgacgccgccccgaggccctgggagggagggcctcactcggtgacgccctcgtcgtcctccttgtccttgggctcgaagagaaccagttcgccgttgatcgggaaggcctcgagctggatcttcatgaaggacttcgagccttcgcgctgcgggaaggcgaccccgatctggcggaagtaggtcttgccgttcttgccttcgaccggggtggtgacgcggtagtgagtagtcatggtggagttcctttcctgtttcgatgcaaacgaaacaggccgacggagaaggccgggatgcaggcagaaatgcggagggtccgcgcgcagcgtggaagccgtatttgtgcttgccggagcgcagcgcagggaccagcccggccgcgtcggccagattgcatcttcaagaaacaggggagggacgccacggcgccgacacagccatcagcgcgtcacccggaccggaggcagaaccaacccagcagaccccacccggatcggatcagccctccctgcccgcgccgaaactgccccacgcccatgcagatccagatcgaggcccgcccccaccaggcaccccggcccttccctgccccaaggaccgagacgacaccgggtaaccaaagatgacccccgcacccggccacggtcagcgccaagccagacccaacaaagccccccgaagggccgcacccccgcaagagcgatccagacccgaatggctgaaaccggctggctctgcacccatgcgccgagcttccggccgcgattccgctcggaaacggggccggaggcatcgccgcaggacgcagagacaggaccgggttcagggcaaagcctcgggagcgcggaccgcagtgaaacgaagggattgcatacgagacgagcgcaagcatgctgtcaggaacgccatgccatgaaagcatcatcgaagacacgcaggttgcggcgcctgcccacatttccgaatgggactgaggtgtgacaggtcttggtataagtctcggcagccggacgatggacaggaccctggccactgagacggagagggtcgaaagcgatggcgccgatacattcgtcctccaacttgacacgtacgaaatgaagagagaagaaaagtggatcgctcaaagtgtcctagcggtccgtgaacacccgcactgcatccttctcatggcatccggtcggggcggtaaatctagctggggcgaaatctacacacacttcgcaaccatccggttcagcagagggctcgctatgaagggcttcatgaatacactcggagaattcgccagcaacctcttggaccggcgaccggtgacggccagtaccgtagacggcatcaacgttggttgccggcacggcaaggccgcgcggcttgtgctaatcgaagaagggagcaaagcatgatcccggtgctggctgtcgacgaccctgaatccgcccgcgagatgctggcccgtgtgtttgggttcgtgcccaacgaccacgggtgcatggcgttggccgagcaatctgtcgctgtgatccgtaccggtgacacgccaagcggcatgctccggataccgctcgatcatgtggccttcgcggcatcagatgctgacgagacctgcgctgcgatccaggcgcgcggcgggcatttgtcccggtcgttcaccccggacgggccgagagatatccccgaattctgggacaatggtgtccgtttcgttttcttcgacggcccggatggctggcctctggagttctgtatgaagaacggcattcctgaccgttcaggccacgaccacttcgcaatccgcactacggacatcggggccgcggaagcgcggctcagggccatcggggccgctccggtggcgggccatcggctcagcaccgaaacggggtgggttgaggttcggttcctggcacttggcgcggacatgttcgaagtcttcgacgaaggcccccatcccgacgtcgacccggaccggggctggatcggactgctttagcccgggcccgtgcggggccatgctggcccttctcaaacccgactggcctaactgcccgacacctagatcgcctctatcattcaaaacgcgcattagcttgttcctgaactcccgacacttcctttcaggaaaggtcaacacaaaattggccaaaactgctgcagcgatccctaggaagccggaggacatgaggaacacatctaagatgagaaaagccgacatttggtcaaaagacatcgtcgtgcaggactgtggcggtctcctagctgagaactctgactgggagggcgacgcggggcttctgtatatggttaaccatgtattcgatacgaacaaagcgctcttgaaccggacacggccggagttgcgggttgatgacatcgcgttcctggtcacggcgggtacagggcgtcgtgcgatcgcctatgcgcgtgacggagcgcgagcgatcatagtcgaggttgggctgatccgtgcgctctggacgcgagccgccagcatcgctcacctgcccggagttcttgcaaacgcgttccctatcgccgaggacatcgatcagtcctggatggcggaatcctgcgactccgtgccgggcatgtcggactgggactgctcgggggatcgcgcagagtattgtgtagaccttttcctgcacatgctcgaatacgtggttgtgcacgaaatcgcgcatcatgtgcggggacatctcaagctggtcaacgcggaaaccggtttgcacctgatcgacgagacagaggccaggacgagcaagacaccggaggtttccgcggcggaggggttcttagttcaggacctggagttcgacgcagatgcttatggtttagaattatcgcttgcggctatggacgagaaacacccgtttgcgatgcaatgggatcaagcgagcgcaactgagtggcagtttcagctgatctttgcacagttgatggtcgcacaggtgatcgacgacgcgcgcaaagccgatggcgcgtattctgctgacggccacccggcgccattgcaccgggcgataaactacgggaaccttgtttcccgatcacttcaggatctcgtcggcggtccactgcaagcttatgtggatatgcatgctgttgcctggtcggaggccggctacgttgcgaaggggctgtcctacccgaagggtcgctggcatgatgatcatgggaaagaaatggcgactggagactaccagttgctggaagaacgctacttcgcttcgtcccgacgtattgacggtttgtcccgtggctgacgccgagggcgacagcgctgcgtcctatctgcaaagcgcgtttgattttgtcacagaggtagtgctcgagggcctggtagaggatgccgcgccggaccgcttccgtctgctggtgcagccgtcacccgattacggtgccacaatcataccgaactcggaccgtttcgaaatcgtggtcaacgactgtgttgtctcggaaatgatgcgtttctgccaagcctacgcggacctgagcagcccgcttctggaagaccatatcagcgagcttggctcgttgatcggggacccggagcgggtgctcggagtatctttccaagcagggttggcgttcctgctgttacacgaggtcgggcacgtcgcgggagggcatgtgcgctatctgacacgagacactgcagagttccgggacaggcccgcagacggctcggagggcgcggacggcgactttcgacgtatggcggaactcgaggcggacggttttgcgatggctctgctcttcgagttccaggacgagctcgtctcgtcgctgggatgtccacatcagacatcgtcagagatgcatgccgtttatggccgcgccctgctcctaggcgtctttgccgcgatcagcttgcttgaagggatgttcgcccgcgagcgtataaccgacacgacctacccctacccggcgatcaggctcttgaacctttgcagcgcctatttgcgtgtggtgcagccagacatcgcccgctggcacggcgacgactatcgcaaggccgcaccggatgacgcgacggttcagcgaatctcggggcatttcagaaagtccgtcgcgccagccctgttcctgttgcacgacgcgctgacagggatgggcgtcgcctccgaacttcatggcgtggaggatgatccgaaaaccgtccaagactttatgacggacgcgctcctgctcctgggaggtgggacgccagttcactcgattgatggccaggcgctatcggacctcacggaaaaacgaccaaggttcctctgcaagctggcaccgttccgggaactcgatctctggcacgcggtcggcggcgagacgggctgaattcactcgcccatcttccgcttgaggagaacttcaaaaccttcgaggtcattggcagcctcgccgtcgatcatcacggtgaagccacctggtctgcgcgacgtatcggcttcactgctgcctttgatcttgtcgtagattgcgttggcgatgacgcctgcagggatcccgccgacgatgccgagcgccaacatcaagatctcggatgagcttccgaaccccatcccacggttctttccagccaaagtaatctcgcaaccctcgagaccttggaacgctccggctgcgattgcctcttcgagcgtcttggaattttctgagaggattgagatctgaattgatttactcatgattgtggcctgtccatttcgtgatcaaagcattgagtctcagaatatcgctttcgagatgtgttgcatccggaaaagttgacttgagaatagcgagaatcgattctgcacgtagcttgggtggcggatggtcgatggacagcggcgcgtcaatgcgacgttcaatctctgtaagatacgcgaagaagaggtagagtacgaacccatgtgcccattggctttcgaccgtggtggtccgagacatcaacgcccgaaaggcgaaggcgtccgcctcgtattccaggtcccaagcttcgggcgtgtattcgtcagaggctcgctcggcaagcatggatagacgcgcagaggcgcaaatctcatggtggccaagccaagcatgagcgaactcatgtagggaaacgaacaggagaacaatggtcgtcacgctagacagatgggcctggacctcgccagtcacttcatcttgtccgaggtcgaggggcaccgcgttgatgttggttgaaagcggttcaagaaacaaactgatggccgcctcgaatgcaggatgtccctcccgccgatagtcggaaagctctccttgcagctcctcaaggatcaagcctgtgaaaagctggttcaaagcaaagtatagcccctcgttgatgaaagcgacgaagaaggggatcttggcgcccgctacgtcagcgtttacacagtgggcgttcgcgtgacctgtggggaggaaacggagatgaaccttctctaggaagtggccctgctcctctgtcaaacactctcgcatgtcccttctcatagaaacgacgtatgcatccaggaactggatgaaggttatgtcgtctagctccgtcgacggatggacacggcgcatgaacatgtctacgtcgtcttcgagccccagaacatccaaggaccgggagacccgcgcgcgttcgctctcggggtcagggtggtgtttgcgtctgacctcccaaccttcgtgatgggtgcgaacaaaggtctcgtactcggctactactcgtgcgacctgatggtcggtcaagatcataggatcaatcatgttttaggctcggcgttagcactcttgacgctgtggatacacaatcattccagtgaagtaatgtcacgagatagataaggatgggccaatttcgtaactggcgtgagcggcccattgcggtcactcgaccttcgactcgaatgctgcgaccgcaacccgcttagctgccattcgccgcatcagcaaagtttcgaaaccaacgaatgggaaaggtgcggactttgccgccgtgcccgcgcatgctaatcttttaccatgaaagcgaagcgaaactccccagtcgaagtcgtgcggctgttcaatgattgtatatcgaggcgtgatgctgaaggcttgtccgaattattgacagaagatcacgtctttattgacagtgcaggacatgcggtttcaggcaagaacgcatgcgtcgatgcatggcgcggttttttcgatgcctttccagactactacaatgtgatcgaacgcatggaaacaaagcacaatcttgtcgctgttgcagggcattcggtttgcagcgacatcagattacatgggccggcgctttggaaagccatagttgtggatgatcgcttggcagagtggcacgttttcgatgacaccgaagaaaatcggcggcgattggcgctggaatcttgagtgcaaatttgggctcagagccgacttgcggcggcgtagcagaaggttccccgaccaccctttggctttgatcggcctgctggtcgtagcccggccctgacctgtcgttgacccggtcgacggaatgctgcggagcggcttgtagaagcggtcattagcggcatgcgagaaacccttggcagcggaaggcgagattggatctctagccctcaggcccgacaaagaggaaacgcgccccgtaggacgcgcttcaatgtggtgctacttcgagcttgttaacggctcgaccgcgaattctgaacattggaaatagtaactgtccagcagctcgggtcaaggcgcaattagtctgctttgcgggatgactagtctcaatccgcagtcaactagcagctgggcggcgggtgtggaccctgccttgtcacgccgatatggtttcctcgtgttgggcacgatcaccattctgattcccggtttggatttcgggagagtggatgtccaagccagcgtccagccccgagcttgacattggcttggtcgagtcctaatgtcaatccttagtctgctttataataggttgtgctatgcggttaggtctcgacatcggaacaaattccatcggctggtggctttttgaaactgacggagcagaggcaaatgcccggatcgtcgccgtcgtcaaaggtggggcacgcatcttttccgatggccgtgacccgaagtctggcgcctcgctcgctgttgatcgtcggaccgcccgcgcgatgcgtcgtcgccgcgaccgttacttgcgccgccgcgccacgctgatgaaggttctctcgaatgcgggactcatgccggccgatccggccgaggccaagacattggaggcgctcgacccctatgcattgcgggcaactgggctggacgaggccctgccgctgacccatctggggcgggcgctgtttcacctcaaccagcggcgcgggttcaaatccaaccgcaagacggaccggggcgacaacgagagcggcaagatcaaggacgcaacggcgcggctggatcaggcgatccttgccagcggggcccgcacctatggcgaattcctgtacaagcgccggcagcgggccggcgacccgcgcgatgtacctagcgtgcgcacccgcctcactgttgccaatcgggacggaccggatggcaaggcggaggtcggctacgacttctacccggatcggaggcatctggaggaggagtatcacaagctctgggcggcgcaggccggccaccatgcagaattgaccgacgatctgcgcgatctggtgttcgaaaagatcttctatcaacgcccgctgaaggaacccaaggtcgggctgtgcctgttcaccgccgaagagcgcctgcccaaggcccacccgctgacccagcgacgggtgctttttgaaaccgtgaaccagctgcgcgtgacggccgacggccgggaaacccggcccttaacccgcgaggaacgcgatcagatcatccatgcgctggacaacaagaaacccacagcatcgctgaaatcgatggcgatgaaactagccgcgcttgcgaaggtcctgaaactgcgcgatggcgagcggttcacactggaaacgggtgtgcgcgatgaaattgcctgcgatccggtccgtgcgagcctgacgcaccccgagcggttcggtccacgctggtcgacgctgaatgcggatgcacaatgggaggcgatttcccgtatccgcaaggtgcagagcgaggcggaacacgccgcgctggtcgattggctgatgcaggcccattccctcgaccgggaccacgccgaggccaccgccatcgccccgctgccggaaggctatgggcggctcgggctgaccgccaccacgcgtattctggaaaagctgaaggcaaatgtcgtcacctatgccgaggccgtcgccgcctgtggctggcatcattcggaccaacgcacgggcgaatgcctcgaccgcttgccctattacggcgaggtgctcgatcgccacgtcattcccggcacctatgatgtaaacgacgacgagatcacacgctttggccggatcaccaacccgaccgtgcatatcgggctgaaccagctacgacggctggtcaacaggatcatcgagacctatggcaggcccgaccagattgtcgtggaactggcgcgggaactgaagcagtccgagcagcagaagaaggacgcgatgcggaacatccgcgaagcgaccgaagcggcaaagaagcggagtgagaagctcgaagggcttggcatcgaggacaacgggcgcaaccggatgctcttgcggctttgggaagatctgaaccgtgatgacgcgatgcgtcgcttctgcccttatacgggcgagcgtatcagcgcggccatgatctttgacggctcctgcgacgtggatcacatcctgccctattcgcgcacgctggatgacagctttgccaacaaaacgctttgcctgcgcgaggccaaccgcgaaaagcgcgaccagaccccatgggaggcctgggggggcaccctgaaatgggacgccatcgaggccaacctgaagaacctgcccgataacaagcgctggcgctttggtcccgacgcgatggaacggttcgagggcgaaaacgatttccttgatcgcgcgctggtcgatacccagtatcttgcccggatttcccgcacctatctggacacgctctttaccgaaggcggccatgtctgggtcgtgcctggacggctgaccgaaatgctgcggcggcattgggggttgaactcgctgctgagcgacaaggatcgcggttccgtcaaggccaagaaccgcacagaccaccgccaccacgcgattgacgccgctgtcgtggccgccacggaccgaaaccttctcaaccggatcagccgggccgctggccgcggcgaagaggccggccaatccgccgagctcatcgcccgcgacacgccgccgccatgggaggggttccgcgacgacctgcgcgttcaacttgatggaatcatcgtcagtcaccgcgccgatcacggccggatcgacaaggaaggacgcaagcacggtcgcgacagcaccgccgggcagttgcatcaggaaaccgcctattccatcgtcgatgacacatatgttgccagccggaccgatttgctcagcgtcaagcccgctcagctcttggacgaagccggtcgaagcggccagatccgtgacccgcaactgcgcaaggcgctgcgcgcggcgaccgccaacaagaccgggaaggacttcgagaatgcattgcgcgattttgcgggcaagcccggcccgtatcatggcatccgccgggtgcggatcgtcaaacccctgcaggctcaggcgcggatacccgtgcctgccagggacccaatcaaggcctatcaggggggcagcaaccattgcttcgaaatctggcgcctgcccgacggcaagatcatgcctcaggtcataaccacctatgaggcgcataccctcgatgggatgatcaggccccaccccgcggcgaaacggcttctgcgggtccacaagggcgatatggtggcgttggaacgcggcgggcagacaatcgttggccacgtccagcaaatgcacatcaagaacggcctgttcatcgttccccataacgaagcaaacgcggatgcgcgtaacaacgacaagaccgacccgttcaattggattcagatcgccgcccgccccgccattgaggcggggatccggcgtgtttcggtcgacgaactcggacgtctgcgcgattccgggcccggaaggtaaggaatacctgccttcggccgaatcggatgaagccccatccttccaaagtgttggaggggtgacatatggaccagatcgtcgatattgccaccgacgggcggcacctgtcgcgcgatcgcggttttctgaaagtcagcgaaggcgccgaggaaatcggccgtatcccgctggaccaggtcgccggagtgatcgttcacgcccacggcaccacgtggtccacctcgctgctgacggaactggcggatcgcggggcaccggttgttctgtgcgggtccaaccacgcgccgcgctccgttctcctgccgcttgaggggcaccatgcccagggcgcccggctccgcgcccaatggcaagccaaggctccgctcatgaaacaggcgtggaaacaggttgtgatatgcaagatcgccatgcaggccgccgcgcttgaggccatgggggagacccatgctcccgtggccatgctcaaacgcaaagtgaccagcggcgatagcacaaatgtcgaagcccaggccgcccgttactactggccccggatgatgggccaggatttccgccgcgaccgtaatgcgcccgatctcaacgcgctcctgaactacggctacaccgtcctgcgcgccgccaccgcgcgcgccgtggttgccgccgggttgcacccaaccatcggattgcaccattccaatcggggcaatgcctttgccctggcggacgacctgatggagccgttccgccccttggtcgattgttgcgtgcgcggtctcgttgcccgaaccggaccggaggtgaacaccgaggccaaacaggccctggcgcggctcatcgcgctcgaccttccgctcggtgacggcctgacgcccgtatcggtcgcgctcggcaaactcgcagcgtccttggggcaaagtttcgaggcaggcgcactcaaccttgcgctgcccgccccccttgatgcgcttacccttgcggggcttggggcatgacctcggcgcccgtctttctgtctggataccggatcatgtggatacttgtgatgttcgacctgcccaccgacaccaagccgcagcgcaaagcggcaacggattttcggaatttcctgctggacgaaggcttcgagcgcagccagttctcggtctatgcacgcttcgtcaacggcaaggaggcgtttcagacccgtgtaacccgtattgaacgtcagttgcccgacaagggtgacattcagatcctcaacttcactgaccgacaatatcgtgatatcgtgcatttctcggatcagggtcgaagggcggcccggaaaaatccgcaacaactggcgcttttttgatcatgattcttcagattgccgcactcgatccctcccaaaacctctgttgtttcaggggcttggaagaggatcgagtttagctgttcagaattcgaggtccagccgcaacgtggcccaccgattgccggtgggcactgaaagtttagctgttcagaattcgaggtccagccgcaacaacgcaagcggctggatgcgctgccagacaagtttagctgttcagaattcgaggtccagccgcaacgacacgttccgaggcggcaagctggcggtgagtttagctgttcagaattcgaggtccagccgcaacgaatatgggcaggacatcgtgtcgcgggtcagtttagctgttcagaattcgaggtccagccgcaacatggcggcgaacggttacgcgccgttctttagtttagctgttcagaattcgaggtccagccgcaacacgaaggctgagcttcaggcaatgttcatcagtttagctgttcagaattcgaggtccagccgcaacgacgcgctgcatcccgtcatcgtcggggaaagtttagctgttcagaattcgaggtccagccgcaacgccccagcggcgcgctattgcaggacattgagtttagctgttcagaattcgaggtccagccgcaacagcgcgacggcatcacttggctggactggcagtttagctgttcagaattcgaggtccagccgcaacgctaggcgttcaggaacgccgacccggcgcagtttagctgttcagaattcgaggtccagccgcaactgagtgtgtcaacgtttgcggggccgcaaaagtttagctgttcagaattcgaggtccagccgctcaaattctgaacggctgctttgtctcaaacctaaaggcgctcgctcgctcggcgaaagtccggaatccgccctgcccgagtgacgtcttcggccgtgaggtagctgaacgtatgtcttgattgggctgagctacggccagcaggccgatcaaagccaaagggtagtcggggaaactttgagctgcgacgccgcaagtcggctctgagcccaaacttactgaatgctgcaaagtgtccgaacggctccgatgcgcagaaagcggactctgcaaaactgcaaatgtatggatgttattcgcgacaggcccggcccagaccggccgcttactatacactgctaccgctgcggtgcggccctagattccgaacttccgcagcagccgaaacgtcttgtagaggaaaacgccgaacggcttggagcattcattgatactccttgggtttccgctgcattttaccacggactgcttggcatgcccggcggagcttagagttggccactttcgccgatagaaaagcaccggtcttcatctcataggaacgattggcggtcactcaccacaaggcccacatggccggcaacctgccgcttcaaaaatcttcagcagttgaagcctgtcaaagacaagaacacaaagctccaacttttcgatccgaatggccggctgtcttctcagccaatcccttcgagagcgttacagtttgtccatccttggtggaccatctcacaggttttcacagaaacaagtagcggcctctttaagaatacaacattatgtcacgtatgagcagacaagagcacgaaaaactaaagagccttcttgaggctgtccccacggggttcctcgtggactccgcttggcttgagcaccacgggataggcaggcgttcgtcctacgcctatgtccaacgcggctggctagaacgccttggacgcggagtcttccgccgcccctcaccaagcagcgccaccacgaacacgctcaactggaagacctgcctgctctcgctccagcacatcatgcactaccctgtccatatcgggggggcgacggcattgggcctgcaaggctatgcgcactatctctcactcggcgacaagagcacagtctggctttacggctcaaaaatccctaactggctcgaaaaactgccgctcaacaccaaactccgcacacgcaacttgtcactgttctccgatccggagttgggtgtcgatgacgcacgaaggaatgccgacgagacagcatcgtccctgccgtgggactggaaactggtgatgtcctcgccggaacgggcgatcttagaggcgctggacgaattgccggatcaggagagctttcacaacctcgacatggcgttcgaaagcctgacgacattgcgcccgagaaccctctcggcgctgctcagaagttgcaagaaaatcaaggtcaaacgtctgttcttcgtgttcgccgaccgccacgatcatgcctggcgcaagcgtctcgatccggaagagttcgacctcggcagcggggatcgagcattggtcaaaggcggcaagatacatccgcgctacaggatcatggtgcccgaagagtttgcaataaaggaacgtaatcatggcgcgtgaagactatgccgcccaagtggcccttctcgtgcgcttactaccttatgtcgccagggaggagatatttgcgctcaagggcgggacggccatcaacctcttctatcgcgacctgccacgcctgtcggtcgatatcgatctgacctacctacctgtcaaagaccgcgccgaaagcctcgctgaaatcaacgtcgcgatggaccggattgccgccgccatcgaaggcggcatcaccgacgcaaaagcgcagcgtattgcaggtggcggcggcggtgccacgcgtgcgctcgcacgcctgggcgcggccgagatcaagattgagacctcccccgtcacgcgcggcgtcgtgcatgatccggaacaacgcgaagtctccgaagccgtcgaggaggaattcgggtatgcggcgatgaatattgtctccttcgaggatttgttcggaggcaagctgcatgcggccgtcgatcgccagcacccacgcgacctgtatgacgtgaagctgctctacgagaacgaaggccttacggacgagttgttccgcactttcctcatctatgtagcgtgttcaccgcgcccaccgcatgaattgctgaacccgaacctgatcgatctggatcaaccctatgcgcgggaattcgagggcatgaccaaggagccagtcgaccttccggaactgatcaggacgcgcgaccgcctaatcagggatatacgatcctgtctcgatgaggacgcgaagagatttctgaggactttgcacgaaggcgagccggattacgaggcgatcggccggcctcaagccgccgcgttgcccgccgtcagatggaagctgatcaacgtgaaaaagctgaaagcagagaaccccgagaagcacaccgcccagggcgaagagttagagaaactcctcggctgaagatggaacagagacgactgattttgagaacgatcccgatgaagaagagtgcctggtcacggtttttgatgtgctcggctttccaagaggcccgcaggccgccccaaggtcgaggcggccacctctagcgcatcgagcttgtcttggcgtgacaggtaaaagtaggtctggctctctgtcattgcggagacgcgagcgcgctaagttccttggccaaccaggttggtgcacaggcacgaaggctcagaagctcgcgctgctccccttcgttcagcatcgctttgatgcgcgtcaaagcctgagcggcctcggacttcccgaaataggcaagcgcccgaaaggcatgtccggctcggctgttgggcgcgcgaagctgccagctcggaacatgcttgagctcgacgctttgcgctccgagcgtcagatgacggcttggcccggaggtccagtaaatctgacgcgatggattctgcgtcgagatgccgagcaggttcgcagcagaggctccgctctgcgacacacgctcacccgttgattttgcgatatgctcaaccacggcttcaaccgagggcgcccggttcccaaagcgggttttcacgggcagggcgaacactccccgcttcacacgcagaagctccccgcgccgaaccaaacgcgatagcgcctggtcaatcgccgcacgctccccgaggtgcaacagttcccgcgcggagagggtcgccccctccggcaaggtttccgcataggtcttgatggcttgggatgtggtctgcatgtttgcctccaagcgtcagatatataatctattttctgacagatgcaagcatcgatccggcgacgcttgaggtcccacttcgttcgatccaaaccgctcaagttcccattgctcatagcaaaggtgctgttcctgcaaggggtatcccgccggagtttgaatcatccgacctctgacaaccacgggcagacagacacgccgggtcaagttgccgcagtcgattgcaagggacgggagccagcccaccttcattgcccgacgttgttgactgaagaaaccgaacgtcgcggaacgggtcccgccccgcagagaaccgaacgcgccagcggcgaggtgagaaagggtcaacagtgggaagtaccatccgccggtgaagcagcgctattgcttgggtatcgccccccacgaacgcggttcggcgcgaatagcgccggtcctgagcgatccgggccacttgcccggatcgctcgggacacatggaaggaccgtcagcccggaaccggttcggacagatggcccgatatcatcgacttccgaaacatgacatgcggcagaaaggcggtcttttgctgtgtcatcgccctatcccaccgtcttccagtcgcgcttcatgacgccactgatccggcaatgcgcgcccgtctcggcgcagatgaagctggtcgaaacccgcttctcaccgggattacgccccttgtggacggtgaagcggcttcgttgccgcccgtcggtgaattccagcggttgggccagttcgatcacgtcgccatgggtcagcttgcggctggctttggcggcgtgttcgcggcaccgttgccgccatgcaagcgcgtagtccgttgtcgttggactgagcaggttgagaatggccagaggggcttgggattccaccggcccttggccctcgtccatgctcttatagccccagccgccattctcgcgtcgggtcaagaagacggcagcaaagacatagcggcccattgcatcggcctcgtggccgtaggtctctccgtcaggacgtttcaactgcacttcgaccgcgacataccaaaccgtgccgacacggctggcccggaggggccgtgcggcccgcacctcgtcctcgtatgtgcagagccgttcaatctcggctttgatgtcgcgcggggtatgattgtagatcagccagcccatcacgcggcctccttggtgctggttgcgccctcggcggcggcttcgatcatatccacggctttctgtgcctcgctcgcggcgcggaagatggcgcggttgtcctcgccaagggccttcaaccacccttcgacataggcggcggactgttcaaagtcgggtttgaacccgtgctttgccccaaggatgcaggccgcgatttccgcgatgagttcttcgaatgcataggctttgcggtcccggaacttctcgaaccggtccagccgcgacctgtggcctgtggaatgggcgcactcatgggccagagttccaaaatactcagatgccgaatagaaggtttgaaccggcggcatgtggatctggtccttgtcgatgctgtagtaggcgcgcggttcctcggtcgtgatgatcggaacgccaagagcctcgaagaacgcgcaaagcgcggggtccgcttcggtgccgagatcttcggcgggcgcaggcgtggcatagaaatgctcgggcaacccgtcgatctgatcggcgttgaagacccgataggcgcgggtatagggaaccgccttggcttcgccctcgtccgtctcccggtcgatggtgccatatttgacgaccgtgttggacttttctcctttgcgaacctgccccccgttctcctgcgcctgccgataggtgaaccaatgggcggaggtatatccgtggttctgagctgccgcccatagcagcagcacattgatgccccggtaaggttcgccgttggcccggtgcgggaaagaacagcctcccgcctcaccggtccatggcttgcgccacggcggggtgcctgcttcgatggctgcaatgattgcgcctgtcacctgatcctgaacattgaattttgcggtcgccatttgtggcctctcctctgtatcgcccaagattgggcatgtctggcaagcgagccgcgccttggcgcgtgtctatcttgccggactggccctcgccgagagcaggaggggggcccgtcaagcgcggtgccggaccggatggggagggggatcacccggctgcacggagccgaaggcggaggaagccggggacaccccttccggtccgaacagcaccgggctttacgggggaaccggaggttcccaaaaccgggacggagcggcgttcggctcgtccgaaccccgacggccccagccatcgacagggtcgcctgaccggccagagcacagcgtcggccgggcagccccctgccctcgtgcgccagcacaccgccgatccttcgcggcccgaagggggctccctggaacaggggatggggcggcctgacgccgccccgaggccctgggagggagggcctcactcggtgacgccctcgtcgtcctccttgtccttgggctcgaagagaaccagttcgccgttgatcgggaaggcctcgagctggatcttcatgaaggacttcgagccctcgcgctgggggaaggcgaccccgatctggcggaagtaggtcttgccgttcttgccttcgaccggggtggtgacgcggtagtgagtagtcatggtggagttcctttcctgtttcgatgcaaccgaaacaggccgacggagaaggccgggatgcaggcagaaatgcggagggtccgcgcgcagcgtggaagccgtatttgtgcttgccggagcgcagcgcaggaaccagcccggccgcgtcggccagattgcatcttcaagaaacaggggagggacgccacggcgccgacacagccttcagcgcgtcacccggaccggaggcagaaccagcccagcagaccccacccggatcggaccagccctccctacccgcgccgaaactgctccaaactcatgaagatccagaccgaggccggctcccaacaggcaccccggcccttccctgccccaagaaccgagacgacaccgggcaaccaaagatgacccccgcacccggccacggtcagcgccaggccagacccaacaaagccccccgcagcgccgcacccccgcaagagcgatccagactggcgtgccgtaatcgggtggtccggtttgattgctagtgcatcgttggcctcaaatatgaaaagatctgctgatcggcgagagcacatcgtcgtcgaagctgccctcggcattcgtgaggcgtccgtcgtcatagatttttcggaatgctgaggctgtttattgtcggaagccgggcttgccggatttgcccttcgttacgcggaaacatctggccatttgacacggcacctaatcttaccaattcgtaagcgacaccatgcaagagtctcccgtcctgtgtcaggcatggaacgacgaatctacggattggtgaataacggtgttaggacctttgttgtcgagcaccacggcggcgaaacgctcgacctgtcggcagaaaccgtcctggtagtatttggcgaatgttgggtggctatgccaaatccacggcggtcggaaagctcattgatttgggcggcgatacgttctgggaaagaacccgcaaccacgacgacatgcatgagcgcattcaaaaatcgatgccgcatctcaaacccttgggtttcgatctggaagacgcaatactgcatcacacggccgcggcgttgcagtctgcgttcagggaatgtggactctgcgcccgcatagtggggacgaactcgcaacaatgctccccggagagataactcagaacagctgaccgagtgggccgaagcggcagtggcggcgccttgtgagtttgccgacgaagctctgcaaaccagcgccagcgtcggtctggcgcagagccgtgccatcgacagcctaacggccgacgggcttctgcatcatgcgaatcttgcgctctacgaagccaaacggagcgttcgcggtcacgcgcgtgcatgcacaccggaattgcagagaactcacttcgcgttccaggagttgtcgacagatattctacgggggattgcacggcaagaattcgtggcggatctgcagccacagtttatgtcaacagcggcaccgtgatcggattcgaggcgctggcgcgatggaaccacccaaggcgcggtgtccggataccgaatgactttctgggcgcagcgcagcgcgtcggccttgggcaggagctcgacggggaagtctgacgctctgcgctggacgcattggcgtagtgggacgagcaaatgctgggtgttgccaaggctgtttcgatattacggtcgaaaacctcttgaaccctcgcttcagtgatgccctgctgtggaacctcaaagcacgcgacatcgaacctcaaaggcctgtactcgagatccttagatcggccctctatgtcacaggcaccgatggtatcctggaggccagtaatcaacttgtatcaagcggtttctccttt

SEQ ID NO: 3681 - DNA, 23216 bp, synthetic construct
  misc_feature 1..23216: note = Synthetic
  source 1..23216: mol_type = other DNA
cgcgcaggttgtgggctacgaaactggatgagcgctctccattgacggtgatcccatcattcgcgaccacttcccagctcacgtcataggcttcggcaaacttctgacccaatgtaaaccgcaggctgttggcggcgaggttgcgccaatcctgacggacgcctcgacctgtggtctcttggccatcggcaatgttagcgttgagatccatgtagaagccggtggccgtagcataggcggcctcaatctcgatcccttgggtgttgacctgatccagagcgaggaaaacgggcggcccgaatgcggctgtgttggtgacataggaggtcacgtcccaaagctccgtgtcataggcgttgagcttgaacgacaggctgtcgccttcgcggaacgccccttcggcctcataggcaaagccaagctcaaaggtgcgggatttttcgctatcctccatgcgcgccacattgtccagatcgtcaatcgggggcaggacctccgtgtaggcggctgagccaaataccgaaaatccgttctggaacgcatagcgcagcgacagcccacccatcaacgcgtcatgcttgaaccggccattattgggcgcggtgctgcccttcacatccgatgtctcatagcgaaaggccggcgtgacggtccagccatctccaaacgacatctcgttgatcgcgaagatggcccagcgattgtcttcaccgcccggtgcggaagccgcgttctggcgctggcgaaggatatattctatccccgccgtgaggtcgtggttaaccgctccggtctggaaaagggcggtgttcttgagggtgagggttgtcgtctcatagcggtggtcagcatcgttcagtgggctggcccgtccgatagccgtctgagtgatctcttcatccgcgtaggaatattgcaacgtcagatcaagcagatcattgcccaccgggttgaagccgtagcgcaggattgtcgtagcgctgcgcacatcgcggtcgacattgccgaaattggcaaggccgaagctgtcatatggcacgtctctttgggacgattccgtctccgtatgtgtgagggttacggactgcgcatcgccctcgccgaaggtcagcttacctttaaccaaccacgatgggtcgttggtcgcgccgcccgcagggttgatcaaacccccgttgccgtcttcttgcggctctgtggtgcggcgggtgtagttggcgaggaactcaatgttttccgtgggttgccacgcaaggatgctcgatgaggttatgccgctgccgttggttgcgaactccagcatctggcgggcggcaaagcccacctcgccgccggtgaagtccgatgcgtccttggtctcaagccgcacaacaccacccaccacgcccgagccgaactcgaatgagccgatcgtgccgcgcagcacctcgacctgtttgtaaagcgcggggtcggtgaaaagctgattgccgatgcggtacagctcttcgctgccgcgggtggcgccatcgacttgaatgaggatcttttgatcggtgccgaacgaacctgtcgcaccgaagccgcggatcgtgatgcctgagccttgcggggtagacccgttgaccaatgtcacccctggtacagtgtcgatcaactcggcaacggttcccgcctgccggtcgtcgatctcggtctggtcgatttcggtcactggcacggcggtgtcggtgcgcacatcgcgcttgctttcgcccaatatgatggtcccaagaaatccatcctcctcctgtgccgcagcggggagggcggcggccagtgtcaggcaaagggctgttgtcccccataggggcgcgcgcatttttcgtgtcattatggtgtccttctgagatgctttggtttggctgaaaccgtggctcgcagaagctggcgcggtaattcgtcgtctgcccgggaaaatcgggtcttgtgccggatagatgaatcagactaaattagtcaagaataatctgcgcagttgatatgcgccggttcgccacgcaagcgctttcgcacgctgcgcagccatatttctcagacattcaatacaagaggacgccatggctgataccattgctcaaacacacacccttcaagcacccgcacctgaagatatccgcgcagctcaggccgatcacccaaagctgagggatcgtgatctggcaggtaggcttggtatcagcgaggcacagcttgtcgctgcttcctgcggtatcaccgccacgcgcatcgacgcgcatcccgaccggatcatggatgcggcgcaaaaattgggcgaggtgatggcactcacccgtaacgaaagctgcgtgcatgagcgggtcggcacctatgaaaattatcattccggtggccatgcgtgcatggtgcttgccgacgagattgacctgcggatgttcccaagccattggaaacatgccttcatggtagaaaaggaaaccgacgcgggcctgcgccgatcgcttcaggtgttcgatgcggcgggtgatgcggtccacaagattttcctgcgcgacgggtctgatctggccgcttgggacgcgttgcgcgatgacttgcccatcggggatcagagccaatcgcttgaggtcagcgacagacagcctcccgaggccgcgaaatccgacatgtcccgcgtggacgtgctgcgcaaggagtgggcgcggatgaccgacacgcaccagttcatgcgcctgacctcgaagctgaagatgaaccggctcggggcctaccgcattgcaggcgcgccgttcgttcgcgcgttggcccccggcgcggtgggcacagcgctggagcggctggccaaggatggcaccgaggtgatgatcttcgtcggcaaccgtggctgcatccagatccacagcggccccatcgtgcagctgcgcccaatgggcccgtggcagaacgtgatggacccgcgcttcaatctgcatttgcggctcgatcacgtggccgaggtctgggcggtggacaagcccacgcagcgcggtaacgccatgtcacttgaggcatttgatgcgcaaggtggcctgatctttcagatattcggcatcggcaaagagggccgtgacagccgcccggcatggcgcgcattggtgggttcgctgccagacgcaccggcgaaggaggcggtatgatgcggcttttgtcgacaatacagatagggcgcatgtcgcttgtgaccgccacagcccttgcgctggcaataacactgttcgtgagcgttctcccgtttcagaaggcggtccaagcagccagccctggtgatgtcgtctcgcttggcggctcggtgacggaaatcgtctatgcgcttggtcagcaggatcggttagcggcgcgtgataccacatcgtcctacccgcccgaggccgagggcctgcctgatgtgggatatgttcgcgcgctctccgccgaaggggttttgtcggtcaatccggcgctgattctcagcgaagatggcgcgggcccgcctgaggtgattgaggtgttgaagcgcgcaggcgtgcgttttgagcagttggagccagcgatggacggggaggggatcgcggccaagatccgcgccgttggccgcgcgcttgaagtgttggacgcagctgaggatctggcgggccaagtggaggctgatatgcgccgcgtcacgggaagtgcggccaaactggccggggacgcgcccaagcgcgttctcttcatcctcagcacgcaaggtggccgtatcatggcgtcgggtaccggcacgcaggccgatgcgatgatccgtcttgcgggcggggtgaacgcgattgacggtgttgagggctataagcccctgagtgatgaggccgtaagcaccgccgcaccggatgtgatcctgatgatggatcgtggtggcgatcattcggtggccgatgatgtgctctttgcgatgcctgcgatccgcccgacccctgcggctgtgtccgaaagtgtggtgcgaatgaacgggctctatctgctcggttttgggccacggacgcctgatgccgtggccgagctgagtgctgcgctctatggcgacccgtagcatggtggtgatcgacgcggcttccccccttccgtacattgaccgccgcactgtagcacggcgtgcgcatattgtgcttgggctgttctgcgcagcctctatggtggcaagccttgcgattggcccagcggggacgtctctgtggggcgcgcttgggcagcttatgcgcggggaggtactgagcacgctggatcaggtcgtgctgcgtgatatccgcttgccacgcatggttctcggcgcccttgtgggggcggcgctcgctgtgtcgggcgctgtgttgcaagggctttttcgcaatccactcgccgatcccggcattgtcggtgtcagtgcaggcgcggcactgggtgccaccagcgcgatcgtgctgggcgcaatgctgccgctagcggtgcaaaacatcgtgggcaatgcgctaatcccgctcgccgcctttcttggcagctggattgttgttttcgtgctctaccaggtggcgacgcatcggggccgcacctctgtgattaccatgcttttgggcggtatcgcgctcgcggcgttggcaggggcctgcatgggcgtcctgatctatattgcggatgatgcgcagctgcgcgacctcacgttctggagccttggatcgctgggtggtgctacatggatcaaggtggcgactgcggggccgatgattgcgcttgccattgtggcggcagcgctgcttggagggtcgctcaatgctttggcgctgggcgaggctgcggcacatcaccttggcatcccggtgcaacgggtgaaacgcggggcgatcctctgcgttgcggtggcgacgggaagtgctgtggccgtctcgggtgcgatcgggttcatcggcatcgtggtgccgcatcttctgcgcctctcgacgggccctgatcatggaccgctcttgattaacgcggcccttttgggcgcggcgtttctggtctgggcggatgtgattgcccggctgatcgtggctccggcggaattgcccatcggcatcatcacggcaatccttggcgcgccggttttcctttggattttgctgcgtcaacgcggcagcctcatggcatgagcttgattgcacgcgacataacctttgccttgggtggcaaaacaatcctgagcgatgtggccttcaccgcccggcccggtgcggtgacggccatcgtcgggccgaatggatcgggcaagtccacccttttgcgcatcctgtcgggtgaggagagcgcaggtggcgccgtcaccctcaacggcatggccgtgacggcacgcaacgcaagcgatctggcgcgcatcaggggagttttgccgcaggcggccaacatggcttttcccttcaccgtgattgaggtgttgcgcatcggccttcaggccgggccatatgcattgcgtaagggcgtggcggaagaggcgttgaacgcggttggcctcacagattatgccgggcggtattatcacgagctgtctggcggagagcagcaacgcacgcagcttgcccgtgtcctatgccaggtttgggagccggtgctggacggcacgcccagttggcttttgctggacgagccggtggcgagcctcgatatcggccatcagctgattatcatggaacttgcgcgccgatacggcgatgcgggcggtggtgttgtgaccgtgatgcatgaccttaacctcacagcgctctatgcggatcgcgtggccttgatgcaggacgggcagatcgcggcggaaggtgcgccatctgacgtgctgaccgatgcaatcctgtcggaggcttatggctgtcaccttcgggtcaatgcgccgccgccaccaggcttgccctatatcttgccgcatatggcgcggctcggagattgattgtctgggctgaaatgctgaaccttagcggcccttgatactgatcgagaaactacgccgtgcgcctgtgggtgggggcgggaagggggccgcccgctggatcatttgcgccgctgcctgatctaaccgcgccgagcctgaactttgggcgaccgacaggcccgccaacgccccgctggaggcgatgctgaacgatatcacagccgtgcccgtggtgttcgagcgtggtcgcggcacgcgcgatatcttttgcataacaagaccgggatagttgctggccgctgcattgcccgcagtattcgactgcccctgcacggtgcctgcgcttgccgccgtcgcagtgttggttccggtggcagctccggcgcgtgcgttctggttggagttgccttgtgctgcggcggccgatttcggtttaggctgcggcttggcgggcttggcaggttcgggggcagcggctttcttatgctccgcctcgaaagcctcgctgcgtggttgtggtcgtagggagcgggtcagggcgttcgcgctatcttcttctgctttgatgatgttttctggtgtcatggaggagagcgctgtggcctctggttgaggggtgagtagtttggctgggctcggcgcagacagggctgtgatggttggcaccgcgtccgcctcaagtgcgcgcgtcggcgcgtcaggctctataacagggaccttcgttgcgtcggcctgcgcttgtggcgcgggcgggacgctttccaaatcctccggattttcgcgcgcatccttaggcggcatcggcgtcagcgtctcggtgctgttttccgccttcagcgtacctgcggccatctccgcaaagcgcgtgccaagccgtgcctccgcggctcccgcgctcccatcgacctgcacatctgtgcgcgccatcaacgcccagccaagcgcgctatgtatggcgagtgcgctggctacagctcctattttcacaacacgcgcggcagggatcattgcagctcccgttcggtcacgatgatcacggcacccgccccggcgcggcgcagatcgcgtgcgatacgcaccagatccgcggcaggcagatcacggtccggcaccagcctgacatccggctccggttcatcctcacggcgcggcaggaaggaggcggcagaggtaatctcggtgccgcgatagatcagcgtgccatccgggcggatcaccagcgcatcgggcggtgcgcggccttcaagatcggaagtggaaatcagacgaaggtccgtgtcgagcggctgcgatagcgtgccggccaccatgaagaagaccagcatcagaaagacgatgttgatgagcgcaatcgtaggttcgcgtttggtgcgggggcgggactgtctcatgacgcctccagcaccgtaggtgcgatgtttggcaaggcgtgtaatacaaccagcagatcggtgaggcgttgcgaagtcacattgcctttgagcgatatcagcaacgccagcggtccgtccacttcgggcagtgcactgagcgtgggcaaaagcatgtccatcgtcatcgtctcgccattgaggcgcagggcgtccgggccaagctgcataaagagcggtttcacctctgtcgtgatcacggcgccaccgttcgcggcgctgaacgtgatctcggagaatttggaaaatgtcgagctgagcatgaagaagagcaacaataggaagatcacatcaatgagcgatgtcatcgagagtttgcgccgtgctgttcgccgcctaagcaccttgcagcgcggcccctgccgccgcatcctgcatttgcacgccatctgcaccccgcccgcgcggagcaaggatcgtggtcagcgcgtgctccgccgtgacccgttcggcgtccatccggccctcgaaccagctcagcaccagcgccgtaggcatcgcgacgacgaggccaatggcggttgtgagaagggcgacccagatgccccctgcaagaagggatggatccacctgtgcgcccgcgtcctgcatggattgaaacgcctcgatcatccccaataccgtgccgaaaagacccaaaagcggggccagctgtgccacggaatcgagaagccgaaagccgctttccagccgggcaaagcgactttcggcctctgcggcgagacggggcatatcgggcgtgggcgcactgagcgccatttccaccaccggtgccaaatagcttttggagcgggcgagggccactcgggcggcggtgcggtcattggtgtcccaagcggccacagcttcgctcagcgccgtgtgacgtccgacgcccgcggcggcgaattgccaaagtttgtagagaatcgtcgcaagcgttatcaccgacaccgcaatcagcagcatcacgactggcccgcccagttctgcgatctggcgcagcggttccaagagcgcgctcacccctgcacctcgatttcggtgcgcgaggagacagtcagccccgtttcacaggcggcgggcccaagatccgcgctctcgcaggtattggccccgttgatcaggagcatatctagcccctcacaggccacgccgggcacggaaaattgccgcacgcgcgggcgtgcagggggcagcgcgccaaagtcaaagagcgtcaggcgatcaacctgaccagcggcgtcgaaaagcaccgtttcgtaaaccagcttatcaatcgcgctgccatgcccgttgatgatcatgaagctcaatgtgcaccctgcctcggtggtctttatggcgtttagctccaacgcgattactgcctcgatatcgctttcctgcgcggccagtggggtagcgatagaagcaatcgcaatcgcagtgagtgcgttctttgcagcgatcagggcgcttcggtatttggtatggaggcgcgcgggcggctgaagggtcttgggcatagatgaagggcagatgaattgatgtgacattgagcggcaccagcatgagagtcaggttgaagctttcctggcatgcacggcattgtgcggctcggtgtgatggcgccgattcaccatagtttgcactttaaatcaatacccgataaaaactatcaggcaattgagccttggccacgtgagaagatcgggaggcgttcggtgtcgagtgtcaaaggagacgtcatgtcgatcagcgcctagtgtctaggtcaggtctcgtgtaaaattttcaatatatgaagccgcccaagcgccagattgatgaccgtagccccatatttaatcgtagaattggtgatgttggtttggacgacgtcttgaaggttttaagccctattgggcaccaaaaccaaaaaccgcattcagactttgagggcgtattgagcatgtgctttctgttgccaaggtcaaaggctggtggtcaggtgagagccctgctctttggaagggttgagccgccccttgtttgccggaggcccggagttaaggatattgggttatggaaaagaacacatgttgaagttggtattcaccagaagtccgcgagtgtgctgtgcgaatggtgttcatgctgtggtcgccgagaaatagcgtcagatcgggacggattttgagagataggtgtttgcaatcggtttagaacgaaaaccggatgatgagcatgtaggggatgccgtggatggtctggacgagttggaaacagctttgaaccggagactgctaagacagtttggcggtttgctgaactagctttccctgaagagagtgcgcaaataagccctgcggggcatgtgcgaaacctgcagcgtaagggtaaagccagctcaggaggcgacgcagaaaactggactctcggtcggagatagcaaaaaatgcggctgtcattatactttgctgtttctgtccataattgcgcaccagtacacaaatttaaagctctgtgccttgaggtcataatggaaacgcagggccgtggccctgcgcttcaatgtggtgcaatcgaatgcttgttaacagctcgacgcggattttgaacaccctattggtcgccccatctgcgtgcattgtcaatcgcgcaatggattgtaattaactaaatgccaatgtttattaacttctaaaggatattttagtggggaaattacatgcgacttggccttgatattggaacgaactccatcggctggtggctttaccggacggaaaatgaccagataacgtgcgtcgtcgatggcggagtgagggttttctcggatgggcgggatccgcagtcaaaggagtcgctggccgtcgataggcgcgtggcccgtgcgcagcgccgtcgccgtgacagatacttgcgccgcaaggctgctttgatgaaacggatggctgaggcaggcttgatgccagccgatcccgtgcaggccaaagcgttgcaagctcttgatccctatgaccttcgggcacgggggctcgatgaggctttgccgctggcgcatttcgggcgggcgctgtttcacctcaaccagcgacgtgggttcaaatccaatcgaaaggccgaccgcggcgataacgaaagtggtaagatcaaggatgcgactgcacggctggattgggcgatgcgcgatgcacgcgcacgcacctatggcgagtttctgcatatgcggcaggacaaggccgatgatccgcgtcgcgtcccgacggtgcgcacgcgcttgtccgtggcgcggcgtgacaatgccgaaaaagaggaggcagggtatgatttttaccccgaccggcggcacctgtcagaggagtttgacgcgctatgggccgcacaggcggaacatcacaccaccctgacggacgatctgcgcgaccagatcaagacgatcatctttcaccagcgccccctgaaggcgcctgaggtcggtctgtgtctattcacggatgaacggcgtattccgtctgcgcatcccttgaaccagcggcggatcctgttggagacggtgaatgggctgcgaattgttgcgcgaggggaggcggcacgtgggttgactcgtgaagaacgtgaccagatcgttcatgggctagataacaaaggacatacgaaaaccctgtcgggaatgtcgatgaaactcagggcaattggcaaggtgatcaaacttaggagtgaccaaagtttcacgttggagactgccaaccgggatgccattgcctgcgaccccgtccgtgctagcctgtcgcatccagaaaggatgggcggggtctggaccacactggacgaagacgctcaatgggacgtggtgcaacgcctccgtgcggtgcagagtgataccgagcatgaggcgctggttgattggttgatggccacccacgggcttggccaggattatgcgcaagcaacggcgaatgcgccgctgcccgaaggttacggacggcttgggctgacggcaacgcgcaagattctggcggcattggaggctgatgtgatgtcctatagcgatgctgtggccgcctgtggttggtcccattctggcggaccaacgggtgaggtgttggaggctctgccatactacggtgaaattctggaccggcatgtaatcccgggaacaggtgtgaaaactgacgaggacgtcaaacgcttcggtcgtattaccaaccctacggtccatatcgggttgaaccagatcaggcgactggtgaaccggatcatttgtgtgcacggcaagccggaccagatcgtggtggaggttgcccgcgacctaaagaactccgaggatcaaaagcgtgagattcagaagacgatcaggaaaaatacggatgacgcgatcaagcgcggcaaaaagctggttgaagaactggggcaaaaagacacaggcgcaaaccggttaatcctgcggctgtgggaaaaccttggcaatgacgttatgacccgccaatgcccctattctggcaagcgtatcagtgcggcgatgttgtttgacgggtcgtgtgatgttgatcatatccttcctttctcacgtacgttggatgatagcatttggaacaagaccctatgcttgaaagaggaaaatcggaaaaaggctaacaagacgccgtgggaggtctggggcgaaacagaccagtgggacgtgatcgtcgccaacctcaagaatcttgatagaaagcaggcatggcgctttgcccccgatgcggtggaacggtttgagggcgagaacgacttttccgcccgtgcactaaaagatacccaatacctgtctcgtgtggcacgggcttatctggatgcgttgtatgacggggcggacggcaaatcccatgtttgggttgtgccgggccggttgacggaaatgctgcgccgccattgggggttgaacgggatcgaggtgctgacggacagcgacgcgcaaaccgtgaaatccaagaaccggcaggaccaccggcatcacgccatcgacgccgccgtggtcgcagccaccgaccgcagcctgatccagcggatcagcaagatagccaagcacgacgaacaggcgggcgccgaacaggtcgcgcggtccgtcccgccgccttgggacggtttccgtgatgatgtcgccggacagatcgggcggatcatcgtcagccacagggcagatcacgggcgcattgatccgaccgcgcgcgcacaaggcagtgacacgacagcggggcagttgcatatggatacggcttacgggatcgttgacggtgggcatgtggtcagccgcaaaccgctgatgtcgcttggtgcaggtgatatcaggaaaatccgcgatcccgatttgcagcgtcatctcacgcgtgtcacgcgcggtttggacaagaaggaatttgaacaggctctggcctcttttgcggcgtcgcgcaaactgccggaccaaagcgaaaacccttatttcgggctgcgacgtgtgcggcttctggatgccttgcaagacagtgcccgtgtgccggttagaaacgccacaggcaatatctacaaggcctacaaggcaggtagcaaccattgctacgaggtgtggcggatgcctgatggcaaggtcaagccttgggcaatctcaacgtttgaggcgcaccaatccggcgatgggtccaagccccatccggctgcaaaacggctcttgcgggtgttcaagcgggatatggtggtaattgaacgtaaagggataacggtgatctgctacgtccagaaaatggacgttgccaacggcctgtttctggtgccgcataccgaggggaatgccgatgcgcgcaaccgcgacaaggaggatgatttcaaattcatccagatgtctgcggcgtctttgattaaggccagaatccgccgcgttcacgttgatgaaatgggccggatgcgcgacccgggcccgccccgttaggagaatttcgcaaacttgtctaaaatccaaggtgttagcgattcgcgtgggggcgtgaggggtgacatatggaccagattatcgacattgccaccgacgggcggcatctgtcgcgtgatcgtggctttttgaaagtgagtgaaaatagcgctgaggttgggcgcacgccgcttgaccagattgctggtgtgatcgtgcatgcgcatggcaccacctggaccacgtcgctgctgacggaattggccgatcgcggggtacctgttgtgttgtgcacggctaatcatgcgcccaaatcagttttgatgccgctggatggccaccacgggcaaggcgcgcggatgcgagcgcaatggcaggcaaaaaccccgttcatcaaacaggcgtggaaacaggttgtcaccgctaaggtgctgatgcaggcagcggcgttggattcaattggggaacctgacgcgcctttgaaaatgatgatccgcaaaatcacatcaggcgacacgaccaatatcgaagcgcaggctgcgcgccactattggccccggatgatgggcccggattttcgccgcgatacgggggcaggggaggagaacgctctgctgaactatggctataccgtgctgcgcgctgccactgcgcgagctgttgttgctgccggtttgcacccgacgatcgggttgtttcattccaacagatccaacgcctttgcacttgccgatgacctgatggaacccttccgcccgctggtggattgcgcggtgcgcaacatcgtcgtgacgcgtggtgcagaggtcgacacagcggcgaagcaggcactcgcacgcctgattgccacggacctgcctttgggggagggtgtcacgcctgtctctgtggcggtaatgaagctggccacgtcactgggccaaagtttcgaggagggcaggcttgcgctggccctgccaaacacgcccggcccactgacacttgcggggttgggggcatgaaccatgaaatcaaagttttatcggggtatcgtctgatgtggattcttgtgatgttcgaccttccgaccgacaccaaacctcagcgcaaggccgccggaaaattccgtaattttttgctggatgagggcttcgagcgcagccagttttccgtctatgcccgtttcgtaaacggcaaagaggcgtttcagacccgtgtgaaccggatttcacgccatttacccgattcgggggacgtgcagattctgaattttacggatcgacaatatcgtgatatcgttcacttctcggatcagggtcgacgtaaggcccgaaagaatccggaacaactggtaatgttttgatgcgattcgcttggattaaccacaatagacccccgctattttcttttaactccaagaagatagcgggcgatctattgtagctgttcaaaatccgcggtccagccgcaacttccagaaatgagccatgcggagaccattgattgtagctgttcaaaatccgcggtccagccgcaactgaccagccgccggtgcgggcgttagaggcattgtagctgttcaaaatccgcggtccagccgcaacttgatgagctgacttgcctggattttttgcattgtagctgttcaaaatccgcggtccagccgcaacgcctcgccaagaaactggtcaaccgtcacaattgtagctgttcaaaatccgcggtccagccgcaacaaccacatagaaggaccgcacaaacgaaaaattgtagctgttcaaaatccgcggtccagccgcaaccgtctgcatatcgttgcgcgcccgatcaaaattgtagctgttcaaaatccgcggtccagccgcaactataagttcgtgcagttttcccaaggcgccattgtagctgttcaaaatccgcggtccagccgcaactagaaacacccccgattcgctggtgattcgattgtagctgttcaaaatccgcggtccagccgcaacttccgacccgacagcatcaccgttttgcgcattgtagctgttcaaaatccgcggtccagccgcaacctggcactgcaacgggaaagggatgcacttattgtagctgttcaaaatccgcggtccagccgcaacgcgcgcgcacatgtaaaggctgcatttcggattgtagctgttcaaaatccgcggtccagccgcaactcatcgacggatctgccgttcttcatccaattgtagctgttcaaaatccgcggtccagccgcaacggtctgcaacgtggccgggacaaatgccttattgtagctgttcaaaatccgcggtccagccgcaacgccagtgccgaagatgatggtttcacggcgattgtagctgttcaaaatccgcggtccagccgcaacaggtttagtcggttttgccattagacaactattgtagctgttcaaaatccgcggtccagccgcaacggcaagaccgaagaatcggagattatgggattgtagctgttcaaaatccgcggtccagccgcaaccaagcgccttgctgaatattacacgccagattgtagctgttcaaaatccgcggtccagccgcaactgataggtgccctgatccagtgcgatcactattgtagctgttcaaaatccgcggtccagccgcaacagcgatgccgctgcatcaccggcctttaccattgtagctgttcaaaatccgcggtccagccgcaactgcgcgaggcactggaggcgcaggggcgtgattgtagctgttcaaaatccgcggtccagccgcaactgccgtcagcatagacggtcgccttcatgtattgtagctgttcaaaatccgcggtccagccgcaactgcgcccactggcggatgctatcagccgccattgtagctgttcaaaatccgcggtccagccgcaacggggcggttgctcttgagacaacctcgcggattgtagctgttcaaaatccgcggtccagccgcaacaggtgagcctcgagctcctgcaccccgcgcattgtagctgttcaaaatccgcggtccagccgcaacaccgggtttcgcgtctttcagttgcatggtattgtagctgttcaaaatccgcggtccagccgcaactgagggcaagtcccacgaggagggtggtcgattgtagctgttcaaaatccgcggtccagccgcaaccccccgtccagcgatcagtgtgaagcgccaattgtagctgttcaaaatccgcggtccagccgcaacaaggggcgcagctatgtctacaggctcgtgattgtagctgttcaaaatccgcggtccagccgcaacgatcgcctgcgccctgcgcgccataatttaattgtagctgttcaaaatccgcggtccagccgcaacagcgcgatctttccgccgcacggggccttcattgtagctgttcaaaatccgcggtccagccgcaacgcaagcggcgcaccgccgcgatcattgccgattgtagctgttcaaaatccgcggtccagccgcaacattttgccagggccgctgcggatcggttcgaattgtagctgttcaaaatccgcggtccagccgcaaccacacggagtagcatgatggctggactgcaattgtagctgttcaaaatccgcggtccagccgcaacgcaggccgtgaatgtcactttgcgggtgtcattgtagctgttcaaaatccgcggtccagccgcaactggctccagctccatcagccgcgctttgcgattgtagctgttcaaaatccgcggtccagccgcaactgcattaggcatcctcctcatcatctgcgaaattgtagctgttcaaaatccgcggtccagccgcaacgtatcgctcatacggccctcttggtaggcgattgtagctgttcaaaatccgcggtccagccgcaaccgatcttcacaacggtttgaggctcgaccattgtagctgttcaaaatccgcggtccagccgcaacgcgctaaactgcgcatcctcctcggcgtatattgtagctgttcaaaatccgcggtccagccgcaacgccggccgtgaatgtcactttgcgggtggcattgtagctgttcaaaatccgcggtccagccgcaacgacacgtgccccgaggagctgctcccgtggattgtagctgttcaaaatccgcggtccagccgcaactggtgcggtagatcatgtgagcctcgccagattgtagctgttcaaaatccgcggtccagccgcaactggctggaccgctggcgaccgcatgaataaattgtagctgttcaaaatccgcggtccagccgcaacctcatgaaacacctgatcacaccgccgccgattgtagctgttcaaaatccgcggtccagccgcaaccatcggtgcagcttccgctgggcatgaccattgtagctgttcaaaatccgcggtccagccgcaactgaagtcaccgacgccggttataaaacgctattgtagctgttcaaaatccgcggtccagccgcaacgacgagggcggtggcattgattaccacgtcattgtagctgttcaaaatccgcggtccagccgcaacaaaggctctaccgcgacctctgggaccgtcattgtagctgttcaaaatccgcggtccagccgcaacgggcaggtgcgcggggaccagcttttcaaattgtagctgttcaaaatccgcggtccagccgcaactgaagcgatttcatccacgacaaagatcaaattgtagctgttcaaaatccgcggtccagccgcaactgatcttcacaacggtctgcggttcaatctattgtagctgttcaaaatccgcggtccagccgcaactggaccggctgggccgtgcagcccgtcaagattgtagctgttcaaaatccgcggtccagccgcaacccgtgacactcgcgagctgcatttgcatctattgtagctgttcaaaatccgcggtccagccgcaacactgatgcgctgtttcgcacgggcgctgagattgtagctgttcaaaatccgcggtccagccgcaacaaaccgcattgtcccgtgtagatgaagaacattgtagctgttcaaaatccgcggtccagccgcaaccattcagaatattggcccgcgatgtcgcgtattgtagctgttcaaaatccgcggtccagccgcaacgagctcatcactgggatcggcggggtggtcattgtagctgttcaaaatccgcggtccagccgcaacgtatcaacctccgcgatgcgctgagacaccattgtagctgttcaaaatccgcggtccagccgcaactgaccagtgaacgcttcgcgtcattccggtattgtagctgttcaaaatccgcggtccagccgcaacaatgagtgtgattggccttaacgcaaacaaattgtagctgttcaaaatccgcggtccagccgccccgtccgtcttctaaagcgttttgcgtttgatgtgaggcgaacggggattcacaatgtggcattttctgctccacttcctttggaaggtggatcatgggcaagccttattctttggaccttcggcaacggatttgtgattatgtggcgaaagggcactcggcgcgcactgccggacgggtgttttgtgccagtcctgctacggctgtgcggtttgcggcggagtatcggacgcggggcttggtcgctgcaaaacgacaaggcaggtcgctgggacgttttggcaggcttgccccgcatcgcgacgtctttctcgtcatcttgcgtgctgaacctgacattactttgaaggaactggccgccgcactgtctgaaacgaaaggggtgctggtgcaactttcatggcggcaagcagcggttgccgggcaaggggtaccctttccacccgcaagagcccgcgcgccgccgaggtcctgagaagacatagtagctggctctggttcctgtcgccctagagccccgacctcaatcctaccgagatggtcttctcaaagcttaaagcccacttgcggtggattgggatcagaaccttctacgccttgttagaagcccttggaggcatatgcgatctctgcgatcgcaagaaggttggagctttatcaagactgccggatataactcagattaacgcaaatcgatctaatatattgcaataaagcttgataaagataggtggcggcgacgaagggaggctccaccacaaatctaagtctttgacttaactggacatacaagagcgaaggttgcttgtgtgtctcactttgtgttccggtttataacccggatgttaggaagaagtcaaaggtatctgtgttggcaaccagagtggatatttttcatggtatcagggtaagtatatgaaggatatgagcattttttaaaacatattagcatgatattcgtttcggattgcttattggaaagctgaatacatcgaagattgagatgaggcaggaaagcaatcggttttgagtatatattttaagatattgattataaatgatttaataagaaagaagattgattatctggccagacagatactcggctttggctaagttattgtatttgataaataatctcagaatatgccccgcctcttgtcctataggtagggcgatagatttatccaagaaaaacaaacggataatccgaggggcgcaagattgcccgacctcgttctatcctataggtggcgcgagtggtgtacgtagacgggctttctctgtctatatgtgaggaaaagcccccacctctcgccccgctgccatgtgggcgggcaagtgaagccaatggaaaacagacagataccgcacgggagaagctgctaatgctccgccaaggcgtagggttaggcccaaagagaaaaggggccacgggggaagttgtggccttgccaatacagagatacgcgctcagaaaaatgagccgcaaaatgctattgtgagcaacgaagcctttcatactcagcccgaacgcgccattcgaccgacgcagccgacacgttttgtgcaggcaaactggccacgatttgttcagcctgtctgcgcaatgccgcttgctcagcttgatggtccatcatctgaaacacgaaatctagggtttggcccgattgttctaagttgcggtatacctctctacccacaaccgttggagcgagatgcccgcctccgggatgcgatccgacatatcccaagtcaatgttgacatagccaaaacacgctttgatgtgccagccgtatgaatggtcgtcactggggcattctcgcacaagtggcccttcgcttcggtgcagagcaagcggctcgctagggtcaacttcggtccattggtaccattctgatccggtctggactaaatgcggcacccggaacgggtgagcaaggtaggcttctcgttctgagactgtcaaagtaccatcggcttctcttgccgccaatgccgcaaactccgcattcgtggcctcaatccgcgatgcgatgtctggtgcaaactgctgaaggctctcaaaggcttcggcgtccgtcatgcaggcggtatgtgatgcccgccattcggggaataaatcgtagaagcgttgttcggtatcttgagcggctagcctccgcaactggcgacttctcgcacgttgtgcggcagctaagttgtcgtggcgcatgacattgcggtgaaggtgcaatggaataccatttgtcaatgcatccctatgttctgctcgatcatagtcagcattaccggcgcgaagtccgacgattacagccaagctggctggaatatgcgcagcataacgggcaaactcgctttcatttgcccagccccattcatcgagaagcgcgggcacttcgtctttcatgacgggctgaatgcccccatcgttattcagtctgttagtggcaacgccaaccagcacgaacgcggtggcggcaacggcgactttgtaaaccgttttcatatcaaatcccgacatttgaaggtgcagagttatacgccgcgcttctgaacacggttatcccaaaatggtattatcctgacttgggattacccgactgcctgcattcgatcaacaggcagtcacttgacaaaacacttcgcacacctgaacacagtttatctgtgccagcggctcaggcaggtgcgccttgatgcaggtctgacccaagctgacttggcagagcgtttggacaagccacagtcttttgttgccaaggtcgagacacaggaacgcaggttggacgtgatcgagttcgccaagtggatgatggcttgcgatggtattgacgaggcacaccagaccatcacagtacttgcaagcggctcgcacgccgaagaacaacgcccctaaacctcaaacttctcaagggcttcctgcttttgtgccagcgtatgcccttccttgaaatagacctgctgcgccacgccttcgcgttcatggcccacaatgtcctgataaagcggctcgggcacaccagcctgcgccagtcgcgttatcatcgtgtgacggaagctatgcagtaccaagcccggttctttcatctcaagccgctttaggaaggtgccgaaccatcggcccggattgcggccatagccttctttgacgttgtatgagaaggacataaacaggcgctcttgtcgcggtaaggcttgtacccagtcaaggaagccaagccggatcaactcagaatggatgggaacccggcgctttgcagcggttgtcttgaggctcttgttctttccatctgcattgatgtccagataccaaatgtcgccttcctgctgaacgtctgtgaggaatagctgcgcgatttctcctcgtcttgcgcctgtataaagcgccagaagcgttgcccacttgtactcgtctgacttcacaaacccggacctgttctcagtcagttcttgaaacaatcgcttggtttgggctggcgagaatgccttgcgtccgtcatccggctttttccgcgccgtgattttcatttcttcaaacagcttctcagttgcctgtccatgcgtaaccgcccatttccagaagcgatagaacatggccatatggttattcaccgtctcaacagatacctttttcattcccggcacttctatcgcctcaagcagcgttaagtctttcgtttcagtcttagttttccgattgagcggcagggactgcaccacctttttgacttcggcagcgtcatggcgcgttatatccgccatcctgcgatccggcccgaaatactccaacagcacagacaagaaggctcttgctttcgcggccacctggtcggaccattgcggctcagccatgaaatcttcgattgcctctcccagagacgcagagcgggcctgtgacggcgctggcgctgtctcggaatgcttggtgaaggaatagccctcaaggctctcagcggcgctcagaatggctttgatctgatcccggcgggccttgcgcatctcttggcgaagggacgacgcattttcggcccactgagcgtctgtcacgcccgctgaggcccggaagctgtccaaggtgcccgcgtcaaggtagaggtctgacaggtcgtcaaagccgcctatagcgtcctcgtggacgtccaactcttggcgtagggcctcaagggaccgatctggcaggccggtgtcgttcaaccgttccaaataccgatccagcgaagctgcaaagtaactccgcacgatgtcccgcatctcgtcttgtctgagcctagccaaagtcttgttctcgcgcaccaatctgccacaggatgcaagatgtcgggcaagatcgccagcccgatccgggcactttgtgcgtaaggatatcctgactgtgcggcgcttgtgatcctcagcccgaggaaggggccagcggaagtagtaaaccccgtgacgtgatggtgacagataggcggagagtttcattggctgtgcgttccactttgtgtcgcacttgcctgtccaagacctaagtcattgttttagcgtgttatggcggagacgaagggatacgatctcaattaaaagaaatccttatatatcttggtgttagcgttgaaatgtggtccagact

SEQ ID NO: 3682 - DNA, 23174 bp, synthetic construct
  misc_feature 1..23174: note = Synthetic
  source 1..23174: mol_type = other DNA
atagaacatgcccgacaggccccagatcgtgcaggcgccgatcatcgccaagatgcccagcttcgcgctgccttgctccatgcctgtgccctcaattgctgatccgcgccatcaaagtcagggacggcgcggattggcaaggctctaacgtcgctcgcgctccaccagcatgagcgacgcgcccacgatcagcgcggcgccgatccacagccgaccgggcgggaggaacccgaacaccgccgcgccaagccccacgttgaagagcagcttcacatggtcgaacggctgcaggaaggccgcatccgcaagcccataggcccgcgcgatcaggtattgcgcgaacgcggtcagagccccggccagtgcgatcagcgccagcacggaggctcccggcatcgccccgccctctagcccccagacgagcgcattgaccggcacaaggcccagcagaagccacaaggtgagcgtctcggcgctttccgtcgcgctcagacgcttggtcatcagggacaccccggcccagagcgctgccgccccgagaggcaaaagagcctgaatctgaaacgcctcttgccagggggccagcaccacagcgcccccggcgagcccggccagaaccgcgccccagcgggcggggccaacctcttcgcccagcagagcccaggccccgagcgtcacgaagacgggggatgtcatcaccagcgcgatggcctgccagatcggcacataggccagcccggccacccaaagctgaacccccagcgccgccagcaaaacgcgcatgagatgcgctccccagcggcgggttccgccgccgccgcgcgcctgacccgcgatccacggcaaaaacagcagcgtcgccgccagatactgcccaaaggccaccaccggaggcgccgcgcccatacgcatggtggccagttgcaccaaagtgttggccccggcgaacaccgcgccagcccccaccatggcgagggcgcccaccagcggcgcccgaagagttgtcacagaaatggtcatgtctttcccttttgcccatgacccaaggcaagacggcacaggggcgcgcttaaacgcaccctgccccgctctcttccatccggactatgaccgtcggctcaggcctcgcacctgatctgctgacccccgacattaggccggggcgctcgcgggctcggggtctcccccataccgccggtggggaatttcaccccgccctgagaacgcgcgaccccatcggccgccgacgtacaatagcgagccgccgcgcggcgagccacccccgtctttgtgatcgctgtcccgcagggtgcaggaacgaaaaagggccggagtttcccccggcccctttcctgttctgcaacgtcacggatcacatgcgcgaggcgacgttctcccagttgaccagcttctcgaggaagttggtcaggtaggccgggcgcttgttgcggaagtcgatgtagtaggagtgttcccacacatcgcagcccagaagagcagtctgaccaaagcacagcgggttcacaccgttttcggtcttggtgaccttcaggccgccatcggtgtctttcaccagccagcaccagccagagccgaactggcctgcgcctgcggcggcgaactcgtccttgaatttctcaacggagccgaagctttcgaccagggccttctccagctcaccgggcatgacggcgccattcgggcccatcatttcccagaactgcatgtggttccaatgctgggaggcgttgttgaagatgccgttctgagcgacggcgcccgcctggtaggtgcccttgacgatctcttcgagagacttgccctcccactcggtgcccgcgatcagcttgttgccattgtcgacataggccttgtggtgcaggtcgtggtgatattcgagcgtctctttcgacatgcccagatcggcaagagcgtcgtgggcatagggaagatcgggaagttcaaaagccatggggaggcctcctctcactgggatttcaggtccggtgtatctgccaaacgcggggatccgtggccgggttcccgcgtctggcaaattccttggttgcatggcatggtccgcgccaatgaggcaagtgcaaccgtgaccatgaccgttgatccccaagacccgatcgtgctggtgcgcgctcttcacgttcaggatgtgggcccggggcacctgatcgacgcggtgcataacgatgccgcccatgaccgccgcttttggctgttcttccgcaagatcgcggcggttcccaatgttgaaatatcggaacccgtagagctggtgcgctctttcaccattggtgacgcgcccgcgctctacctgcgctcggactatccgctggatcacgtgggcctgaagatcgacggcgaaaccgtcgccctgcgggcctatcccgaggaaaccggccttttcgcggggctgcgcacggccatcgccatccgaaacggcgaaagcgccgccatcgcccatgactggcttgactggcactgccgccgcttcgggatggaggccgcgctgatctttgaccgcgccccgcccggcagcgatgaagctttcgtcagggatctggagacccgcgtcggcggcattccggggctcaagcgcgttgtggtcgtgcattgcgatctgccactcggcgtgcccgacctgccccatgaggcccatccgttcaacgtccccggcgcccccggcaaggaccggatggaggtgccgcccggcgagccgtggagctctccgctcgatcatctgcacatctgggagctgctgcgccaccgcttcctggaccgtgccgcttcggtcgccaatctggagctccacgacctgatccgccccggcggagacaacccgttcgctcgcgccgaagaggccggcgcagtgacccttgccgggcgccaggtctatccctggcgcgtccgcgaagacgcgccggcccattacaaagaccacatctgcgtccagttcgacgccaaggggcaccgcagccgctgggccatcgcaccgggcaagctgccggacacgtctgtctggcgccccaaccgtgtggtgggcgccaaccccgatcccaaacggattgtcttctatgaccgctacatggcgatccgccacgaggacgaagccatcgcccggatcgtgccgaaaagttctctgatcgaggatgcggggctcttgcatctgagcgaagacgcctggggcggcaacccggtgcggatgccggatgtgagcctcaagaaggaccgcaagcccggcccgacccgcacggtgatcgtcacctgcatgaagaacgaagggccgtttatcctggaatggctggctttccaccgcgccatcggcgtgaccgatgtgctggtctataccaacgattgcgacgacggcaccgacacgttcctggacctgcttcaggaaaaaggcttcgtccagcaccgcgacaacccgtttcgcgaaaccggccagaaaccgcagcacgccgcgcttgccgcatcggacgatgagccctgcgtgaaggacgccgactgggccatctcgatggatgtggacgaattcatcaacgtcaaagtgggcgacggcacgctgggggcgctctatgacgcgctgccgggggtgaacctgatctcctgcacctggcggctgttcggcaattccgacgtgcatgaataccgcgatgatgaatcgctgctgcgcgactacacccgctgcgcgcgcgaattcgcgaacaagccgcaccaggcttgggggttcaagacccttttccaaacgctcggcatcttcaagaagatgggcgtgcaccgccccaaggggctgaacccgcagctttggcgggcgatcaactgggttaacggatcgggcaagccgctcccgccgggcatgtatcgcaacgcgtggcggtcgacctcttcaacctatggctacgatatggtgcagctcaaccattacgcggtgcgctctgctgaaagcttcctggtgaagcgcgaccgcggccgggtgaaccacgtggaccgcgatcaggggctcgcctactggttccgcatgaacaataacggggttgaggaccgctcgatccagaacaagatccccctgatggaggccgagcgcgcccgcctgctgtcagatccggacatccgcgccgcccatgaggcctgcgtggccgcccaccgcgccaagatcgacaccctgcgcacacgccccgaccagcaggagttctatgccaccctgaccggcccccggatggaacgcttgtcccggatgcacgggcatttcgggcagaacgtgttcctgggcggcccagacaccgtgccggacgatgttgttttcgctgagcatgacgcggatttcttcttcaccgttgaggacgttggcgagacgcaacactaaggacgcattgcgtgctgctcccctcttgtctccggcgacgcgaccgcatagacgggtcagcggagacgtggccgagtggtcgaaggcgctcccctgctaagggagtaggcgggaaaccgtctcgagggttcgaatcccttcgtctccgccactaagccctgacacgtatcacgtcagagaaacttggcttgagccatgccgggcggtgacttaccctcgccgcgtgccccctctccgttcaagtacttcaaatcaagccctgtgatcatcaaagtggcggtgatgtactacatccgttacccgctcagcctgcgcaaagccgactacgtttcgcatgaacgctgcatggatatttgccacgaaaccgtacgcttttggtggacctgatttgccccactcttcgctaaacagctctagccccgacatctgagacgaataaagattcgtctgacagaacccaattttaccatcggccgacatgatgccttggtttgtgtcagcgctggaatgagctgcaccgcgaggctcccctagccgccggtcctcatttgtcacgggatggaacgcttgcatcgtttcctgacagactgatactccgagggaaacgttgcaataatccgttcaaacgtatgctatcattgtcagttgttccccttggtctatcatccacaccggtcgtgtctctgcgtggcgtattcatgccaggatggatcttctatgctttgggggccgttctgataactgtgatcatccgcgaagtcgtgatccgcctgaatggcggtcccgtcgctgggctgggcgcaccgttctacacggcgctgagcgtattgatcgggctaggcgcctatctgctccgcgtcggagggctgtagcccatgaaagctgtattccgtctgcttacccttgtgaccatcgccgccgctatcgggctgtgcatccatgccttgcgacaagccgagcgtttcccgcaaacggatgctgcagaaatcgccgcgcccatcataaaactgtcggccaccgtgcccggccgcgttgtcgaggttttggttaaaaacaatgcgctggttgccgagggcgatcccttgtttcgcgtggaccctgagccctacgagcttcagctggcacaggcgcaggccacactcgccacggcgcgatccgaactcacacagggacaacgcaatctagatctggaaaaatcaaatgcagatgtggcgatcaagcaaatcgatcgcgctcgcaacaacctgcttcttgcgcaacagacgctggaacgcctgcagccattgctcgaggacggctatgtcaccgaacaagaagtcgacacagcgcgcaccgccgtcgacgatgcgcaggtcacgcttgatcaggcgttggcccacgccgcgggcaccggcggcttcgtcggcaccctcgacagtcgccaggcgcaggtcgatctggcgcgggcatctgtcgccttggcggagcgcaacctgcgcaacaccacgctgcgggccccaacggcagggcgcattacgggtctgacgttgaaccccggagaatacgttgtcacgggcacaccactgttttccttggtggataccgcacactggcatgtgagcgcgctgtttcgtgaaaccgacctgcccgtcatccgcgaaggcgacgcagcgcgtgtgtatttgctggccgcgccagatcgcgcaatcgaaggcgtcgtaacgggcatcgggtgggcgatacgctcaaccgaggaagcgcagctgatggggctgcctcttgtggcgaaccgaattgattgggtccgcaccgcacgccggtttccggtagagatcgagctgcacgacccgccgacggatctgacccgcgtagggctttcggtttcggtccgcatcctggggccaagcgacaaggctgagcattgacgacccgcgccgcccccctgtggaccgagttcgccccaacccccgagcgatggcgcggcagcctgcaaatcaccgtgctgtgcatggcaaccgtcagcatcgcgatggctctccgcattcccgaggccgcactgtcttgctacctgatattctttgcatggaaagacgacacgggctccgcggtcctgtctgcgctgatgttgatcgtagctgcgaccatcgcgatccccgtggcgcagccattgttacgcttggccgttgatagtcccccttggcgattggggctgctatgcgggatcacgttgtttggaatgaccttggcacacgcaagccgcgccgcaccgatgctgggcacggcaacctttgtttttgccttttcggtcacgctctacgacgtggtgcctgtgcctgcattgctgagccacgcattggcttggatgtgggtcgtgacctttgtgccgatggctttgttggcagtcatggcgatcttcaccggcgccagcccacgtgaccaagccgccaacctgatagcacaacgccgcgacgcgatgggggcaccgcacagtcaagccgcccacacgctcctggacgaaggcggcacgcgcatggacggatggctcgggaaggcacgattgcttggccacgcgcgcggtcaggacgctgacttcctggcggcacaagcagaggccagctatctcgacctagcgcgcgcgcaagcggatctgcctcaacgcacgggcccgccaccacccgcggctccagcggtcaaaccacccctgttcaggcccgatctattgaccaatcccacgcatgttcattttggcgtcaaggttatggttgccgtcatgatcacctatggaatctattcgattggtgacctgttcgaaattcatacggccatgatcacgtgtttctttgtcgcgctaggcactggagcggagacacggcacaaaatcaccttgcggctaaccggcgcgattttgggggcactgttgggcgctctcgtcctgtttgggctgatgccccacctgagcgacctcggacatctcctggtactggtggctttgggagcttttcccgctgcttggatcagcttgggatcggaacgtgtctcatatgctgggtggcaactggccctgtgctatttcttggtcatcttggcgggctttggcccagtgaccgacccatccactgcgatcgagcgggtcctaggcatcgctgttggtgttgtgacggtctgggcggtcttcacaatcctctggcccgtttcggtcaatgatcgtgtcgatgatatattggaccaattcgacgtggatattgctgccacagcgggacacactctgtcgggccgggcagccatgcggctaactacccaaatcgctgaggcggagcgtcttcaacactatgcccctttcgaggggcgacgggatcaagacgaagcgcaccgcatcgccgaagcgcgcgcccgcctgaaccgcaaactgcgtcacgccacaggagagccccttgcgtaattcctcgatcctcgcagtgttcctgctgtgcgcctgtgccccccagacggtgacggccccagaccaaccagatcgccccatcgccggagcagacggttttcaagtggcaccggatgcgagggtgttggccggacgcgaccaacaagaaaagggcgttcccagcacaccgctaaccttgccgcagttgatcgatgttgcacagcgcaacaatccgggcacgcgcgcggcttggttacgagcacgtcaggcagcagaagccgttggattggtcgaaaccacatatctgccacgcatcaacgcgcagatccttgcaggcgcggcacgcagcacccgcgcagggtaccaagatcctgcaggtctgttgcctgatgggacggtatcgcttggcggcaatcgcgcgatggcggcagtatcattgcattggttgctgtttgacttcggcaaacgtgacgctgcaagcgcagaagcacgcgagctgtcctttgctgcgaatgttggtttttccggcgcacatcagacactgatctacgaggtcacccaagcctatcacgacctacatgcggcaacccggcgcgaacaggtgcacgctcagcggctctccaatgcgcggtctctgtcgcaatcggcccgcgcacgccgcgatcaaggactatcaacgatcccggatgtggcccgcgctgatcaatccgtcgcacaggcacaatttgacctcgcccgcgcacgctcggaaacccgcgccgctcagacaatactgacccaacgcttgggcttgcctgcagggcacccggtgcgcgccgcattcccgtcacatgtgcgcctgccagatcaggtgccggccgcgctcgacgggtacatcgagcggtctctgtcccgcaggcccgacctgcaagcagcctttgcacgtgcccgtgccagcgaacaacacacccgcgccgtcgaagcagaattccgccctcgcatcgtcgcctccgcgactttgggccacactcttggcagcacgagcctgagtgacagccgtcttcccggtgcggcaactatcagaacggatcgtccgatcgcctccgggtttgttgggatcacaattccgctttgggacggtggtgcaaaagagcgtcgcctgcgcatagcgcgcgaccaaaacgcagccacccttgccgaggccgaggggctgcggattttggccgaagccgagattgtcggagcctacgagctcctccagtcggccttggcggcgaacatcgctgcgcgtgaattggttggaacctcacgggtcagctatgaagcagcgatgaaattcgctgaagaaggcctcgcgagtgtcgctgaagtgagcctggcccggcagttgttgctggatgccgaaatcgcacagatcgaggcccagcacgcggcgatgtcagcagcagccacattggccttcgcctcggggcagctaggctagttgtactgtcgagcggaaggaaccttcacggctctgcatcacggacgttacgtgtcataccttttgcggcgcctgccagcgccctctgtatccatatacgagcaacgcagagagcagggctctatttagcgctcgacctttcaatctcgaccagggtcctgtcaaaggaacataggttgagccgcgcggggccgtgaccgatcctctcaccacgacccgtcgctaacggccctgcttgcgccgggccgaagacatctgcctcgaaaccttgcgctttgggtgggaccgctttggcccgatctttgccaagcatatccgacatcaacgggccagtatgcactcaagctggcggtggcatctcgaattctcatctacattttcgagcgcgagaacgctccatgggtcgctttgatccatggctccgcacatgcgtcgttgcaagtctatgtccagtcggctgtgaaaaaagctcaagcgggcgaaatgggcggaaaccggaagttcgctggagtgcaaatcaagtcattgattgaacgagaggacgcccccaaggaagaggcagcgtcaaaaagaaaacgcaggccgtagcctgcgtttcaatgtggtgcaatcgaatgcttgttaacggctcgaccgcgaattttgaacaacctgacgctaggggtccaaacctcgaaggtcaagccagttcaaaattcgcgaccaaggcgcaaccaacaaacttctcgttgccaaaaggcaagaagagaaattggcatggcacatggtgtggacccatgtttgtcccaatgatatggttttcctgcgacagatgcatgctggtctagttttcgacatcctggcgtggacccaggcagcatactcccacacaaaggtgagccatagcttgactatggcagccaccttgctcagaatcaacccccaacaaacttcgttattttggaggactgcaatggaatttcgactgggccttgatattgggacaaactccattggctggtggctctacgccattcaaaatggcgaaatcacggatgtggttgatggcggcgtgcggattttctcagatggccgcgatcccaagtccaaagcatctttggcggtcgaccgtcgggcggcgcgggctcagcggcggcgtcgggacagatttctacgccgcaaggccgcattgatgaaacgcatggccgaggtcgggctgatgcccgcggacccggatgaagcgaaggcgctcgagcagttggacccttaccagctccgcgccgaggggctggaccgcaagctcgagctgtctcacttcgggcgtgcgctgtttcacctcaaccagaggcgggggttcaaatccaaccgcaagacggaccgcggcgacaatgagagcggcaagatcaaggacgcgaccaaacgccttgatgaagagatggccatcgccattccggacgcgagcaagcgaacctacggccacttcttgcacctacgtcggcaaagcgcgccgacgcctcgcgaaaccccgcaagtgcgcacgcgtctgactgtggcccgccgcgacaactccgaaaaggaagaggcgggctacgatttctatccggatcgccgccacttggccgatgagttcgacaagctctggcaggtgcaggcagagcaccaccctgccctgtccgatgcgttgcgtaacgagatcagattgatcatctttcaccaacgtccgctcaaatcccccgaggttggcctctgcctcttcaccgacgaaaagcgtatcccttcggcgcatccgctcaaccagcggcgcattttggttgagacagtcaacgccctgcggatcgccgctcgcggcgaaccggcgcgccgtttgacgcgggaagagcgcgaccagattgtccacgcgctggacaacaaaccccacaccaagacgctctcgggcatgaacatgaagctcaaggcgctcggtaagatcatcaagctcagaccagaacagagcttcacactggagaccgccaaccgtgacgccatcgcctgtgacccggtccgcgccagcctctcagacccgcgccgctttggtccgcgctggtcaactttgagccaagacacacaatgggaggtggtcagccgcatccgtgaggtgcagagcgaggcccagcatgacgcgcttgtagattggctggtggcagagcatgggttggaatgggtcaaggcggaagacaccgcccatgcccccttgcccgaaggctacgggcggctggggctgacggccacctcacgcatcctggccgaactggaggcggatgtgatcccctacagcgaagcagtggcgcgctgcggctggcaccattcggatgaccgcacaggagagattctgaacgaactgccctactatggggaggtcctgacccgccatgtcatccccggcacctatgatgacaccgatgacgacatcacacgctatggccgcatcaccaaccccacgatccatatcgggctgaaccaactccggcgtttggtcaacaagatcatcaccgtctacggcaagcccgatgagatcgtggtcgaactcgcgcgcgacctcaaactctcggaggaccagaagcgcgaggttcagcgcagcatcaagaagaacaccgacgccgccatcaagcggggcgacaagctggaagagctgggcgtgcctaacaccggcgccaaccgcatggtcctgcgcctttgggaagacttgaaccctgaggacagcctcaggcgtttctgcccgtattccggcgagcggatcagcgcggcgatgctctttgacggctcctgcgacgtggaccacatcctgccctattcgcgcacgctggatgacgggtttgccaaccgcacgctgtgcctcaaagagttcaaccggcaaaaaaccaacaagacgccgtgggaggcttggggcgacacccctgggtgggaggccatcgccgtcaatctcaagaacctccctcaaaacaaagcgtggcggtttgcgcctgatgcgatggagcggtttgagggcgaaaacgacttccgggaccgggcgctcaaagacacccaatacctatcacgcattgcgcgaagctacctgaatacgctgtatgacggtgctgatggcaaatcccatgtctgggccgtgcccggccgcctgacagaaatgctccgacgtcattgggggctgaacagcctgctgccggacaagaacggcgcggtgaaagcgaagaaccgcaccgatcatcgccatcacgcgatcgacgccgccgttgttgcggccacagaccggagcctgatcaagcggatcagcgacatggccaaacgcgacgagcaggctggcgcggaagaggtggcccgcagcaccgaaccgccatgggaagagtttcgcgctgatatctcgagccagctcaaccggatcatcgtcagccaccgcgctgaccatggtcgcattgaccccgccgcgcgccgctcagggcgggacagcaccacaggacagctgcacaatgacaccgcctatggtgtggtcagcaaggacaccgtggttagccggaaacccttgttatcacttaagcccaatgacatcgaagtgagcaagcgcggcgccaatattcgcgacgcggacctgcaacgccatctggcccgtgtgacccacggtctggacggtaaggccttcgaacaggcgctggccgattttgcgaacgtgcgcacactgccggatcaatcgctcaacccttacttcggcctgcgccgcgtgcgccttgaggaaagcttgcaggaaagcgcccgcgtgtcgattgccgacccgacaggcaaagtcttcaaagcctataagggcgatagcaaccactgctacgaaatctggcgcatgccagatggcaagatcaaaccacaggtcatcacaaccttcgaagcccaccaatcggggccgcccaaaaagccccacccggccgccaagcggctcttgcgagttttcaagcgggatatggttgccttcgaaaaggatggtgagcaacatatcggctatgtgcaaaaaataggctcaaacggagtgttttttgcacctcatcaggagtcaaatgcagacgcccggaaccgtgatgcatctgacccattcaagtttacatctatgggaggcacatccctgatcaaatccgggtttcgtcgtatccacgtagacgaaatggggcgcatccgcgatccgggagcgacgacctaacagcgcagtttggtagaataggtccggtgtaatacactcaacacattgatgattcgcgtcttttagcgcgaggtgatgtattggaccagattattgatatcgcaaccgacgggcggcacctgtcgcgtgaccgcgggttcttgaaggtctctgaaaacgggaccgagatcggtcgcacccctctggaccagattgctggtgtcatcgtccacgcccatggcacgacttggtcgtcctccctcttggtcgagctcgccgaacgcggcgcgccggtggtgctttgcgccgccaatcacgcgccgagatccgtgctgcttccgcttgaaggccatcacgcgcaaggtgcccgaatgcgcgcccaatggcaggccaaagccccgcttctcaagcaagcatggaaacaggtcgtgaccgcaaaagtgagaatgcaggccgccgcactggccgccattggtaaagcccccgctccgcttgacatgatgacccgcaagatcacctcaggggacagcaccaacatcgaggcacaggccgcgcgctactattggcctcgcatgatgggcgacagcttccgccgagacacatcgggggacgcgacaaacgccctgctgaactacggctacaccgttctgcgtgccgccacggcccgtgcggtcgttgcggcgggcctgcacccgacgatcgggctctttcatgccaatcgcggcaacgctttcgctctcgctgacgacctcatggagccgtttcggcctctgattgacatggcggcgcataacctgcgcgcgacacgcgggaccgacgtcgacagcgaggccaaacaaagacttgcctccttgatcgccacagacctgccccttgccgaaggggtcacccccgtctcggtggccctgatgaaacttgcgacctcactgggccaaagcttcgaggcaggtaaactgtctctcgctctgccccgcccgcttgatccgcttgcctttgcagggttgggaaaatgaccacggccgacacacagctatcaggataccgtctgatgtggattctcgtcatgttcgacctgccgacagacacaagaaaacagcgcaaggacgctggcactttccgcaacttcttactggatgaaggttttgaacgaagccagttctcggtttatgcgcggttcgtgaacggcaaggaggcattttcaacccgggtgacaagaattgaacgcaacctgccagaatccggtgacgttcagatcctgaatttcacagaccgacagtatcgtgatatcgtgcacttctcagaccaaggccgcagaacggctcgggaaaatccgaagcaactggtgctcttttgaaacgattcgatcgaattcacatcaaagatcctttcgtaaagccttgcaaaaacaagcctctacgaaaggatctattgtagctgttcaaaattcgcggtccagccgcaacaaatgctctgccatctccgtggacgataccattgtagctgttcaaaattcgcggtccagccgcaactcgattttgtcggtggtgatgtgcagcccaattgtagctgttcaaaattcgcggtccagccgcaacgtcactgatgccgctggccccgtcgaggttattgtagctgttcaaaattcgcggtccagccgcaacctcgcacccatcgtggcgctgctgccatccattgtagctgttcaaaattcgcggtccagtcgcaaccgccttgaggatgctggctttaatccgctcattgtagctgttcaaaattcgcggtccagccgcaacgatcgaggaagtcgacccggagcaatatgcattgtagctgttcaaaattcgcggtccagccgcaacaagcaaagcctgttgggtttgttcgtctttattgtagctgttcaaaattcgcggtccagccgcaactcatggggccgacgcctgtcgaagccctggattgtagctgttcaaaattcgcggtccagccgcaacatgtctgccgactacatgcccaactgaattattgtagctgttcaaaattcgcggtccagccgcaaccccaatcgcgctaacaacggcatccggcgaattgtagctgttcaaaattcgcggtccagccgcaacgacgatctcgatcactatccgttcgctctgattgtagctgttcaaaattcgcggtccagccgcaacagatccacacggatgtcatagcgccgctgcattgtagctgttcaaaattcgcggtccagccgcaacgtgcggcgggcgtcctcgcggagctggacattgtagctgttcaaaattcgcggtccagccgcaacccgaatggtgaccatgcgtctagagacggcattgtagctgttcaaaattcgcggtccagccgcaacagcgcctgcccgcggaccacaagctggttattgtagctgttcaaaattcgcggtccagccgcaacgccgagatggcgatcatcgaccgcgaggcaattgtagctgttcaaaattcgcggtccagccgcaacgtgcgcggcgacggggtgacgatcaaccaaattgtagctgttcaaaattcgcggtccagccgcaacgctaggccgaggcgcctatgacgagcggctattgtagctgttcaaaattcgcggtccagccgcaacctggcgcgtcggtgaccgttcaccggaccgattgtagctgttcaaaattcgcggtccagccgcaacttgtcggcggcaatcttgttgtcctaggcgattgtagctgttcaaaattcgcggtccagccgcaacgtcataatgcataccgaccatatgatcacttcgaacggcagccacctaagactgcctgctattaggcatctcccccaggggtcctgtcagaggaactcagcttgagcagctcaaggcggagacctagcctcgtggcatgaccagcccctcccctttaggacacttcaaaacccgccccgagatcatcagatttacagtgatgtactacatccgttatccgctcagtttgcgccaagttgaggacatctgcacgaacgcgggatcgatatccgcctcgaaaccctgcgctttgagtggaaccgctttggcccgatctttgccaagcatatccgacatcaacggtccagtatgcactcaagctggcggtggcatctcgatgaggtctttgtgaagatcaatggagagtgactttatctctggtgcgccatcgaccacgaaggtgtggtgctcgaaagctatgcgtccaagcgccgagatcgaagcgcggcactgaaaatgctgagcaaatgactctctaggcacggctccccgcatgaaatcgtgaccgacacacttggatcgtaccgagccgctttcggtcaatggcctcactgaagacatttacctcagttcacttcgccatcttcaacctcttcagccatcagaaacacttccttagccgactgcactttaaggaactcggcgatcagtcggtttccgacgggaggcaattctgtgtggcataaaatcgcgctagcccgggcatctgagacgagtaagaattcgtctgacagcacccttcaagatgctcggcaaatcctttcagtgatcgcgcaaagcgccagatgtgaatctacaactacacgtgggtcgggaaggtccacaggactgttgccgaccgagcgcaccacatttctcaagggcgcgccaagcggctcccagctcgaagtgtttgtctcagagtgcggaaaccgcgcggtgtcatactcctgttgggaatcatctgtacatgttgtggaaacgtttccagagggcatcattccttggacctgcgccagaagatcacgatcaaggatgtcgcgcgcgaggctggttgcggaatcgccaccgccagtcgcgtcctgaacaaatccggcccggcgagcgctgacgtgcgcgaacgggtggaaaaggcggcacgcgatctgggcttttccttcagtgccattggccgcgccttgcaaggagggcgcagcatgaccattggctgtctggttccgtccctggccaacccggtcttcgctgaggccgtgcagggcgtgcaggaggctttgaagggtgcgggctaccagctcctgatcgccagttcgaactatgacggcgatgtcgataacgaggccattgcgaccctcgtcgccaaggaggtcgacgggctgatcgcgaccatggtcgcccctgagcgcagcccggccttgaagcaggcgcgggcacggggcgtgccggtctcactgatgtttcacgatccgctcgacgggttcctgaccgcttatgtggacaatttcgatgccgcgcgagaggtcgcgcggcggttcgccgatctcggccatcagaagacagcctttctgtccttgcggttctccagctcggaccggtcacgcaaccgctatgcggggtttcacgctgagtgccgggcgcgggggctgccggatcccgcgctgatcgagttgagtgaggctgaagcaaatacgcccgaagtgctggccgaaacgctcgcatctctggatgggctaacggcgatttttgcgtcgaacgactttctggccattgccgtgcaaaaggcggcccgtctgatgggcaaaagcgtgccgcaggacctgtcggttgtcggcttcgacgggatcgagatcggccgcctgcttgatgtgcccctggccaccatcgagaccaagcctgacgtcatggggcgccaggccgcgcaaactctactggatttgatgcaaggaagggccagcacgcagcgcccccccttgcccttcgatttccgtgcaggtgccacgcttgctcgcccgtgcatggaaagctgtgacgacgaccaggttgccccctggccgccgtctgttcactcgctcaagaccgatctcaaacaaggatgaaccaatgaaacatactgttctcaccgttcttttcgcaaccgcaatcgccgccccggctgctgccgaagacgccgtttgctacaactgtccgccgcaatgggccgactgggcttcgatgctcgaagcgattgacgaaaagctcgacatccagatgccccatgacaacaagaactcgggccagacactcagccagcttctggccgagcgcgccagcccggtcgccgatgtcgcctattacggcgtgaccaccggcatcaaggctggcaccgaaggtgtcacgcaggcctacaagcccgcaggttttgacgaaatccccgaaggtctgaaggacccggagggtaagtggtttgcgatccattacggcacgctgggcctcttcgtgaacgtcgatgccctgggcggtgcgcctgtcccgcaatgctgggccgatctgaccaagcccgaatatcgcggcatggtcggctatctcgatccgtcgtcggcctttgtcggctatgctggtgccgtggcggtgaatatggcccatggcggcgatctgggcaatttcgacccggcgattgagtacttcaacaccctggccgaaaacgatccgatcgtgcccaagcagacctcgttcgcgcgggttgtctcgggcgaaatcccgatcctgttcgattacgatttcaatgcttatcgcggcaaatacgaggaagatggtaatttcgagttcgtgctgccctgcgaaggctcggtgcgcgtgccctatgtcatgagccttgtcgcaggtgctccgaacgaagatgcgggcaagcgcgtgctggacttcatcctgtcggatgagggtcaggcgatctggaccaatgcgtatttgcagcccgcccgcccggtggagctgcccgccgaggtcgcggaaaagttcctgcccgcgtccgattatgagcgggccgtcgcactggattatgccgagatggagcgcgtccaggccgcattcggcgaacgctatctggccgaagtcaagtaatcacaccgttgcgggcggggcgatccagccccgcccgcatcacgccaaccgggggacttttcatgtcgcagcgccactttgtgttgctctgcctttcgccgctcgccatctttacgctggcctttctggcgatcccgttgggccgactgatcctcgcctctggcgagggtgattcaggttgggcgatctatctgcagatccttcagacgccgcgctatctgtcgacactgctgcagacggtcttggtgtcgctggccgtcactgtcacggcgcttgcgatttcgaccaccgctgggctgttcctggtgcgccatcgtttctttgggcgcaatgcgctgctgtcgatcctaacgctgccgcttgcctttccgggtgtcgtggtgggcttcatgatcattctgctgggcgggcggcagggccttgtgaactccatcacgcccggccacgttgtcttcgcctattccgtgttcgggctgtttctcggctatctctatttctcgatccccagagtgctgctcaccgtcatggcggccgctgaaaagatcgatccggcgcttgaggaggccgcgcaaacgctgggcgcatcgccgctccgcattgtcatcgacgtgctcttaccggcgcttgctcccgcgttgatcgccgccggggccatcgcttttgccacagccatgggcgctttcggcaccgccttcacgctcgccacggatatcgatgtgctgccgatggtgatctataccgagttcaccctgtcagcgaacatcgccatggcctcggccctgtcggtggtgctggggctggtgacatgggccttgctgctgattgcgcgcagcctgtcaggcgacaccgtggcggtgggaggatagcgctatgaggtcactgacgaaattcatcccattgctcgtcactctgctggcctgcgccttcctgctgatcccggttatccagtcggttctcgccgggctgacggtgaactatttccgcggcctgtcctcgggtctgacgctaaaatggatcggcgaggtctggacgctctattcccacagcatcttcctgtcgatcgggctggctctagcctgcctcgttgtgacgctgatcctcggtgtgcccgccgcctatgcgttggcgcgcaatcccggccgggcctcgcgcgtgctggaagaattcatctctctgccgctggccattcccggcctcgcgctcgcactggcgctgcttcagctctacggcggctggaccgatttccgcaccagttggctttttatcctggttggccatgtgctctatacgctgcccttcatggtgcgctctgtcctctcggttctggcggccatcgacctgaagacactggaagagggcgcagcgagcctcggggccggaccggcccggcgctttgtcgatatcgtggtaccaaacgcgctgccgggtatcctcgccggagcgctgaccgtggtcacgctgtccattggcgaattcaacctgacctggatgctgcacacgccctacttgaaaacgctgcccgtgggtctggccgacagctacgcctccatgcggctcgagatcgcctcagcctacacgctggtcttcttcgtgatgatcgtgccgctgctgatggccatgcagtgggccagtgcccgcgctcagaggattatgcaatgacactgaaactgacgaacatcgccaaaacctttcccggcggcacaagggcccttttgcccaccgacctggagatcgcgaaaggcgagatcgtctctctcctcggcccgtcgggctgcggcaagtccacattgctgcgcatcgttgccgggctggaagtccctgatccaggggcccaaatcgtctttgacggcgaggatgtcacgcatcagtccgtcgaaacccgcaagatcggcatggtgttccaatcctacgcgttgtttcccaacatgtcggtgcgcggcaacatcggctacgggctcaagatgcagaaactgccgcgcgcggagattgacgcgcgggtggatgaggtcatcgccctgtgccgccttgaggcctatgcggatcgcgcaatctcggccctgtcgggcggccagcgtcagcgcgtggccttggcccgcgccatagcaccgcgtccgcgcgtgctgctgctcgatgagccgctttcggcacttgatgccgcgttgcgcgggcagttgcgcgacgaattggcgctcttgctgcgccagttcgggatcaccgcgatattcgtgacccacgaccaggacgaggccatggccatcgctgaccgggtggcggtgatgagccacggcgaggttgcccagatcggcacgcccgaggcgctctatcggaatcccgccaccagctttgtcgcgcgttttgtcggcgatgcgatgccgctgtctgggcggatcgagtccgatcagctgcatctgccgggcggggtgctggccttgcccaacgcggcggaggggcatgaggttctggtccgggccgaggatatccggctcgacgcgcaagggcccgttgcggcgaaggtcgaagccgtgaccttccttggcacgcattaccgcatcgccctggccggtgcgaccgaggctccgctctttgccttgcacaccggcttgtccgcgcccaagccgggatccgatgtgcgtctgtccatcgcgccggaggcgctgctcatcttgcctaaggaagctgccgcctgatgcccggtttcatccagatcaccgacacgcatatcgttgcccccggcgcgttggcctatggacgctcggatacagccgaagcattgcgccgcgcggttgcgacgatcaacgcgagagagccgcacctggacgggattgattgcgtcatcgttaccggagatctgacggatcacggcacgcccgacgaatacgcccatttcgccgcgatcatggccgatctgaagctgccatggcaggccgtgcccggcaatcacgaccagcgggaggcgatgcgcgcagccttttctgatgcgccctggatgcctgcaagcggaccaatccactgggctcgcgattttggcccgttttccgtgatcggcctcgataccctgctggagggcgcgcatcacggtgagctttcgcccgaaggggcggccttccttgatgccgcgctgacggccatcgggccgcaacctgcggtcatcgccacgcatcatccatggatgcatacggggataagggcgatggatgccgacaacctgcgcaacggcgccgcgatgatggcgcggctcgaggcgcacgccgcccccgtgcgcatgatctcgggccatgttcaccgtgcggtcaccggtcagatcggccgtgtgacctgccaaatatcacctgcgacatgccatgccgtactgaccgatcatcgggccgatcaggagccgcagctcgtgttggaacccggatgcatcacggcgtgccgctgggtcacgataccgggccccggtttagtttccgacgcaatacccacaggagagttctcaggaccgtggccatttgccgattagcgggcgggcgggcgggcggtggcgcccaccgaccaaaatcaggaactctgaaccctgttagccctgcatcatcggaggtgctgacacctcatctgctgtgaaattgcaatctagatagtcacattctgatcccgcttcgccacgaactcaccgctcaattcgtcgaggcagctgttgcaaaagaagagccggacagcgtgacatcccacgtcaccggcctcccctccccccagcgaagcagcgttcgcagcaagaatatggatggtgcggccgtgacctgagcccctaaatctcttccagttttgtgtagagtccgcccaactgaaggacggacaactgaagacgaggttcaccgacgaacagatcattcag

SEQ ID NO: 3683 - DNA, 23153 bp, synthetic construct
  variation 5917..5920: note = note, n is a, c, g, or t
  variation 5981..5982: note = note, n is a, c, g, or t
  variation 5929..5930: note = note, n is a, c, g, or t
  variation 5943: note = note, n is a, c, g, or t
  variation 5979: note = note, n is a, c, g, or t
  variation 5872: note = note, n is a, c, g, or t
  variation 5785..5786: note = note, n is a, c, g, or t
  variation 5390: note = note, n is a, c, g, or t
  variation 5866: note = note, n is a, c, g, or t
  variation 5954: note = note, n is a, c, g, or t
  variation 5396: note = note, n is a, c, g, or t
  variation 5991: note = note, n is a, c, g, or t
  variation 5783: note = note, n is a, c, g, or t
  variation 5902..5903: note = note, n is a, c, g, or t
  variation 5477: note = note, n is a, c, g, or t
  variation 20646: note = note, n is a, c, g, or t
  variation 5471: note = note, n is a, c, g, or t
  variation 1975: note = note, n is a, c, g, or t
  variation 5717: note = note, n is a, c, g, or t
  variation 5606: note = note, n is a, c, g, or t
  variation 5561: note = note, n is a, c, g, or t
  variation 5995: note = note, n is a, c, g, or t
  variation 5474: note = note, n is a, c, g, or t
  variation 5624: note = note, n is a, c, g, or t
  variation 5932..5934: note = note, n is a, c, g, or t
  variation 5950: note = note, n is a, c, g, or t
  variation 5564..5567: note = note, n is a, c, g, or t
  variation 5912: note = note, n is a, c, g, or t
  variation 5926..5927: note = note, n is a, c, g, or t
  variation 5883..5885: note = note, n is a, c, g, or t
  variation 5843: note = note, n is a, c, g, or t
  variation 5279: note = note, n is a, c, g, or t
  variation 5654: note = note, n is a, c, g, or t
  variation 5399: note = note, n is a, c, g, or t
  variation 5948: note = note, n is a, c, g, or t
  variation 5741: note = note, n is a, c, g, or t
  variation 5874: note = note, n is a, c, g, or t
  variation 5756: note = note, n is a, c, g, or t
  variation 5831: note = note, n is a, c, g, or t
  variation 5482: note = note, n is a, c, g, or t
  variation 5411: note = note, n is a, c, g, or t
  variation 5515: note = note, n is a, c, g, or t
  variation 5405: note = note, n is a, c, g, or t
  variation 5660: note = note, n is a, c, g, or t
  variation 5910: note = note, n is a, c, g, or t
  variation 3201: note = note, n is a, c, g, or t
  misc_feature 1..23153: note = Synthetic
  variation 7160: note = note, n is a, c, g, or t
  variation 5663: note = note, n is a, c, g, or t
  variation 5825: note = note, n is a, c, g, or t
  variation 5816: note = note, n is a, c, g, or t
  variation 5402: note = note, n is a, c, g, or t
  variation 5644: note = note, n is a, c, g, or t
  variation 5852: note = note, n is a, c, g, or t
  variation 5615: note = note, n is a, c, g, or t
  variation 5958: note = note, n is a, c, g, or t
  source 1..23153: mol_type = other DNA
  variation 5633: note = note, n is a, c, g, or t
  variation 5985: note = note, n is a, c, g, or t
  variation 5828: note = note, n is a, c, g, or t
  variation 5776: note = note, n is a, c, g, or t
  variation 5895..5898: note = note, n is a, c, g, or t
  variation 4997: note = note, n is a, c, g, or t
  variation 5771: note = note, n is a, c, g, or t
  variation 5675: note = note, n is a, c, g, or t
  variation 5915: note = note, n is a, c, g, or t
  variation 5973: note = note, n is a, c, g, or t
  variation 5907: note = note, n is a, c, g, or t
  variation 5678: note = note, n is a, c, g, or t
  variation 5768: note = note, n is a, c, g, or t
  variation 5821..5822: note = note, n is a, c, g, or t
  variation 5501: note = note, n is a, c, g, or t
  variation 5444: note = note, n is a, c, g, or t
  variation 5936..5937: note = note, n is a, c, g, or t
  variation 5889: note = note, n is a, c, g, or t
  variation 5414: note = note, n is a, c, g, or t
  variation 5508..5510: note = note, n is a, c, g, or t
  variation 5819: note = note, n is a, c, g, or t
  variation 5968..5970: note = note, n is a, c, g, or t
  variation 5534..5535: note = note, n is a, c, g, or t
  variation 2265: note = note, n is a, c, g, or t
tccatggatcttggcgacggctatgcagcttccatcagctacggcgttgagcttgacatgatccttggcacagctacagaaaactggggcatgtacccaactatcgaaatcactgcaccatttggttcgctaaaaggcggtgacttgaacgataaaggtgcttccgagtacttctacgctgaccgtgacggcatgctgcttgacgcagagaaccacgattcggccggtcgcttcgatcttcgcgctcttgttgaattcggcgactacggtctagcagttggtggcgttgctgatgccgctggtggtcttgacggtctatccgttggtgctggtgcaacattcggcaacatcactcttggtctatcgtacgacgaagctgacctttcgatcgaaactacaccggttggcgctgacgtgcttgcaactactggtctaagcatcgacacaacattcggtgctgcttccatcggcctgtcctacatcgacaatactgtagacacatccatcggtcttgaagttggctacgacgtatccgcagacctttcggttgctgcttactacgcagacaacacaggcggcgacaacaagtacggcgtatctgcagcctacacatcaggcgcacttggcctgggcgcatacttcgatagcggcgacggcgctactgttgacacaatgggcgttgacgtttcctatgacgtgatggctggcttgactggttatgttggtgcgttcgacaacggcacaacaactgacttctacgttggtgctgtttatgacatcaactccaacctttcggttactgtatcttatgcagacgccaacgaaatttccggtcctgaattcatggacggtacttcggtattcatctccgcatcattctaagcctaacggtttagtttagaattagagagggcgggccgcttggctcgcccttttcttttgttctcttgaatgagaacgctgcgcgcggtaggcattctttgtaaccggaggatgacacacatggcgcttttagatattcaacaacgtattggtgtggccacgaaaaaggctgatcgggccgaggggtcggtcaggctaattgctgtctccaaggtccagccgaacgcgcgggtggcggatgttctggaacaagggcatcggttgttcggggaaaaccgtgtgcaggaagcggcgggaaaatggccggatttcagggccgagtttacgggtgtacaagtgcatcttatcggcccgctccagtcaaacaaggtaaatcaggcgctggaactgtttgaggctatccataccgttgaccgcgaaaagctggcgaagaagttggctgatgccgtgcagaaacgtggcagttgccccgaattattcattcaggtgaacactggcgaggagccgcagaaagccggcgtgctgcctgccgaagtggatagtttcgttaaaacctgccgcgagacgtacaacctgccaatcgccggattgatggttatcccccctgtgaacgaggagccatctttgcattttgccctgcttgccaagatggctgcgcgcaacggtttggacggattgtcgatggggatgagcagtgatttcgagcgcgccattgcgctgggcgcgacgcatattcgggtgggttccgcgatatttggcgaacgggtgccgagcgttaacctttaggatttgggcggaaataccgtgtacacaacacgtacacaatgcgtacacaacacgtatgtacgatttggggcaatcgcacgttaaccttttgatgacgcgcggcgcgacctgctgcacttttgccgcgcaagggtcggaattttaccgacaatcattcaattcaagagcacttattcgcttgcataaacatattcacaacaatatattcatctttatgaatatgtatctaaacggagaaatcgaatgatacttaattggaaagtcgggggcgtattcctcggtgttgtttttctggcagccgtgctgntggttaaacctatcggggtttcgacccagtttgtaatcttggatggggcgatttgggatgctgttaaccccgaagtcattacccagacggacgacggggcgtatacgtccaccaacccatatctagctaaaagtggcgggaagtacgccaagaatgcggcgaacccgtggaactacagctttgtatttgtgattgccatgatggtgggggcgggtgtttcttcgttccttcgtaaaggtgtcaaaaaagaagaacgcaacatgcctgatatctggcgtgagaactttggngactcaaacatcaaacgcttcgcggcgacctttatcggtgggttcattgttgtgtttggtgcgcgtctggcaggcggatgttcgtccgggcacatgatgagcgggctaatgcaaagctcggtttcgggttacatgtttacgctcggggcttttggcgcggggattcctatcgccatgatgatgtataagaaaggagcatgatccgatgactactattattcttgcaatcgttcttggcgccgcgtttggcgtggctttggatcgaactggcgcatcaacgcctgcgtatatcgtacggatgctgaaccttacaaacctgcacttgatgaaaacaatcctgctggccattggtgtggcagctgtattgatgttcggtggtcaaatgatgggcctgatcgagatcggtcacatgtccgttaaaacagcgtacgccggtgtatttgtcggcggcatgatgttgggtgtcggttgggcagtggctggatattgcccgggaacaggtctatctgctgcggccgctggtcgtcgtgatgcgatggttttcgtggctggcggtttgcttggcgctgcggcctatatggttagctacgcttgggtgaaaacgactggcattctggatagcatgtttggtggcaaagctactgtggcagctgttccaggtactgagtacccagccctttttgagggtctgcgtggcgacgttgtcggcatcatccttggcttggtattcattgccgtggcaatattcttgccaaacaaaattggcggaagcgacaaacttgaaaccgttcctgccgagtaaataacttttccggggctgcgcttgtggccccggaaagacagtggcgataccttgaaacgccagcacccgctatttttgtgcggcttcaactttcagtgcagaaaatttgaattcgggaatttttccgtaggggncgagggccgagttggtcaggatattggccgctgcctcgacgtaggcgaaggggaggaagacgttgtcttcggcgacgctgcgatcggcgcgggccattatggtgatggagccacgacgtgtcgtcaagcggaccatgccgcccggttctgtacccagctttttcaatgtacgcggatggagggagcagttagcttcgggctccattgcgttcaaaacggtggcgcggcgggtcatggaacctgtgtgccagtgttcgagctgccgccctgtgatcaagatgaacgggtattctgcatccggtgtttcggcgggcgatatgatgctggcgggggtgaaacgggcgcgtttgtcggcgcgtgggaagccgtcggtgaaaacaatcgcttggcccggatcttcgggggataggctgggataggtgacggtttcgcgctcaagccgttcccatgtgatgttgtctagcgaccccatcaccagtttcatttcggcgaatacatcgcgggggtgatcgtagttccaatccagtccaaggcggtttgcgaggtcttgggttatttcccaatcggggcgtgcttcgccgggtgatggaacggcggggcggcccatctggacttggcggttggtgtttgtgacagtgccggatttttcggcccatgcggcggcgggcaggatgacatcggcgtaattcgcggtttccgtcaggaagatgtcttgcaccacgaggtggtcgagtttggccagcgcgtcgcgggcgtgttcaacatcggggtcggacatggcggggttttcgccaaggatgtacatgccgttgatgtcgtcgttgtggatagcgtcgatgatttcaacgaccgttaggcctttttcagcgccgaagtcttcagattgccaaaggtcggtgaatttggcgcggatcacatcgtcggtgacggtttggtaatcgggcaggaacatcgggatcatgccggcgtcggatgcgccttgcacgttgttctgaccccgaagcggatgcaggcctgcgccgggtttgccgacattgcctgtcattaaggccaaggaaataaggcatctggcgttgtctgtgccgtggatgtgttgggatacgcccatgccccagaagatcattgcagccttggctgtggcgaattcacgggcgacggtgcgcagggtatgcgcgtcaattccgcagataggggccatggtttctggcgagaaacctttgaggtgagttttcatcgcctcccagttttcggtgtatttggcgacgtactcgacatcgtaaaggtcttcttcgacaatgacgtgcatgatggcgttcagcatggcgacgtctgtgccgggtttgaatttcaggcggtggttggcgtggcgccctaagccgacgccgcgtgggtccatgatgatcatgttgccgccgcgcttggaaaattgcttgaaataggtggcggcaacggggtggttctcgatcgagttggaaccgatgatgatcgcgcagtcggcgttttcaatctcgttaaaggtggcggttacggcggcggaaccgacgttttccatcaaggctgcaacggaggatgcgtggcacaggcgcgtgcagtgatcgacgttgttgtggtggaatccggcgcgaatgaatttttggaacagataggcttcttcgttggagcattttgcggagccgaatccggcgatggatttgccgcctttggtgtcgcgcagatgggcgaggccgtttgcggcgacgtccaatgcttcttcccatgtggcttcgcggaagtgggttaggggattggcgggatcnacgttcaggcctttagcgggggcatcgtcgcgccggataagaggtttggtcaagcggtgtgggtggctgatgtagtcgaacccgaagcggcctttgacgcagaggcgattggcgttggcagggccatctgcgccgtccacccatgcgattttgtcgtctttgatcttgaaggaaagcaagcacccgacgccgcaatatgggcagacggattgaacctcgcggtcataatcggtggtgttctggctggtcgcggccatcaatgcgcctgtcgggcaggcttgnacgcattcaccgcaggccacgcaggtagaatcgcccatcgggtcgttgaaatcgaaggtgatttcggcgaaggcaccgcgccccgacatgccgatcacatcgttgacctgnacttcncgncangcncggacncanaggttgcagtggatgcaggcatcaaggttnacgttcatggcgacgtggctggaatcnagnaanggganggcccctgatttggggaancggctgnnngtgangtcttgggctttggccatnnttgataggtgcgaggatgtgtcgtgngcnnnntccggttggtctgctagcagcagttccatcaccattttncgcgatctntgggcgcgntcggatgcngatttgacggncataccttgngtgggngtncggatgcaggangcngccaagacgcgctcgccatcaatttccaccatgcaggcncggcagtttccgtcgctgcgatancccggtttatcggantggcacaggtgnggnatgtncgtgccnanncgtttggccacttgccagattgtttcatcngcngnngcngtnacntctgtgccatcnagggtgaangtgatctggtcggncatcgnangctccggtnnngggnttgatnnnngatnntaancangncgntnnnncgcaanncnngnnngnnacgacntgtgntncgtnttanccgacggggnnngtngcggcnanngangggcgntcgngaatttcggcttcccatgcggcgagggttgggtgcgtgtcgcgccaattgcggtcatcgtggcgaaaatcgacgtagccaagggcggcggcaacagcgaggacgggcaggtttttctgctcgttcagctgggtcatccagcgggtttctatggcggtcagggcgcggtcaaccttttgccattgggcgtctaggtaggcctcgaacaccatttcgtccgtgcggaggcggcgttcataggtcatcgttacggtggcgtccatgatcccgtcggctgtggcttcgagggtgagcgcgtcccagatgctgtcgtcgtcggggtaaagtccggtggcgggggcgagcgtggaaaggtatcgggtgatcacgcggctgtcgtaaaggttggttccgtcagccagctcaagacacggaattttgccaagcgggttgtgcgttggcacgatgtcaccgggggcaatcgggttgacagtaacggatacgagctcgacttggtccagcaggtttgtttcatgcagggcaatcaggactttgcgaacgaacggagatgcgggggcgtagtagagtttcatggggggcctcgattggttgagttcggcctagtctagggcctcctgcatcatctgggcaagggctgatagttcggaaccgatgtttgatgtggcaaggccatcggcggcacccaagcgggcggtatccggtttgttttgacccagttttctggtgctgtcggttgacgtgatgtcgaggcggatcgggacgatcattggcattcgtttgtctaggatttcttgtgcgactttgtcgattttccaaacgggtttgggggtgaggcgggtttcgaactcgtcagacaggcgttcaagcacgccgcgtaggtcgtcttgcggtaaacgggaaagttggccgcgcaggtggacggcgatgtagttccatgtcgggacttggttttcaacgccgtaccagtcgggcgagatgtatccgtcggggccggaaaccgctagcagtgcgggttgcggtattttcagggcgcgcgcgatggggttggagcgcatgacgtgggcctccacatagctgccgtcgggggcgatggtgaacggaacatgggcggcgattgggccgtcggcaccgttaatgctgaggatgccgaagccgcgttggctggngaaatcaatggcggtatcggatgaggctttgcggaatgccgggtttggatgcatgggtttggccttttatttggcgagcagttgtttgccagcctgtccgattatcgtggcgtttacaatacgcccgacgtcttgggcggcgtcgaaatggacctcggtgaaggtttcggtgcggcccatgtttgggttttccatcaggatgctgtgtttcgtgccgatttgggatttcaggtggtgttgtacccgtgcatcacctgcttcgcgaaggcgggcggcgcgctctttgatgattgcaccgttaacggggggcattcgtgcggcgggggttccctcgcgggcggaataggggaagatgtgcagccatgtgaggccgcaatcctcgatcaggcgcagggagttttcgaacatctcgtcggtttcggtaggaaagcctgcgatgatgtctgccccatagataatgtcggggcgagcgcggcgcatgtcttggcagaactggatggcgtcttcgcgattgtggcggcgtttcatgcgtttcaggatcatgttgtcgccagcttgcaaggacagatgcaagtgcggcattagccggagttcggaggcgattgcgtcgatcaaggctggatcagcctcgattgaatcgatggaacttatgcgcaggcgcgggaggtccggcacgaggcgcaagatgcgttggacgaggtcgccgagttttggttgtgcgggtaggtctgcgccccagcttgtcatatcgacgccggttagcacgatttcgttgaagcctttatcgacgaggcgctggatttgttcgaccacaacgcctgcggggacggagcgggaattgccacggccaaaggggatgatgcagaaagtgcagcggtggtcacagccgttttggacctgcacataggcgcgtgcgcgggtgccaaaaccgtcgatcagatggcctgcggtttcggtggcggccatgatgtcgttgacttgaattttctccgtctcgccaatgaaattgggcttggccagcgcgttccatgtatcgccttgcatcttttcgaggttgcctaggactaggtccacttcgggcatatcggcgaaggtttttggttccgtctgggcggcgcatccggtgacgatcatgcgggcgccagggttctcgcggcgcagtttgcggatgcgttgcttggcggaacggacggcctcggatgtcaccgcgcaggtgttgatgacgatggcgtcgtctaggccagcatccgcgcccagctcgcgcattgcctcggtttcataggcgttcaggcgacagccgaaggtcgcgaaaattggcggggttttggtggtcatccggcggccttcaggaattcttcgctgagggttccagaggataccagcatggttgggccggtcatccagacgccgtcttcgcgccagtctatctcaagattgccgccatcaagatgtacggtgactttgcgatctgtcaggcctttgcgaacggcggcgacggtaaccgcgcaggagctggagccgctggcgagggtgtggccaacgccgcgttcccatacgcgcacgcgcaggtttgaacgatcaagcacttggacgacctgtacgtttgtgcgttcggggaatagggcgtgattttcgatacgcgggccgagttcatcaagatcaacggcggcggcatcgttcacaaagaaactacaatgcggattgcccattccggtggcggcaggtgcgccatcaatgggcaggtttatcgtgtctacgttttcagccagcgggacatcttgccagtcaagctgcggttggcccatgttgacgcggatcaggccgttacccgcatcctcgcacatcagatcaccgcgaccagttctaaggataacggagttgtcgcccgtttcggccatcataaggcgcgccacgcaacgagtcgcgttcccgcaagcgcctgataggctgccgtcggaattccagtaatcaacggcggtgatatcgccttccatgcggatcagggccagttggtcaaagccgataccgaaatgacggtgcccaattgcgcgcgccaaggcaggcgtcatcgggttgtcgcgcctgcgggcgtcaattaccacgaagtcgttgccaagcccgtgcatttttagaaatgcgaggccgccgttatcagagtcgtttgtcataggcgctatataggcgcttcggtcggggcagtaaacttttactgtaatatggcggttttggtctcctaggggtatattttccggcactatagtaatggtaaacctatatcgctgtgtctggtaaagttggaaaaatccttctggagaagctggatatggccatttcatcaacgctcggctcctgaattggaattttaatccaaagagacaagattcgcccttgacccgacacgcatccccgcctagttaagcccccgatgggccggtagctcagttggtagagcaactgacttttaatcagtaggtcccgggttcggatcccggccggctcaccattttattatgatatatcaatgccttctagcgattatacgctggagggcatttttattttttggcgccggaagcatagcggaagcaacatgacgtgagtttaatgcggaatcggcgtagtttttttgcaacagaaatcgctggagaagttttgaataacaaatgggtcatatgcttaaactctaacattatgccccaaacaaaaacgcgccccgtagggcgcgtttcaatgtggtgcagtctaagctacttgttaacggctcgactacgatttctgaatttctttaggttgcatactgtaaaccaataagtcaacctctgatcatttggaggattgctatgcgactcggcttagatattggtacaaattcgattggttggtggatcttcgcgcaggatagccaaggcaaccctgtgcaggtcattgacggcggtgtgcggatatttgcagatgggcgcgatccgaaatctaaggcttcgcttgctgttgatcggcgtgttgcccgcgcgatgcgacggcggcgtgatcggtatctgcgtcgtcgtacggtgctgatggaacgtctggcggctgctggattgatgccagcgaacccgattgcgcgcaaagcccttgaaaggcttgatccttacaggttgcgggccaaggggctagatcatgctttgaccttaagcgagctggggcgggcaatatttcacttgaaccagcgtcgtggattcaaatccaaccgaaaaaccgacagaaatgataatgacagcggcaagattgcttcgggtgcggcacggctggagcaagcgattattgccgctggggcgcggacctacggagagttcttgcaccaacgtcgcaagacggatgatccacgcaaaactccggccgttcgcacccgaatgacgacgttgacgctgggagacaagcccgaggaagggtatgatttctaccctacccgcaacctgctggaggaggagtttaacaagatttggcgggcgcaggaaaagcaccatgtggagcttacggatgaattgcacgacacgttgtttgagacgattttttatcaacgcccgctgaaggcccctgcgattggacgttgtttgttcgaggaagaggaacgcttgcctaaagcccaccctttgtttcagcgacgcatcctttttgagaccgtcaacgccctacgaattcgcgaagctgggcagtcggatcgcccgctgacattggaagaacgggatacgctgatattgcaactagacggcaagaacgtaaaaggaaccgccagcgcgaatgtcagttttattcagatgcgtagggggctaaagctgggcggtgaccagtctttcagccacgaaacccagaaccgcaaggggattgattgtgaccgtttacgggcgctaatcacctatcccgaacggctaggcgggcgctggagcggcttggatactgatgcgcagtgggccttggtgcaaaggctgcgcgacactgaaaatgctgcggagttggaggcgtggttgaaagctgagtatggtctttcggaggcaagagcgatgaatgttgccaacactccgctgcccgagggatacgggcggattggactaacggcgacgcgcaaaattctggagcatcttatggccgaggtaataacttatgacaaggcggccagcgaaatctacggagatcatcgcgggattgctactggcgaaatattggatgagttgccgtattatggtgaaattctcgataagcatgtcatcccgggcacaagtgagccttcggatgacgacatcacccgctttgggcgcataaccaacccgacagtgcatattgggctgaaccagatccgccgcttggttaacaagatcattgaggtgcatggcaaacctgacgagattgtcgtggaactggcgcgcgagttgaagcaaagcgaggaccagaaacgcgagattaacaaggttattcgtaagaacactgacgcagcaattgagcggggtaaaaagctggaggagctgggccagcgcaacaatggtgcaaaccgtctgatattgcgtctatgggaggggttgaaccctgatgtcatggaccgccgttgcccgtatacgggcacaaaaatagcgggctctatgttgtttgacgggtcttgtgaagtggatcatatcctgccctattcgcgcacgcttgacgattccattgcgaaccggacgctgtgtatgcgcgcggcaaatcgtgagaaaggtaacaagaccccgtgggaggcatgggggcatatttccgagaggtgggaacagattgcaccgttgatcaaacggttaccgggcaaccagcaatggcgctttgcccccgatgcgatggagaaatacggcgatgaggcccagttcctagaccggcaactggtggacacgcagtatcttagccggatcgccagagaatacctgtcacggctttacccaaccgaagaatcccgtgtttgggtgacacccggtcgcttgacggaaatgttgcgtcgccattggggactgaattcattgctgggggatcacaatctcgccaaacccaagaaccgtcatgatcatcgccaccatgcgattgatgcagcggttattgcggtgacggaccgtagcctgattaaccgcatttcgaaaatggcggggcgcaatgagaaccttgaggacgcgacgtgcaagatcgccccaccatggaaagccttccgtgatgatctaaaggcacagcttgacctgatcaccgtcagccaccgcgcagaccacgggcggattaattttaacgggcgcagtcagggacgggattctaccgctgggcagttgcacaacgacaccgcctatgggtttaccgacgaggagggcatcgtggttacccgaaaacccttgcttgccatcaaacctgccgacattggccgtattcgtgatacggacctgcaagcgcagttgtatcaggaagccgagggtctggagggtaaggagttcgaggcggcgcttgctaaattttccgccaaaactggcccatatcaaggtatccgccgtgtacggttaagcgaaaaacttaagactatcccgatcaaggatggtcgaggaaagacgtataagggttacaagggggattccaatcactgcattgaggtttggaagctgcccgacggaaaatggaaggctgagcttttgacaacttatgacgcgcaccaaaacggtctcggctctactcgcccgcatccggcggcggggttgttgatgcgattattcaagaaagatgttgtgcagttggagcatccggaggaagggtcgctaacagccataattgtgaaatttaccgaacaaaatctatcactggccccgctaaacgaagccaatgttgatgcgaggagccgttcaaaagatgatcaattcaaattcttgaacgtcggcactggcacctttcagaaacgcgcccttcgtaaaatacatgtcgatgaaattgggcggattagaaacactccggcgggagggcgttagactcgaatcacccgctgcggtaccattgcgttttgttaacggtattgggatgcaccaagttattgatattgaaagcgacaatcggcacctctcgcggtatcgcggttttttggtggttaccgaggagcatacagaaatcggccgcgttccgctggacgatattcttgcgatcatagtccatgcgcacggcattacatattccaactcgttgttggtggagctggccaagcgcggcgctaccgttgtgctttgcgctgcaaaccaccaccccgaagccattctctggcccctgcaagggcatcatgcccaaggtgcacgaatgcgggcgcagtgggaggctccgaaaccgatgctcaagcagctttggaaacaggttgtgtgcacaaaaatcgtgatgcaagccgccgcccttaccgcatacggacacagcgaccatgcgcttaaccgtcttgccaaaaccgttaaatccggcgacccagagaatatagaggcgcaagccgcccggaggtattggcctttgctaatgggtaaggaattccggcgggatcgtggtgaggacggcactaatgccttgctgaactatggctatacagtgctgcgcgcggcgactgcacgtgccattatcggcgctggattacacccgacgatagggctgcaccactctaatcgttccaatgcatttgcgctggccgatgaccttatggagccgttccgccccctcgttgactgcgcagtcaaaggtcttttgactcgtggcattgccgaggttacgccggaggcgaaacaaaccctagcccgcctgattgccttcgatcttgattttggcgatacccgcactccgttgcgtgtcagccttgaaaaactgacgcattccttggcgataagttttgagcagggcaagcccgcgctggttctgcccaaaacaccgccaccgctggaactagcggggctaggatgcgaatgagcaactatgatctgaaatttttaagtgggtataggctattgtggatacttgtgatgtttgacctcccgacagatagaaaaccacaacgcaaggcggcaacaaaattccgagagtatttgctggatgaaggtttcgagcgcagccagtattcagtctatgctcgtttttgtaacggaaaagaggcgtttgacacccgtgttcgccgaatagagaaaaatttgcccggatatggcgatgtgcaaattctgcaatttactgataaacaatatgagaatatcatacgattctacgatcagggtcgtcagaaacaaaagaaaaatccgaatcagttggtgctattttaagatgaagcaatactttcatacacctacaagacaaataataccttgtaaaatcaagatattacgcgatcatctaattgtagccattcagaaatcgtagtccagccgcaacagaccacccaagcgatgaaatattcccgttaattgtagccattcagaaatcgtagtccagccgcaacaaagcacctgaagcataacccgctatgtgtaattgtagccattcagaaatcgtagtccagccgcaacataacctgccatgtaccagcaagcgccgtcaattgtagccattcagaaatcgtagtccagccgcaactggcgcatggtttggccgcgcgcggatttcaattgtagccattcagaaatcgtagtccagccgcaacaaatcttggagttgttcgcaataacttcgaaattgtagccattcagaaatcgtagtccagccgcaacttattgcgggcgggttgccccggcacgaaaattgtagccattcagaaatcgtagtccagccgcaactcacggctcaggcatttgataaaaccatctaattgtagccattcagaaatcgtagtccagccgcaactaatcgttctcgccaccccaatacggcggaaattgtagccattcagaaatcgtagtccagccgcaacaaagcgatgccacccagtggatcccgaaagaattgtagccattcagaaatcgtagtccagccgcaactagttgtatccgctatgataacgtcaatcgaattgtagccattcagaaatcgtagtccagccgcaactcggcaagggaagcagttgcccaacgtgcaattgtagccattcagaaatcgtagtccagccgcaactcatgtaggcatcggccacggtctggctgattgtagccattcagaaatcgtagtccagccgcaactctgcgcgccgaataccgccaagtacttcgattgtagccattcagaaaaggtacaagagtccgcttccaccgtttcgaaatctgtactaagtgcttgcagcgaatgtctccttctcgcccaatgtggccttcatcgcgaatgccgttcaacatcaccttttgctagcttcgccagccgggagccttttgtaacactcgagggcgctttcattgttccactgttctgtgaaatcattggcgcccctaattgtgagtggttggctgaggtatcgggtttttcttttttattactttctttttcttttttctcttctctctgtttcgatacggtatctaacggtttattctggctcggttgcaaattgttggaaagtgctgcgtccggataaggtagcgcgtacttgaaccccaaagatttcattgcgttttggtaggatttagggagttgggtaagttgttcttcgatgcaattggaaagcccgtattcggtatcttcatcaacttcgagcatgaaaactttcagtctcacgacaagcgcctgaaagtctttagattccttttccgaccatcgtttcagtttgactgccagtactgcgcagaattcagctatttgcctgaccatcattggtggtaagtccattttttccctgaatattgaaataatgccgctcgcttctttagggttgctaggcggtttatttagaaaccagccagcgacacgtacggatttatcttggtgatcgtactcgagtaaattagccgcctcgagttcgataatggcaactctcaatgagtctaaagttacccttgcctgcctggaccaaatttcttccgggtagcagaatatgccgattgggttattttggcggctatgaaatacagccataagaaccatacggacgtcacttgatgataggcgatcccagctatcgtcttcaaatttattacagctcattattgagaattttctacctgacatattgtgcctcccagcggattttcggttgtacgtttaccgagtttgctgagatgtattgctgacggttttgtcttcgacccattcgtgaatatctccaatgcggtatcgaattgaccgtgatgaaacttttacaaactttggcccgccaccacggtgtcgccagttttgaagtgctcgaatggaatagcagagtaaatccgcagcttccttttcgtcgatcaggcggtcaagatttacgatttgatcttcaagtttgttgtattggttcatttgtgctctccctttattgagcgtgaatatttgtcatgctcaagagataggtcagcgaaatctaacagaatagacgacacaaactaatagttcatcgcacctgagtgcgtcgaactatattcactattatcaaggagatatgaggaattactgttcacgtagatatttcagagcgcgagtgactcgaactatttttttctaacagggccgggcttagaccagctctgcggtacaacctcttgccaaacccggttggcttcccttttcggagtgccaaacttcaaaaccatttcttcgatgaaacgcgattttccataaggcttcgatccagatttatcgacttgctccaaaagccaagaacgggctctttgttttggcgcgtattgttcatcatcgtagatgccgcttccgaacctttcggcccattggagaaatgcttttttgtcgacaaacgctggacttcgtctaaacgcaattatttggtgatgcggtactatgatcattgaaaggcaataatgaaccttgaacgatggatagtgcgaccaagagcgccaatcggcgaggacattgcttcgcagttgagctgttagagatttatctgtgaaggccttccacaactcttgttcgacggacactcgtctagaaaacaactcgaagtctgcaatgtatgaatccgacatctgcggcaactcggtaagtctccgttttagaccatctatttcagcataattgatggcgtaatcactgttaaaattattttttgcttcgtgggtcaggtgctcttgcggtatcgaatttaattgtgtttgaagcgcgagcgcagttgctagggtttttccaagcgtgtcccgttcaacagccacggggtttggatcgtcggcgggcttcgaccaaatttctcgcccggtccaaaggtcgcgaaacatgagttggcccgttcgttcaaaaacctcaaacagcgagtagtattgtgtaatgtcgaattgtagcaaaacgcctccgggtaaatgcctgattaatcgtcaacggctttatatagtatatatagctcccctacgtacgtaacgtagcgttacgtacgtagggggaattccctatatatacctataggaagaggggcaagattacccaacgatacggaacggaacgttgacgacctttttcctgcgaattgatccagccagccgtgatgcaatgaattcggcattttgccttacgtcctcgtcgtcgagatgcgcgtaccggagcgttgtctgcaaatttcggtggcccatgatttccttgagtttgaacgggtcaacattgccgcgcatcgccgccgacgcgtacgtatgcctgagatcatgcagacgcacatcctcgatcccggcttgttttcgtatccgagtccatgatttctgtaggttaaccattggacgatctggacgtctgcctcgaatgacgtagggtgtgctttcgtggcggggtaactccatcaagatttcatatgcatcactgggcaggggaattcgccgttttccggttttactatctggaagctccaagtgatgtggggtcacatactcccagcggagcgtcagaatctcgctgaggcggcatccggtcaaaaccagcagttggatggccgagacgctgtagatggactctgtgccgccttctagactctctgagagcacttctccaaggcgtataagttcgttgtcgcgaagatatcgtttcttttcctcttcccgaaatttcttgatccgacgcgctgggtttgtgccgccggtgcgcaatccccaatcttcggctagattgaacatttttgagaggacgctcagggaacgattagcctgatagggcgtttcacgaagagcgtgatgaaggttaactatatcggcgcgggtgatgtccgcaactttgcgagggccaagatgggggttgatgcaacgtcgaactatacttttgtaatcccgtgcggtcatgggtttgcaatgttctgcaacgtactcgattaaaaaccgttcactgagggcggcaacggttggcgcttttaacctcgattgcctgtcttcggaaggatcaccacctttcgcaacttcgccaaggagttttcgggcttcgtctcttgcttcaatcgcggtgagcacgccgtgttgcccgattgtgcgtcgcctcgttcttccgctggcacggtattgcacaaggtaggtctttcgaccggaaggatatatgcgaaccccgaaaccggaaatttcccgatcccaaacgaggtattctttctcttgcaattccagcccttcaacagagcgttttgtcagtttgaacatagcatgaactccggttgtttgtttctgcttccggaagcactacggaagcaacgtgaagcgaattgtggagttattcatgagtctacagcgtaaccatagtcaagaaaaaacgtttaaagtcatgcgtttatgggtggagggcggaatttggcgtaatgtggagaaacccgccaaaaagaacttttaatcagtaggtcccgggttcggatcccggccgtatcaccattaaattcaaaggcttagatggaaacatctaggcctttaactttgcctgagacatattgtggcgcattttcataagttggtggaatagctgatgttggcgggcctgggataaagccatcgtggaacccgcttggatggcgcgggcgtataggtagaatgcgtccgattccgttagcaggcggcgtatttgtgcttggcgccattggatggatttatcatgcaaggcggatagtattttgtcggatttgtatcgcgacaggattggcgcggaaaggttagtggttcgctggatgctgtggtcttcgacgtcgttgaaatttctgtctacccagtacgccaaatcaattgcatcggtggaatggttcggcttgccgcgcatttctttgacgaggtaattttcgactgaccccaaggcgtagtggttgatttgtgccaattcgtactggtcagcaaaggtcggaatcagtgttgaaccttttggggagttgcctggaaacggattgccggagccgtcgcgccagatggtttgcggttgtttttcggcgttgggtttttttggcatgtggacgcccagtttttcgtatgacccgtcattgcggtacagacatttgaactggattgcgcgccacggccataacatgccggtgggggcgcagcgggtgaactgttctgtgactggctgatcttggaaggcggtgatgccgttgttgccaaacatgcgccatgccagcgcgaagccggtggtgtctgggctggcggcgaacaggtcattcagatgaccatcgcccactttgatgttaagaaattcgtctacgtcggttccataaatccagtctacttcttgcatgatcggctgggtagcagcgtccgatagggcctgccattgcacggtttttttgccaagcgcggggttgggaatgtgggtgatctcgcccaattcggcaaggcgatccaacatcaggtctgtgccgtcttcgcagtcgttggaatagatcaggaagtctgtaaaccctatggctttgtggtgcgcgagccattccagaaggaacggcccctcgtcacgcatgcaggttacgatgagggcgcgggtctttgggggattgggcatcgtttgacctgttttaagcgaattttcgcatttatatgcgacttttccatatttcggaaggtttcttgttggttatttgcgcggtaaatatatacgttggttggattgaattctgacgaaacaggcatgaatgtgaaaaaattccaccattttgaagcaaattcgacgattccaaaggtggagtatgctgcggagttatggccggaggctgcctcaccaacggctctgccagagatcattgatgtcgtgaaaacagcggatttcacgcgggtattttgtgcgggccattgggggttggtggtcgatgggcgggcgttgaagctggccaaagcggagcaggtgaacggtttccccggtgggtattttgttgatctaccgccgntggggaaggtgaaaattcagggcaagcgcacggtgaatgccagccctgaggctacagatatttttgcagaccttaacgttttatttgcaattgagtgtaaccccgaccctgtggatgttgcggactgggttaagtttaatgtggaaaattcgggggcggatgcggcgctggtgatccggcgtatttcgcccgatgatcatgcgtatgacgtggcagatttccgaaaggcattgcgggggataaaggggttaaagaccttcgtgttgctggattacgatatcccgttgggcaagcccggccagcccgcggaaagcgaccggatggttgcaccggaggcccccggtaaagcattgttggacacgcctgaaaacgacatttggcatgcgcctttggggcagttcggggtgtatgcggcggcgcgtttccggttccttggtgcggcgcgggcggtgctgcattgcgcgattgcggatatggttaatacgaggggcgaaagcctgtttgatctggcacatgcggggccgtcctatgtgaaggctcgctcgcggtatgtgtatccttggaagatttcgagggagggcgcgccgcatataggggaccatagctgtgtgcggttcgatagtgatatgggggccagtatttggtgtgctgacccgaagatggaagggttctggcgaccgtttcgggcgggtcaaaaaccgccgcaaatgctgggcgctacgcctgaaatatggcggtgcatggcaattcggcacaagcatctgaaggtttccgagcttgttccgaaatctagtctggtggttgcgcccaggctggttaaggctttgaaaaaaatgctgaacgcaaggccggttttgccgccttcggttgatggggcgatggataccctcaagaatgaacgggttttgattgttaccaccatgaaggatgaaggcccgtttattctggagtggctggcctatcatcgctccatcggggtgacggattttctggtttataccaacgattgcagtgacgggacggatgcaatgttcgatctgctgcaagaaaaaggccatgtggagcatcggcaaaacccttaccgcgaggtcgggttgcggccacagcatgcggcgtatcaggatgcctcggaaagtgatatcgctggggcggcggactgggtgatttgcatggatgtggacgagtatatcaacgtgcatgtcggggatggcacgctgcacgatttgtttgcggcagtgggcgaagcgaacattatttcactgacatggcggctgttcggaaatgccgagattgtcgattttgaagacaagttcattaccgagcagttttttcgcagtgcccccaagttcatccgcaaaccgcatcaggcgtggggcttcaagacgatgttccgtacgctagggcattacaagaaatacggggtgcatcggcccaaagggttgcggccagagatgttagatcaggttaaatgggtgaatggttcgggcaatcccgttccggcgaaaatgctgcgaacggggtggcgcagttcggtcgggaactgggggtatgggctggtgacgttgaaccattattcgctgcgatcagccgagagctttttggttaagcggttccgtgggcgggtaaatcatgtggatcgggatcaagggctgatttattggtttcgtatgaataataacgcaacggaggatcgttccatcctgaacaaaatcccgcgcgcgagggtggaattcgataaacttatggcggatccggatattcgtgggatgcacgaacgaagcgtgattgcacataaggaacgggttgaatcgttgctgcaaagcgatgactacaaggcgttgtttgaagaggttacaggcgagcgtttgaatgcactggcgcagatgaaccatcatttcgggtcgcagatattcacggatgggccggacgctattccggcggatttccataccaaaaataccacgcatgacgaggccccgccagaggtgccggcggatccgaaaccgccggcaaaaccgtatttttcctagtggcggaagtggcgcattccggtgaagaccattgctaggtcagcttcatctgcggcggcgattacttctgcgtcgcgcatggagccaccgggctggatgatcgccgttgcgcctgcttcggcggctgttattaggccgtcagcgaaggggaagaaggcgtcagatgctacgacggacccgatggttggcatttggggtaatcccagcacctcggccatgtcttgggctttgcgtgcggcgatgcgggttgaatccacgcggctcatttggcctgcaccgatgcctacggttgcgccgtctttgacataaacgatggcattggatttgacgtgcttggcgacacgccatgcgaacatcaagtcggccagttcggcctctgtcggcgcgcgtttggttacgactttcaaatcatccattgatacaaaaccgttatcgcgatcttgcaccagatacccgccagtaaccttgcgccaagtg

SEQ ID NO: 3684 - DNA, 22475 bp, synthetic construct
  variation 16913..18141: note = note, n is a, c, g, or t
  source 1..22475: mol_type = other DNA
  variation 13916..14143: note = note, n is a, c, g, or t
  variation 14448..16404: note = note, n is a, c, g, or t
  misc_feature 1..22475: note = Synthetic
gccagatccaaaaaggccccctgctttaggggggactcgtcaaacgttgacaaggcgttgacaagaactgcacaagcaaaagcccgactgattaggtcgggctttaagcgtttgatttggcgctgtattttggttgcgggagtaggatttgaacctacgaccttcaggttatgagcctatggacccagatttttactaatcttttcaattcagtagcttagctcgcaagcctttgaattcacaaaacctgatggtcgtcgttcgaaggaagtggacggatttcgaaggattgcagcggtttaaaaagggacaaaacagcatacgtcggttgaggtggcgttgaggtgaaaccgggtaagattgacaacctatgtctcattcttggccagccgtatgcgggtgtctatcactcctgaagcccatttttgcggtggcgcagaaggtagacgcttacagcagatgcgattgttacgaccagctctgcttcctcaaacttcggttcccgtccctcttgaatgtgacgtccctgctcggacgcaaagccccacagcttatgaagcgcttggtcgagagggcgcggtaaggtcaaccgattgatgatctggcccaaagtatcgctgctgccatccacttctcgtgctacgcattcaagcgcagccatcgcatgctgaatcgcgccggtaatgtctgcatgcgggcgtcttgaaatgtccgatagcgcctcatgaatttcatttgctgcagttggtgcggcggactctcgcatgacggcaaccgcatcttgggtcgtcaatgtaaaggcttcggatccgcgcgccatcagttggccagcttcaagctgccagccgactccaagttccttaaacgactggttcaagctagcttcaaactgccgctgtcgatccccggtgaaatctgcttttccgacttcaacgtacaggcgctcgacgaagtcataaatcttgtaccaaggtgcaccgtcggcgagttggtgaacctcgttttcaatatttccagccgaccaatttcctgggtctggccgttttagcagtacctcacatagagcatcccgcattcttccaggtccaaccccattgcggtaacccaacatcacaaccgcatcccgcacctcatcaggcgcactttcacgtaccgaaatctcggctgcaggtgcatggaatccgaaccgttcagaaaatggtgagctatcccgagtcatctgacatccatactactttgtccctgcagcgaagatgacgatgaccagcagagcggctgtcgctatccgcgcgttcaaactaaacggctgaacgatcactgctaaaggaacgcaaaagcagttcgtacacctgtgaacatgacgcaagtttcccattctctcaacccgcaccggaacgccccacccctccccaattccggtctccgcctgcattccggtcctgtcgccatgctttgcttgatatgggcgcgaatctacgcctcatgtcggacgagcgaaggagtgcgatccatggtcaacaggctgaaactgaatgagaaaactgtccgggaggccgagaacctggggcgggattaccagatcttcgacaccgacgtgcgcgggttttcgattaccatctacccctcgggcaaccgggccttcaccctcgactacagggttggcggacggcagcggcggatgaccatcgggcgctggccggagtggaacacggtcgcggcgcgggaacgggccaaggagctgcggcgcgacatcgatgaaggggtcgaccccctcagcctgcgggagacatcgcgcgaggcaccgcgggtcaacgacatgatcgcacggtatctggcggaacatacaccgcacctcgccgcccgcaatgcagccgatcagcacacgatcatgcacaagctggtggcgcctgactggggcaagaagctggtgacggagatcacaaaggccgatgtcgaaaagctgctgaccaagatcgcggcgggtcgggcccggccctcgaaggccaagccgaacaaccgcgcccgcaagctgcaggggccaaagcccacgccggtgcgcgccaaccgggtgggtgaggttctgcgcaagatgttcacgctggccatcgactggggcatgcgcgccgacaatcccgccagcgggttccgccgccggatcgagaatgaacgtgagcggttcctgacgccggaggagatcgggcggctggcaaaggcgctggatgcggccaaagaccagcgcgcggcggggatcatccggctttgcatgctgaccggcgcgcggtcgggcgaggtgcggcaggcgcggtttgaacagttcaaccttgagcttggcagctggtcaaaaccggctgcgaccaccaaacagcgcaagatccaccgcatcccgatctcgggcgatgtggccgccatcgtgcgcgagcggtccctgctggtgccgcgcggcaatccgtggctgttccccggcgacacgcccgcccagccggtcaaggaaatccgccggttctggatcgggatccagaccgaggccaacttgcccgatgtgcggattcatgacctgcgccacaccttcgcgtccttgctggtcagcggcggagcatcgctggaaatgatcggcaagctgctgggccatacgcaattgcagacgacccagcgctatgcccacctgatggactcgcccctgcgcgacggggtcaatgccgtcgccagcatcttccgaccccgcccacagctggtgcatgacgctgatcaggatcagaaaagcgcctgaccgggtcgcacgtgtcgcctcattccctttcgcgcagcgcgcgccagatcggcgcgatcttcttgcgcgtcgtgctttcctcggggatgtcccctgtgggcgaggtctgggcaaaccagtcttgcacctcggcgatcagttcggcctgcgttgcaggcacgccttggtcattgatgcgccggaacagcatgatgttcatgccctcccaatcatagcgcggggctgagccaggcgacacgaaggggcggcgctgcaaatcgcgctcgtcctcgaacttctgcacctccccggccagaagcatcagatcagtgatcttgatcaataggccatccgccggttcggtgatgtattgccattccgtactgccctgcggccggatccggaacacccggcattcgtcgtcgctcggaccatgacggcggaacatccgcatcatgtcagcggcggtgaccaccacgatcccggcgacaggctgtttgccgcagatcaccgacgcgatgctggtgacaagggtcagatggtcggtcgcggcccatcccgccagatcggcagcgacacaaccccaacggtcggatatctcggtcaaggaatagaaggctctcggtggcaggctcatgggcagtgcgtccttgctttattcagccgacacccgggtcagcaccgggcatggcagggatcgcgttcctgaactgcggcttgccaacttgctcgccatccagaaacacgcctcaagatgtcttcaatcgggcatgtctggagaaccgggtgaaatgcacctcgtttatctgaaacacgcacagatagaatcggcttgagctgaccaagacagctattctcttttaaagcgaattgtcgttaacgtccctgtcaggttcggtcagggataaacgatggataacaaaaggctgggtaaggccctaaacatcatgcgcctggcggaagaggcggctgcccggcccggtggcatcagtctcgtgcaaatcgtggacaccttcggcgtgacccttcgcacggcgcagcgcatgtcgcgcgcgctggaggaggcatttccgatggtgcagacgcgtaccgacagggaccggcgcaagtggtggcagctgcccgacagccgccttctgcacctgcagggtattcgcgacggcgagttgtcggcgctggaaatgggcatccggcgtgcagaacgcgacggggccaccacagaggtcacggcgctgacctcgctgcgcaaccgcctgctggcgacgatgtcgtcaacctttgcgcggcgcgtagaggtggacgccgaaacggttctggaagcccggggccatgcctgccgcccgggccctcgcgcgcagtattcagcgcatgttctcggcttgatcgaaaatgcgctgaaaggcccgttcacgatgcagatcgactatgccactgggcaggatgccaagccacggtcgcgggcggtcgagccatatggggtgctgttcggcatgcgcggctatctgatcgcgcgtgagatcggcaccggcagcaagtatcgccattaccgtctggatcggattgtaagcgccagcctgctgcagaattccttcctgcgcgatcccgattttgaccttggcacacacgcggcccgcgccttcggttcattccattcagataaggaatatggaccggtggaatggcgatttgcgcctacggcggccgctgtcgcgcgcgccttcgtcttccatcccgaccagcacatgcaggatgaggctgacggcagcctgaccgtccggttcagtgccgggggttggctggaaatggcttggcacctttatcaatggggcgacgctatcgaggtgatcgcaccgcctgaagtgcgcaacctcgttcatgcctatcgccgcagcgattttcccgcgctgccctgacgccggaacgggtgtttagcacccgccgtgcagccgctgtcgtaccctgtcggtgaaatcccaccggcaggggtgttcgccccgatcttcgggcgtgatctgtctcacatgaccgaaattggcggaatgcgctgggcggcgtttccgattcgcattccggctatgcgccaaaaccccaatgaaacaaggaccggaattgccagccgcgcctcaattccggtctctgcctaggttccggtccttcccgtctgcttccctcaccccatctccggcatctgccgggatctggataggagaccgaaatgcagaccacagcccctgcaccgcaggaccaacccctcaacctgttggccgactggatcagccgcgaacagctggccagtgaactcggcattgcctgcgacacgctggcccgctgggaggcccgccagcttggcccgccctgcacgcggatcgggcgcaaggtgctgtaccgacgctccacagtggagaactggataaacgcgcaggaacagacccgcccgacgcggccacggcgggggcggaaatgaaccaccccctgttccacccacccgccattccgacttcccccaccggcgactggatgcacgaccgcctgaccgaggcgcgtagcgtcttggccgacaccacccagcatccgaactcgctgatcatcctcgcagcgcgggttgtcgtcagccagaccgacgatgccgttgagtgtggcgatgcgctggagctgctgcgcctgttggaccgacggccgctgcacgccatcgcggcggcagccttcccgaaaggcggtgccgcatgaaccgacgcagcacacccgaggccgatgcccagcgcgccatcgtgcaggctctgcgcttcgccttgccacgtgacgccatcgtccatcactgcgtcaacgaggtgaccgaggcggggccccgcggcgcaaagcgccagtcgatccttgtcggcatgggcgtccatgccagatttgccgatctgatcgtgatctccggtggccgcgtgctgttccttgaggtcaaaagcgaaaccggccgattgcgcaaatcgcaggaggtctttcgcgacaccgtctgcgcgcagggctttggctgggcgctggtgcggtcggtcgacgacgcgctgggcgcgctggccgacaacggcttcaccacgcgcgttgccagcccggttcggaggcccgcgccatgagccatgacgccaccaactgggccatcaagcagcgcgggctgaaacccaccaccaagatcgtgctttggcatctctgcgaccggttcaatccggactacggctgctttccctcgcaggcgcggctggcgcatgattgcgagatcagccgctcgaccctgaacgatcacctccgccagttggaggcaggcggtctgctccgccgcgtgccacggattgatccggtgaccaaacgccagcagcccacccgctacatcttggggttcgagcgcggcttcacaccgccagatgtggtgccgagtccggaaatcggacacggaaacgcaggagcagcggaaatcactgatttcaccggcacatgcgacctcaattcgcctagcgcggctgatccatgtccggatttcggacacggaaatgacccaaaagccgtgtccgattttgaccccgagccgtgtccggaaaatgaccaaagccgtgtccggaatccggacactaaccttgtaagggaacctttaagggaaccagtaaaggaggaggaggacgcgcaggcgcgagattctgattttgatcggttcttcgcagagctgctcagcgcgctgggcctcaaagccaacaccacgttgcccgcctggtggcagggctggcccgccaagctgcacgtccaacgctggatcgatgatctcgggctctctgaggaccggatcatcgaggtcgccaccgagagccgggccgatcgtcccaatccgcccgatgggcccaaagccattgatcggttcatggaacgcgccgcccagcgcgatgcgcatacggccatcgcgactgcgaagggccaaaaggccaagcggcagcgcaaagcaaacgctgcacccccgccaagcgaggatgaacttgcggcgttctatgcggctagggtcaactctgacgaatatttgcccaagggcatgatcagcaatgccatgtgcggggcgatgctgacgcgggggctggtgaccacggatcggttgcgccagcggggggtgctgtgaatggcgtggtgcttcctccccggcacggattgtccctctgcgcaggcggcggaggccttgatctgggcctcatgctcgccgagtccggatatcacacccgagcctttgtcgagtgggaggactggccacgatccgtcctcatcgccgcccagcgcgccggatatttcgccccggcgccaatctgggatgatctgcgaagttttgatgcccgaccctttcatggcgccttcgacatcatcctcgccggatatccctgccagcccttcagtgcagcgggcaaacgcggcggggccgacgatccccgacatctctggccagatgtcgcccgcatcatcagggaatgccagccagaatgggcgttcctcgaaaacgtccccggccacgtcagcctcggccttgagaccgtgctgcgagagctttgggacatgggctacacgcctgcggcgggtctgttcagcgcggcagaagtcggcgcgccgcaccaacggctgcgcatcttcatcctggcccacgccgatgagcctgcatccgggcacggccagctacaacccggcggggaacagcgacttcacccgcaaggccgaggcactggcgctgggcatcaccaactggtcgactcccaaggcgacggacggtgcgaagggtggtccgggtcagagctacggctcgggagggattccgcccctgccagcgcaggctgcgcaatggcagacaccggtggcggacgatcaggtggaccggatccgtggcaagatcaacagtcggggcgagccgaagctgtcggcgcaggcgctgcaatggccgacaccggccgcgcagaactggaagggcagcagcccggccagcgtgatgcgggccgatggcaaaagtcggatggatattctgcattaccgagcggaacagggcttcacccacccagccccagtgatcgcacaagatgggcagcggtcctcgccgcacgccccgatctcgcgcccgctctgggctttcatgattgcctcgcatgggcgcgtcgtctcgcggcggatcctgaaagcccgggcacggcggcgcctgaacccgctcttcgtcggatggctgatgggctggcccatcgggcacgcgctctgcgcctgctcggcaacggagttcacccactggcagcagcacatgcgtggcgctctctcgcagctgcccatggccttgggcccgtggatttggcggccattggacgacgcccagcgcccggcgcagatgacgctgtttgaagggtggcccgaatgacgatgcaaggaaagatcggacggcccggcggcccaaaaaccaaacgcgcgctgggcgtgcaagcggcactggaatgggcgttcggggtggaaaaggcccagctggaactgccaccgccgacggatgtgaccgaggaaggcttcggctttggcctggaatacgtcctgatgcagcgcggtgcgctagggtgcaagatcgacggaggccagcacaagatgggcggatatgtgcacgaggacgccgaggccatcgccgccaccgtcgccgggatccccgacagcctcggcggcatccgcatggcgatccgtgtgaccgaactggcccgcgccggactgacacccgactggatgcccggcgtagtgccgcgctgcgtcccggtggaaacgcgacaaaaccagcatggaattcgggccgtgacggaagttgtgggcaccgaacgggtgttgacccggggcaaatggcgcacagtcgaggttctggcttgcccggtcacatggcggccgcatccggagcagatcgcctccgctaggcggggatatgaggattggtggcaggcgctggattgggtgcgggatgggttggtggcagggcgcatgttgcgggatatggaggtgacggcggtgatgccgaaggagatgccttggaggctgtagataggacacgaacgggcggtttccggaaaaacgctacgggtgcgaacctcgacaatccacatttagaaagcgggcatctctgagacactttgacaagacgaaccataccggaaataagaaaacgcaggccgtagcctgcgtttcaatgtggtgcaatcgaatgcttgttaacggctcgaccgcgaattttgaacatttggataattgcctatctccaagttcaggtcaagctgcaactaacacggcttttgcgggccagtcaggagccaagcagagttggtgtggacccaaccgtttccctgcgctatgcttagtctgtcaggatttccgtatacgatcccggggtggaccgggagcacggcgtaacatagatcaggtagcttgatgcgtgaagcttgacatgagaggttgtcattgtcaatgtttcctaacacggtttaaggttatgaggtagctatgcgtcttggttttgatattggaacgaattcgattggctggtggttgtatgcgaccgacggcaacgagatcaccggggtgatcgacgggggcgtgcggattttctcggacgggcgcgatcctaaatccaaggcctctttggccgttgatcgccgcggcgcccgcgctcaacgccgccgccgtgaccgttacctgcggcgcaaggcggcgttgatgaaacgaatggccgccgccggtttgatgcccgccgatcctgtcgcggcaaaggcgttggaacagcttgatccctatgctttgcgcgcttcgggattggatcaggaattgcccttgacccatctcggccgtgccttgttccacctgaaccagcggcgcggctttaagtccaaccgcaagacggacaagggcgacaacgaaagcggcaagatcaaggatgcgacagcacgtcttgatcaggcgatgatagccaagggtgcgcgtacttacggcgaatttctacatatgcggcgcgcttcagccccggacccaaaatgcgtgccgactgtacgtacccgactgtccatcgcaccgcgtgataacgccgaaaaggcagaggcgggttatgacttctacccggaccggcggcatttgttcgaagaatttaccaaactctgggcggcgcaggccgcaaattccccggatattcttaccgatgagctacgcgatgaaatctcggtgatcatctttcaccagcgcccgctgaaaacacccgaggtcggcctgtgcctgttctcaggatctcatggcgttccgcagaatgataagcgcatcccgagcgcgcatccgcagaaccagcgccgtattctttttgagacagtgaacaacctgaaggtggctgcacggggcgaactggcacgcgggctgacgcgcgatgagcgggacacaattgctcatgcgttagataacaaggcgcataccaagtcgctgtccggcatgtcgatgaagctcaaggcgcttggcaagctgatcaagctgcgtcccgaacaatcattcacactggaaactgccaaccgcgattccatcgtctgcgatccggtgcgggccagcctgtcgcatcccgaccggttcgggtcgcgttggtccacactggacgccgaagcacaatgggatttggtgcagcgcatccgcgccgtgcagagcgatgcagaacataacgcgttggtcgcatggctgatcgcgacgcacggacttgaccgcgtgcacgccgagaacgtggcaaatgccccactgcccgaaggccacggccgtctgggaatgacggcgacaaagcggatattggcggcgctggaagccgaagtgatcccctatagcgcggcggtggcggcttgtgggtggcaccattcggatgggcgtaccggcgaggttctgactgaactgccctattacggccagatcctcgaccgtcacgtgatccccggcacatacgacgagaacgacgacgaagtgacgcgctatggccgcatcaccaacccgacggttcatatcggcctgaaccagctgcggcgtttggtgaacaaaattgtcaccgtttacggcaagcctgatgaaatcgtcgttgagctagcgcgcgatctgaagctgtccgaagatcagaagcgcgacgtgcagcgcgatatcaagaagaacaccgaagctgcgattaccagaggtcaaaagatcgaagaattgggctatgcaaacacaggtgccaatcgggtgatgtatcgcctttgggaggaactcggcccggcaatcggcccgcgctgttgcccatattccggcaagccgatcagtgcctcgatgatctttgacggctcctgtgatgtcgatcatatccttccctattcgcgcacgctggaggacggattttccaaccgtactctgtgcctgaaggagttcaatcgccagaaaaccaacaagactccatgggaggcatggggcaataccccggcctgggatgccatcgaagccaacctcaaaaatctgcccgcgaacaaggcttggcgttttgcccccgatgcgatggagcgtttcgagggcgagaacgatttctctgcccgcgctctgaaagacactcaatacctgtcgcgcatcgcccgcagctatctcgatgcgctttacgatggggcggacggcaagagccatgtctgggttgtgcctggccgcctgaccgaaatgctgcgccgccattgggggctgaacagcctgcttcctgataaggatggcgcggtcaaagccaaaaaccgcagcgaccaccgtcaccacgcgatagatgctgccgttgtcgcggctaccgaccggtccttggtccagcggatcagtaaaatggcgcaaagggacgaagtgaatggggccgaagaggttgcccgctccgtccctcctccttgggacgactttcgaaccgatatcaaatcgcaactagaccgtatcatcgtcagccaccgcgccgatcacggccgaattgactttgccgcacggcaaacgggcaacgacagcaccagcggcgcgttgcacgaggcgacggcactctcaattattgacgaccagaacgtcgcagtccgcattccgctcttgtctttgtccgcagcacagtttgaggaaggcgggcggtcaggctgggttcgtgacccgcagctacgcggcgctttgcatttggcaaccaagggcaaggacaaaaaagacttcgaggcggcgctcctatcattcgctgccaagcccgggccatatcacggaatatcaagggtacgtatcgaaaaacctttgcaagatactgcccgggtctacgtgcccgccgatgcgccgattaaggcttaccaaggcggtagcaatcatcgctacgaagtttggaagcttcccgatggtaaagtcctccatcacgttgtttcaatgtttgttgcccatcagggaaacctgacacgcccccatcctgccgcaaaacgaatttatcaattcatgaagggtgatctggtgagacttgaggacagcaagtttggaccagtgatcgcaacggtggagaagttcaacggaaaggggatgattgagctggttccgcataacgaagctaatgcctcggaccgatatcgcaaaaccaaggaagatctctatatccgcctcggcgcaacaacccttctcagggccaaagcccgccgtgtccatgtcgatgaaatggggcgtctgcgcgatcctggcccaccgcaatagccacaaatttggtgaattcagagagttgcaatacaatcaaaaccttattgattcgcgtgggggcgtgaggcgtagcgtttggaccaaatcatcgacattgcaaccgacggtcgccacttgtcacggcatcgcggcttcctgaaggtttcgcaggacgggaaggaaataggccgaactccgttggatcagatcgctgccgtgatcgttcatgctcacggcaccacttggtccacatccctcttgtgcgaactggccgagcggggcgcgcccgtcgtgctgtgtgctagcaatcacgcaccaaaatcggtcctaatgccaattgagggtcatcatgcacaaggtgcgcgaatgcgagcgcagtggtacgccaaggcgccactgatgaaacaagcttggaaacagatcgtcgtcgcaaaagtccaaatgcaggcggcagccctttcggcaatcggcgaagcccccgcgccgctgctcatgatgctgcgcaagattacctctggcgatagcacgaatatcgaggcacaggccgcgcgccactactggccccgtatgatgggttccgactttcggcgtgacacagatggtgaggatgcaaacgcccttctgaactacggctacaccgtaatgcgcgccgccaccgcccgcgctgtcgtggcggcgggtcttaatccgacaatcggcctgtttcattccaaccgcagaaatgcctttgcgcttgccgatgatttgatggaaccctttcgccctctcgtggacagtgcggtcagaacgatagccgcagcgtatggtccggcagttgacagcgaagcaaaacaatcgctcgcccgactgatagcaatagacctgcccctcggggatggcttcaccccgggttcggtcgcattgatgaaacttgccacttcgctcgggcaaagcttcgaggcaggaaagctcaaccttgccttgccgacgccacctgaccctctgacattctcggggttgggccaatgagctctaatgttacctatttgtcaggataccggctgatgtggatacttgtgatgttcgatctgcccacagacaccaaaccacaacgcaaagctgcgacagcgtttcgcaactttctcctcgatgaaggcttcgagcgcagtcagttttccgtctatgcccgctttgtgaatggcaaagaggcctttgccacccgcgtcaaccgaatcgaacgccaccttccggatgcaggcgacattcaaatcctgaacttcactgaccggcagtatcgtgatatcgtacatttctcggatcagggccgccgaaaggcccgcgaaaatccgcagcaactggtgatgttctgatgcgattcgcgcttaaaaatttggatgaccttccgattaaatcttgttttcacaagagcttaaccgaagatctattatagctgttcaaaattcgcggtccagccgcaacnnnnnnnnnnnnnnnnnnnnnnnnnnnnnnnnnnnnnnnnnnnnnnnnnnnnnnnnnnnnnnnnnnnnnnnnnnnnnnnnnnnnnnnnnnnnnnnnnnnnnnnnnnnnnnnnnnnnnnnnnnnnnnnnnnnnnnnnnnnnnnnnnnnnnnnnnnnnnnnnnnnnnnnnnnnnnnnnnnnnnnnnnnnnnnnnnnnnnnnnnnnnnnnnnnnnnnnnnnnnnnnnnnnngattatagctgttcaaaattcgcggtccagccgcaacaatgcacgcgttgacaacttcgcaataaagattatagctgttcaaaattcgcggtccagccgcaaccgaaacggcgagtcttgcggatgcgccagattatagctgttcaaaattcgcggtccagccgcaacttaacaggcaacgacccctcgagattgacgattatagctgttcaaaattcgcggtccagccgcaacacgtggcgtgttccgctatgccaactccgcattatagctgttcaaaattcgcggtccagccgcaaccgcgnnnnnnnnnnnnnnnnnnnnnnnnnnnnnnnnnnnnnnnnnnnnnnnnnnnnnnnnnnnnnnnnnnnnnnnnnnnnnnnnnnnnnnnnnnnnnnnnnnnnnnnnnnnnnnnnnnnnnnnnnnnnnnnnnnnnnnnnnnnnnnnnnnnnnnnnnnnnnnnnnnnnnnnnnnnnnnnnnnnnnnnnnnnnnnnnnnnnnnnnnnnnnnnnnnnnnnnnnnnnnnnnnnnnnnnnnnnnnnnnnnnnnnnnnnnnnnnnnnnnnnnnnnnnnnnnnnnnnnnnnnnnnnnnnnnnnnnnnnnnnnnnnnnnnnnnnnnnnnnnnnnnnnnnnnnnnnnnnnnnnnnnnnnnnnnnnnnnnnnnnnnnnnnnnnnnnnnnnnnnnnnnnnnnnnnnnnnnnnnnnnnnnnnnnnnnnnnnnnnnnnnnnnnnnnnnnnnnnnnnnnnnnnnnnnnnnnnnnnnnnnnnnnnnnnnnnnnnnnnnnnnnnnnnnnnnnnnnnnnnnnnnnnnnnnnnnnnnnnnnnnnnnnnnnnnnnnnnnnnnnnnnnnnnnnnnnnnnnnnnnnnnnnnnnnnnnnnnnnnnnnnnnnnnnnnnnnnnnnnnnnnnnnnnnnnnnnnnnnnnnnnnnnnnnnnnnnnnnnnnnnnnnnnnnnnnnnnnnnnnnnnnnnnnnnnnnnnnnnnnnnnnnnnnnnnnnnnnnnnnnnnnnnnnnnnnnnnnnnnnnnnnnnnnnnnnnnnnnnnnnnnnnnnnnnnnnnnnnnnnnnnnnnnnnnnnnnnnnnnnnnnnnnnnnnnnnnnnnnnnnnnnnnnnnnnnnnnnnnnnnnnnnnnnnnnnnnnnnnnnnnnnnnnnnnnnnnnnnnnnnnnnnnnnnnnnnnnnnnnnnnnnnnnnnnnnnnnnnnnnnnnnnnnnnnnnnnnnnnnnnnnnnnnnnnnnnnnnnnnnnnnnnnnnnnnnnnnnnnnnnnnnnnnnnnnnnnnnnnnnnnnnnnnnnnnnnnnnnnnnnnnnnnnnnnnnnnnnnnnnnnnnnnnnnnnnnnnnnnnnnnnnnnnnnnnnnnnnnnnnnnnnnnnnnnnnnnnnnnnnnnnnnnnnnnnnnnnnnnnnnnnnnnnnnnnnnnnnnnnnnnnnnnnnnnnnnnnnnnnnnnnnnnnnnnnnnnnnnnnnnnnnnnnnnnnnnnnnnnnnnnnnnnnnnnnnnnnnnnnnnnnnnnnnnnnnnnnnnnnnnnnnnnnnnnnnnnnnnnnnnnnnnnnnnnnnnnnnnnnnnnnnnnnnnnnnnnnnnnnnnnnnnnnnnnnnnnnnnnnnnnnnnnnnnnnnnnnnnnnnnnnnnnnnnnnnnnnnnnnnnnnnnnnnnnnnnnnnnnnnnnnnnnnnnnnnnnnnnnnnnnnnnnnnnnnnnnnnnnnnnnnnnnnnnnnnnnnnnnnnnnnnnnnnnnnnnnnnnnnnnnnnnnnnnnnnnnnnnnnnnnnnnnnnnnnnnnnnnnnnnnnnnnnnnnnnnnnnnnnnnnnnnnnnnnnnnnnnnnnnnnnnnnnnnnnnnnnnnnnnnnnnnnnnnnnnnnnnnnnnnnnnnnnnnnnnnnnnnnnnnnnnnnnnnnnnnnnnnnnnnnnnnnnnnnnnnnnnnnnnnnnnnnnnnnnnnnnnnnnnnnnnnnnnnnnnnnnnnnnnnnnnnnnnnnnnnnnnnnnnnnnnnnnnnnnnnnnnnnnnnnnnnnnnnnnnnnnnnnnnnnnnnnnnnnnnnnnnnnnnnnnnnnnnnnnnnnnnnnnnnnnnnnnnnnnnnnnnnnnnnnnnnnnnnnnnnnnnnnnnnnnnnnnnnnnnnnnnnnnnnnnnnnnnnnnnnnnnnnnnnnnnnnnnnnnnnnnnnnnnnnnnnnnnnnnnnnnnnnnnnnnnnnnnnnnnnnnnnnnnnnnnnnnnnnnnnnnnnnnnnnnnnnnnnnnnnnnnnnnnnnnnnnnnnnnnnnnnnaacatgttatagctgttcaaaattcgcggtccagccgcaacggcacgacaaggcgttgcgtgtctttgtcaattatagctgttcaaaattcgcggtccagccgcaaccccaagggcggcatctgggacggatacgagattatagctgttcaaaattcgcggtccagccgcaaccaaggaaacccggtttccttatcttacgccattatagctgttcaaaattcgcggtccagccgcaactccaaaagagacgcggccttgccctgccccattatagctgttcaaaattcgcggtccagccgcaactatgccggtggattttggacgggacaaaaaattatagctgttcaaaattcgcggtccagccgcaacgtgaacatcggcgtgtagatgcccagattgattatagctgttcaaaattcgcggtccagccgcaactccagtgggcggcgttggcgtagctgggttattatagctgttcaaaattcgcggtccagccgcaacgaggcnnnnnnnnnnnnnnnnnnnnnnnnnnnnnnnnnnnnnnnnnnnnnnnnnnnnnnnnnnnnnnnnnnnnnnnnnnnnnnnnnnnnnnnnnnnnnnnnnnnnnnnnnnnnnnnnnnnnnnnnnnnnnnnnnnnnnnnnnnnnnnnnnnnnnnnnnnnnnnnnnnnnnnnnnnnnnnnnnnnnnnnnnnnnnnnnnnnnnnnnnnnnnnnnnnnnnnnnnnnnnnnnnnnnnnnnnnnnnnnnnnnnnnnnnnnnnnnnnnnnnnnnnnnnnnnnnnnnnnnnnnnnnnnnnnnnnnnnnnnnnnnnnnnnnnnnnnnnnnnnnnnnnnnnnnnnnnnnnnnnnnnnnnnnnnnnnnnnnnnnnnnnnnnnnnnnnnnnnnnnnnnnnnnnnnnnnnnnnnnnnnnnnnnnnnnnnnnnnnnnnnnnnnnnnnnnnnnnnnnnnnnnnnnnnnnnnnnnnnnnnnnnnnnnnnnnnnnnnnnnnnnnnnnnnnnnnnnnnnnnnnnnnnnnnnnnnnnnnnnnnnnnnnnnnnnnnnnnnnnnnnnnnnnnnnnnnnnnnnnnnnnnnnnnnnnnnnnnnnnnnnnnnnnnnnnnnnnnnnnnnnnnnnnnnnnnnnnnnnnnnnnnnnnnnnnnnnnnnnnnnnnnnnnnnnnnnnnnnnnnnnnnnnnnnnnnnnnnnnnnnnnnnnnnnnnnnnnnnnnnnnnnnnnnnnnnnnnnnnnnnnnnnnnnnnnnnnnnnnnnnnnnnnnnnnnnnnnnnnnnnnnnnnnnnnnnnnnnnnnnnnnnnnnnnnnnnnnnnnnnnnnnnnnnnnnnnnnnnnnnnnnnnnnnnnnnnnnnnnnnnnnnnnnnnnnnnnnnnnnnnnnnnnnnnnnnnnnnnnnnnnnnnnnnnnnnnnnnnnnnnnnnnnnnnnnnnnnnnnnnnnnnnnnnnnnnnnnnnnnnnnnnnnnnnnnnnnnnnnnnnnnnnnnnnnnnnnnnnnnnnnnnnnnnnnnnnnnnnnnnnnnnnnnnnnnnnnnnnnnnnnnnnnnnnnnnnnnnnnnnnnnnnnnnnnnnnnnnnnnnnnnnnnnnnnnnnnnnnnnnnnnnnnnnnnnnnnnnnnnnnnnnnnnnnnnnnnnnnnnnnnnnnnnnnnnnnnnnnnnnnnnnnnnnnnnnnnnnnnnnnnnnnnnnnnnnnnnnnnnnnnnnnnnnnnnnnnnnnnnnnnnnnnnnnnnnnnnnnnnnnnnnnnnnncaatgcattatagctgttcaaaattcgcggtccagccgcaacttcaggcgctgacggtgctggccaccgatgtattatagctgttcaaaattcgcggtccagccgcgacctttcttgcccccctgccatgattgaagacgatttcacaattgcagcgaaaggcttgaatgacgttccgctctgcaacatcatagaccaccggtggaagtcagcttcacggccccccctcacatggttcctcccggtcccaaacgtatgcgggggggcgcagcgcggcatttcgctagcgacaggcactttcaccggggaatccaggcggaatccacctgccgcttgattttggaaaaagcgactcattatcaaaggcttgcggaatcacgatcttggcgtgctggattcttttcggaatccagggaatccagtttgtggaagccaccgtgccggaagccagccagcggaagccaccctgtaagaagccattgaatccaagtcattttttcatttgacaaagctgccccccttgacctacctattgatcatcgaagaattgcgcccgcaggtatcccgtcgcgggcgttttcgtttcccccacatcgcggaccccgatcctgtcgctggccatgttgcccgcacgcatcggcacgtccgccctgccgcaaatgagaactgcccctatggacctcgtcttcgcgccgcgccagattgagacgtggccgattgaccggctgcgcccttatgcccgcaatgccaaaatccacggcacagaccaggtcgccaagatcgccgcgagcatggccaagttcggctggaccgttccctgcatggtggccgacgacggcgagctgatcgctgggcatggccgggtgctggcggccatcatgctggggctgaaggatgtgccggtgatccggctcagccacctcgacgaggatgatcgccgggcttaccggatcgccgacaataaattgaccgagctgagcgaatgggatgatccaatactgcgcgacgagatcgcgctgcttctggccgtggattatgacctcgggcttctggggatcgttgatgaggatctggaagccctgctgcgcgatccggatcaggtggaaggcggtgcggtcgagggtgaggatgatatccccgaaccgccggtcacgccggtgtcggtcgcgggcgacctttggcagctgggatcacatcggctgatctgtggtgacagcacggccgccgatgtggtcgggcgtctcttgggcaatgtgaaaccgcagctgatggtgacggacccaccttacggcgtggaatacgatcccagctggcgcaaccaggcaggtgctgccaaaaccaaacgcaccggcaaagtgctgaatgatgaccgcgctgactggcgcgaggcctggctgctgttcccgggcgatgttggctacgtttggcacggcgcgctgcatgcggcagaggtggccgagagcctcatggcggctggcttcaacgtacggtcgcaaattatttgggccaaggaccggctggtgctcagtcggggcgactaccattggcagcatgaaccctgctggtatgcagtcagaaagaccggcaaggggcattgggcgggcgaccgcaagcagactacgctgtggcacatttcaggcaaagaccaagacgccgccacagtgcacggtacccagaagccggttgagtgcatgcgccgcccaatcctgaacaactcaagccccggtcaggccgtgtacgagcccttcatgggatcaggcaccacgctgatcgcggcggaaaccacgggccgggtctgctacgggattgaattgaaaccggcatatgtcgatgtagccattgagcgctggcagcgattcaccggtgccaacgccgtgctggccgagagtggcgagaccttcgccgacctgaaggccaagaggctggcggcatgaatgcgcctctgctgccgagtcagatagagatatggccgtgcggcgatgggagatgccgatggagaaagtggcaacggtcgtcccaaattgacgcatctgtagaagaccgccgatgtctactgtgcggaccaagctgcctttccctcgcgcagcattgagtaacaaaaccgagcaaacaaacggaagatcgggcgttgcagactctggctctgttaggcgttaatcaagaaatatcgaaatatcccgtacacatagagagccgagaagattacattgatatgtttcagctgtggctctgtccggagccagccgcagaatacccagatcaaacagaatggtaagccgagcatcatagccgccaattgccaatcttgaacaatggaaactgtgctacacagacccagaaatagggctgtccacttgagcggctgctcatatgcagccaacttcaaaagtgtcatatgtaaaactttcagataagcagcgccgttgacccggcgttctggtataccatttcatatcagttgacatactacacgacagtagggtggtttaggggtccaggtcatgatttacagacggactcttatcgctaaacaaggtccagctgatgttcaccgaagccctgacgaccctcaaggcgaggttatccccgcacttacccttgagcaacagccgccttgaaacgatgtgttttttgattttgggaatggtgaatgcccgaacagtcaatttgagccatctcgcctgtgaattccctacctatgccaaggttggaagcacatatcgccgcctgcaacgttttttccagcatgtcgagcttggctcagattgggcggcgcccttaattgtcaaaatgataggagctggcccctcgtggcatttatgcttggatcgcacaaactggaagatcgggcagcgccatatcaattttttggtattggctcttgttacacgtcgccaccgcattccgttgatgtggagcgttttagggcgtgctggcaacagcgacactgctcagcgcattgccctgatgcaacgctatttatccgtatttgaggtatccaccatcaagtttttgctcgcagatcgggaatttattggcgtgcactggctagattttctccataaaaaccacatcccttttgtcatccgtgtcaaagcaaaccagattgtgaccgcacgggatggaaaaacgcaaagtctgattactttgctgcgcacctgtcgcggtaagcgcaattttgatgcctgctttggcggcaataaaacaggtgatgctatgtggttttcctttgctggaaagcgcatcaaaggtggcgaacttttgatcgtagtctccaaccggcccgcgcatcacgccctcaccacctacaaaaaaagatgggctatcgagaacctttttggcgacaccaaaacacgcggcttcaatattgaagacaccagactgaccatctctaaaaaacttgagctacttttaggccttgtcgcacttgccgttgcctgggcatcaaaaacagccacaaagcttattgggattggaaaaatgaagcgtaaaaaccacggatatttcgcaaagtcattctttcgaattggcttcgatcagatccgaaaactgctcaaatcagacccaattgctgcagtctctccttggttgctaattccaaccaaaatcaagagagtcgtgtagtatgatcagttgaatgacataacgacaacacagacacattgagctcaccgcgacactagctgctccgatacaccaatcccctaacgtcgaccttcgtcgtggtgatcgccaaccccagttttttcttcaacaccccagagatcacgcccctcgcagtgtgagcaagccagcctgttgcaccgacgatttcggcaatggtggccccgtcgggcgactgaagcatctcgatcagcatggcctgcttcgtcccagcgcgctgggtcgtttgcttcgcttccggtggcaccgaagcttgtttcaggatagccatcgctgttgtgaccacgaccggcttaaccccgatggccagcagacccgcgtcggtcaccaccagcgtggtgccgtgaccatcgccggtctcgcgccaaagcagttcacactggcgcaggttggcgtcgacctcttgcagccaaccgtgtgcaatcatcttggtgacagccatcttcgccgccgcgccatgcagccccttgggcagcggcagggcgatgttgttggggcgctgggcaccggcactgaggatgatggtctgggtttcagtgagtttcggcatggcggggtcctgttcggtctggtggcgttgggcgggatcaagcggcatgttcgccctccttgaaggcgctgtcggtgatctggcgcagcaggctggcgtagtggttcagggagccaacgtc

SEQ ID NO: 3685 - DNA, 22130 bp, synthetic construct
  misc_feature 1..22130: note = Synthetic
  source 1..22130: mol_type = other DNA
ccccgcgcagaatatccgccactggttcttccatgtccgaacccgccaccagcacgctgaacagcgccgtaatgtcaccgctatcgcccacccccggcccggcgcgttcgcaaagcgacatgatcatatgcgaggtcgaaggcgggtagccacgcaatgaggccgcctcgcccgaggccagtgccacttcgcgatgggcttcggcaaagcgggtgatggaatcggccagcagcaacacatgttgcccctgatcgcggaaatgttcagccaccgccatagccgtccaggcgcagcggcggcgcaccagtggcgattggtccgatgttgctgccaccacaaccgcgcgtttcatgccctctggccccagaacatcctcgacaaattcccgcacctcacggccccgttcgccgatcagcccgatcaccaccacatcggcactgactccgcgggcaaatttggcaagcagcgtcgatttccccacgcccgagcccgcaaacatcccgatccgctgcccccgcacgatcggcagcatggtgttgaacaccgcaaccccagtctcaagccgttcgcccagccggtggcgcaaagtggcattgggcggctctgcccgcatcggccggggcgacaccccccgcgacagaggccgcccgtcaagcggcgcaccagatgggtcaatcacccgcccgatccagctgttatccggcgcgatggtcgcttcgcccagcagccgaaccttgtcaccgatcacgatgccttcgggcgggcgatccggcagaatcaccaaccgatggcgattgagtttcagcacttcgccgcccatcggctgatctttttgccggaaaatctgcacctgatcgcccaggctggccgcctctgacagcccgcgcaccgtcacggtgccgccatccacctgcaccacccgccctacattatatataggccgcagcgcagcaatctcggccgtgaggcaatcaatatcagtaaccggcatcggattctcctaattggttttggcaaccttttttaaacgaatcagagttaaagcttggttgagattgttcgagggagaagccccgatgtttgaaaaactggaaatattccgaatggcgggcgccatggcgcagcacgccaccgcacgccaaagcgtgattgccgagaatatcgctcaggccgatacgccgggctataaggcgcgtgatgtggccccttttgcccagacgtataaggccgacgacagccaacagatgcgcaagacccgcgccgggcatttgctgggcgaaagcagctcggcccccatgatggcgccatgtttcagaaaatatcgcaaatcaggatacgcccggatatcacagaaaaaccgcctcattcgaggctgtgatcaaagacgggcaacgcacgggagaagtgcagatcggtcaggtaaaacttgatcgctctgaactgacccagatctatgatccgggacacccgcttgcggatgagaatggtcactatgatggatcgaatgtcgatctggtgatcgaaattgctgacgcgcgcgaagcgcagcgcagctatgaggcgaacctcaagatgttcgatcaggccaggcaaatgtcctcaagcctgcttgaacttctacgccgatgaaaggtgatctaaaatggatatcaaatcatcatttgcagcccaaggttatgcagcgacccgacccgccacagccccaaaggctggggcgggcggtggggcgaccgaggcatttggcaaagccgcctcggatttcgctgcgaccctgaaacagggcgaagacgtggccaaagcggcaatgaccggcggggcagacccgcacgctttggtcaccgctctggcccagaccgagctggcggtcgaaaccgcagtgacggtgcgcgataaggtggtcgaagcctatcaggaaattctgaggatgccggtctgatggatgcgctcctcttctttgacactttgcgccaaggcttgtgggtcgcggttctggtctcgatgccgatcctgacggtggcgctgatcaccggccttgcagtcggcctgtttcaggcactgacctcgattcaggaaatgaccctgacgttcgtgcccaagctgggagccattttggcggtgttctgggtgtcgatgagcttcatgaccaacatgctggtttcattcttcaccgacacgctggtgcccttgatcgcaggaggttaacccatggacaatgccggatacaccaccctgacccgccaagtcggactgctgcgtgaaatgcagagcgtggccaataaccttgccaatatctcgaccaccggatttcgcaaggaaggggtgattttcgccgaacatatcaaggcgctggatggcgaacaggaatcgctgtccatggccaacgccgatgtgcgcctgacaatgagccagcagggcagcctgacccagaccaacgggaattttgatttcgcgatcgaaggcgagggctttttcatgattcagaccccggatggcgaccgtctgacccgtgccggcagtttcacccccaacgccgagggcgagctggtcacgccggatgggtatcgcctgctggatgccggcggcgcgccggtgtttatcccccccgatgcccgctccgtcgcggtatcggcggatggcaccgtcagcgccgatggcaaaccgcaaacccagatcggcctgttcgccccggaggatcccaaccagctgacccgccagaatggtgtgctgtttcgctttgagggcgatgtgatcccggttgaagagtctgccatcgtgcaggggttccttgaggattcaaacgttaacccggtcaccgaaattgcccgcatgatcgaagtgcaacacgcctacgaattgggccagagctttcttgaaaaagaggacgaacgcatccgcaacgtcctgaaaacgctcggccgttaatagaaaaaggagaaccagatgcgcgccctgaaaatcgcagcgaccggcatgagcgcccagcaaatgcgggtcgaggtcatctcgaacaacctcgccaatatgagcaccaccggctataacgcccggcgggcggaatttgccgatctgcattaccagcaggccacccggcccggcacggtcaacgccgcagatggcacagttttgcccaccggcgtgcagctggggctgggggtgcgcccggcggcggtgtcgatgcagctggcccaaggcacgctgggggccactggtggcgatctggatctggcgatcgaaggggccggctatttcgaagtcaccctgccctcgggcctgtcgggctatacccgtgatggcgggttgaaacggtcagccgatgggctgatcgtcaattccgagggctatgcggtggtgcctgatatcaccatccccgccgatgcccgcagcatctcgatcaacgccgagggcgaagtttacgcctatttcaacgaccgggtcgaacccgaattgctgggtcagttcacccttgccagctttaccaaccccaaggggctggaggcgattggcagcaatctgtttgtggaaagcgcggcctcgggtccggccctgatcaattcaccgggtaccgatgggctgggggtgctgcgacaggggtatctcgaggaatcctcggtggatgcggtctatgaggtgaccgaactgatcgaagcccagcgcggctatgagctgaactccaaagtgatcaccgccgccgatcagatgctcggcgcaaccacgcagatccgctgatgaaaccgctcctgtttgccctgttcctgttttcggccgccgcagcggcggcggatacgctggtgcccacccacacgatccgcagccgcagcatgatcggtgcccaagacgtcaccctcaaacccatcgacagccccggcgccctgacccatgcgcaggacgctatcggccaggaggcccgtatcaccctctatgccggtcgcccgatccgcccgcaggatatcgggccggcggcgatcatcgagcgcaaccagatcgtgcagctggtgtttcagcgcggcgaactcaccatcatcaccgaggcccgatcactgggccgcggcggggttggggatgtgctgcgggtgatgaatctgggctcgcgcaccacggtcagcggcaaggtgcgccccgatggctcggtcattgtcggccaatgaacaacgaaggattataaaatgcaaaatgtgcttggatattttctgattgtcgttttcctgtttggggccggttgctcaaggctgggcaatgtgggcaaggcaccggcgatgaccccggtgcagggcacggatgagtattacgccatgatgacccccgccatgcccagaaccattgagcgccaccgcaggacggagaacgcttcgctttggacggccagccgccaatcgctgctgggggaccggcgggccttgcagcgtggggatattttgacggtggtgatcgaaattgatgacaaggccgaaatttcaaacgccaccggacgcaagcgcagcgggtcggagaaatccggcattgcccagatggtgggactaccacagctgatcaatcaaaacttgcccgccggagccagtatggccgatgctttcaacaccaactcggccagcactttttccggtgacggatcagtcaaacgcaaggaaaagctgaccttgcgggtggcggcgaccgtggtggatgtgctgcaaaacggggttctgtcgatcaagggctcgcaagaagtgcgggtgaatttcgagctgcgcgaattgcaggtgacgggctatgtgcgtcccgaagacatctcgcgacaaaatcagatcacctatgacaagatcgcttctgcccggatttcatatggtggcagagggcagatttctgacgtgcaacaaccccgctatggccagcaaatcgccgatattgtcttgccattttaggagcagatcatgcgtaaaatactccccgttctcttactgctgattggcatcggcgcaggtattggcggcggcatcatgctcaagcccgcagccgaagaggcgcaccaatccgagccccatgaggttagtgacccggttcatgccgatactgcggccccggcggatgacgaagggcacgaggtgttgccggaatatgtcaagatgaacaaccagttcattatcccggtgatacgggatgagaaagtcgccgcgctggtggtgatgtcgatcagcatcgaggcaatgccaggcgggcaggaggcgatctttcagctggagccaaagctgcgggatgagttcaatcaggtgctgtttgaacatgccaatgctggcggctttgacggggtgtttaccagcagcaataaaatgctcatcctgcgggattcgctttatgaggttgcgcacaaagtcgccgggccggtggtcaagggggtgctgatttccgagatcgtgcgtcaggataactgacgccgccccctagggcatggggtgctctggctatgcccccaccgccatccagatgctggcaaacatgaacatatcgccgataatgacaaagcaatgccatatcgcatagcgaaacggcatttgcttacgagcataaaacacagtgccaatcacaaaacagcccgccccggccagcgcgaaccacagagtctgaggcggcgtgcccgccagatcaggcaaggcgcacaggccaatcgcccccagccccagataagaggcggtcgaccatcgggatttgacgttgtgatcggtcagttttttgtataccgccaccaccgtcagcccccaacacagcccgaacaatgccaaggtccaactggtgttggcgagcaggaaaaacggggtgaaggtgcccgagatgctgagataaatcgcgctgtggtcgatgcggcgcaggaatttgcgttgagagtgccaaggcgcgaaatggtagaggcatgaggacaggaatgagctgaaaacgcacagcacatagatcaccaccgccaacaccatcttgcccgtgcccagtgcggcgacgttgcggatcagcatcgccccggcgatcaggatgaaagcgatgccgaccagatggaccagaacatccatccgacgatgcgacaaaagcgggcttgggtaggtttgagacatggtgaaaacagatggcaaccggcaacagggcaaggatttttctgagcgcagactataagatccgcccctgcatgaaaagaataatccgaccggaaattaccaacggccgcgcaaacccggccacgagcccaaagcctgctatccggttttgctacgccccaaaagccacaggaaaaatccgccgccgatcaggccggtgatgatgccgatcgggatgtcttcgggtgccatcaaagtgcgtgcgaaaatgtcggaccagaccagaaaaatcgcccccagcagcgctgagaacgggatcactttggtatagtctccgcccaccagcatccgcacgatatgcgggatcatcagcccgacaaagccgataatccccgaaaacgccaccatcaccccggtgatcagcgccccgaccacaaacaccagcagccgaaaccgggccaccgggatgcccagtgtcgaggcggtttcgtccccgaccgtcatcgcattcagctgggcagatttggcccacagatagcccgagcacaccagcaagatcaccagcggatagatcagctgcgaccattgtgccagccccagcccacccagcatccagaacaccaccgtatgggtggcgcgtggatcgcccagaaaaatcaggatattggcgcaggacatgatgatgaacgaggccgccaccccggccaaaatcagccgatccgcgcttttggccccggtgaactgcgccaccgccagcacgatcatcgccgcaatcaaagcgccgatgaacgccatcaagggcacggtcagcagcccgataaacatgccggtatgcagcaacgccaaaatcgccccaaatgccccgcccgagctgatccccaacagatgcgggtccgccagcgggttgcgcgtgaccgattgcagtgctgcgccaaccaccgccagcccggctccgaccatgcaggccagcaaagcgcgggggaagcgcacatcccaaacgatggcttcgcgcccctttgaccatgtttgttcgatcaggccggggctgagcttgttcaaaatcacgccccagacggtggagggcgataccgaaaccgcccccacaccaaccgcaatggtaatggaaagcatcagtatcaagacaccgatcaacaggataaacggcatgacgccaatgcttttcatcatggtcttatttcccccagaaggcctcggccagagttttcaccgcagggatattgcgcggccccggcgtggcaaccacatattccagcaccacaaagcgatcattcttgaccgcatccatatcggcaaaggccgggttgctcatcatgaaggcgcgcttctcctcggcggtcacatcaccgtaattgatgatcacgatcacttcggggttgcgctcgatcactggctcccagccaaccttggtccagcttttctgcacgtcattcatgatgttgaccccaccggcagcctcaatcatcgcgtttggcatggcgtaacgaccggcggtgaagggggtatcctcgccgctgtcatagacgaatacccgcaccgggtcggcatcctttggcacatcggcaacgatctcggccagctcttttttccaaccggcgatcagcttttcagcgcgctcttcttcgccgaaaatcaggcccagattgcggatatcgttatacatatcctccatgctggccgggtctttgtccatgatgtggatgcagctttcggtcagctcgtataccttgatgccaaaggggctgagcgtttccggcgtcacttcgccgcccaccttcaggccataattccaaccggcaaacaggaaatcggcatcggcaccgatcagcacctcttttgtgggataacgcggggtcagctcgggcagttcggccacgccctcgcggatcaccgggtcaagcgtcttccagcccgagatcccggtatagccaaccatatgatcctgcaggcccagcaccagcatcatttcggtcaggttcacatcatttgacacggccgctttgggcgggctgtcgaaagtcacttcgcggtcacagcttttgacggtgaccggatcggccatggccgcaccggccatcagcgcaaaagcaagggtaagtctgatcatttgagttttcctttattcagagagggttaggtgaaaagtgaaaagtgattttccgctgggttgcaggcgctgattgcgcaccttgaccgaaaaggcggtttcgatcatcggcacggtcatcacctcatgcgccgggccaaaggcgagcgtttcgcctttgcgcagcaccagcacgtcatcggcatattccgccgccagattaaggtcatgcaggctggtgatcacgcttaagcccagctggccgaccatttgcaaaacctcgagctgatggcggatgtccagatggttggtgggctcgtccaggatcaggatctcgggctcttgcgccagagcgcgggccaccatgacccgctgtcgctcgccgccggaaagcgagccgaacatgcgcgaggccagcggggccagttgcagccggtccagcgattgctggatgatctgctcatcccgcgccccgcaagagcccacgcccgagcgataaggcgtgcgccccagcgccacgatctggcgggcggtcagggcaaaatcggtgggttgttcctgcagcacggcggcgatgctctgagcagcggtgcgggccttgatcgcccacagatcggcccctttgaccagtatctggccggaaatgggccggtgatagcggtaaagcagccgcagcaggctggatttgcccgccccattggccccgaccaccgccaaaatccggttcttggcggcggtgaagctggttttctggatcagcaccggcccgcgtttcggcccccagctgatatcatgggcgtgcaaaatcacgttgttcattgcagcacctcgatgtcctgagcaataatcacgctgggcatccgcgccaacccggggtggctgagccccgccggatcggcctgaccgggaaagcggccttcgtgaaacgagcgatagcggcgggcaaagcgcagcagcgcgtcgatatcctgatccgggtcgatatcggcaaacagataggcggtttttttatcggcgtgatagccgaccatgcaggggctctggcaggcggtgatgcaggcggtgccgctgatcgaaaaatcatccgccagcatgtccgaggcggtggcaatcgcggcgcagaggctctcgatcagcttgcagccggggccgcagatgtcttgctcgcccgcgcaatttgagcggatgacggtctgaaagctcctgctccggggaagcggttgctgtagtgttggccccataacgccctccgcgcatcagcaggggcagcagcagacacgaaaccgaatatggcgggatgcgccaatcgggttatcgtcagtctccttgccaggcaccccgcccgggttgattggatcgcaaggccagacgggtgtctgacccctgatggcaggtctcctgactttgcggctaaggcgctcccctgacccttcccggcgcatggcaccagtggtttattcaaggttgctgaccgcttacagttgcgggggcagtcacggaattggcgcctgatggctacaccgcaccgtgttcccttttcatcccacagccgtttcaatccggcctgcagggaaccatcgccggcaggtaaatgtaaatgcgacagaatcgcaagcgcttttttcagacgcggcgatttcggtgaaaatggtggggctgaaaaggaagcgagggccgtggccctgcgcttcaatatggtgcaatcgaatgcttgttaacgactcgaccgcgggttttgaatggggctgttatggcatagtatttcggcgaactcaagacacctcaaggttgaaatgggggccaattggtgcaaggctcggccgagggtatagggaggacgaaaatgcggttagggctggatatcgggaccaattcgatcggctggtggctttatcagaccgaaaaagatcgagccggaaagcgtgagatcacggcggtgattgatggcggggtgcggatattatcggatgggcgcgaccccaagaccaaagcctcattggccgttgatcgccgcgccgcccgtgcgatgcgccgccgccgtgaccgctatctgcgccgccgcgcgaccttgatgaagcgcatggccgaagtcggcctgatgccctctgacccggccgaggccaaggcgttagaggcgctcgacccttacgaattgcgcgcccgcgggctggatgaggcgctgcccttgccccatctgggccgcgctttgttccacctgaaccagcgccggggggtcaaatccaaccgcaaaaccgatcgtggcgacaatgaaagcggcaagatcaaagacgcgatacggcggctggatcaggagatggctgcggcaatcaaggatgaaagtaaacgcacgctgggcgcgttcctccatatgcgcaggcaaaaaacgcccgagaaaccttcaaccgaacctaagaagaataaagatcacacccgcaaggattatcgtcgcatcccgcccgtgcgcacccgtctgagcatcgccgcacgcggcgggccggatgcgaaagaggaagcgggctatgatttctaccccgaccgccgccatctggacgaagaatttgccaaactctgggcggctcaggccgaacaccacccggccctgaccgatgacttgcgcgatgccattcacacaatcatctttcaccagcgcccgctgaaagcgcccgaggtggggttgtgcctgttctctggccaaaacggtgtgccgagcgatgaaaaacgcctgcccaaagcgcatccgctgacccagcggcgggtgctttatgaaaccgtaaatgctctgcgcatcgccgagcccggtcaggccgaacgtgccttgacgatggatgagcgcaacattctgatcctcgcgctggacaacaaaaaacacaccaaatctctgtcggggatgaagctggcgctcaaagcgctcggcaaacagatcaaactgcgtccggggcagcattttacgctgcaaaccgccaatcgtgactcgatcgcctgtgatccggtgcgggccagcctgtcggacccggcatgctttgggccgaattggagtgcgctggatgcagaggcgcaatgggaggtggtgcagcgcattcgcgcggtgcagagcgaagcggatcatgcagccttggtgcaatggctgatggccacccatgggctggagcgcgagcaggccgaaaacaccgcccatgcgccgctgcccgagggctatggccggctgggcctgaccgccacccggcgcattctggccgagttggaggccgatgtgatcccctatagcgaagccgtggcccgctgtggctggcatcattcggatgagcccaccggcgaggttctggataccctgccctattacggcaagctgctgacccgtcatgtgatccccggcagttacaatcccgatcacgacgacatcacccgctatggccgcatcaccaacccgaccgtgcatatcggcctgaaccagctgcgccgtttggtgaaccggatcatcaccgtctatggcaagccggatgaaatcgtggtggagttggcccgcgccctgaagcaatcaaaaaagcagaaagacaaagccaaaagcaagatcaaaaagaacaccgaggccgcgatcagacgtggggaaaagctggaagaactgggcattcctaacaccggtgccaaccgcatggtgctgcgcctgtgggaagatttgaaccctgacgattgcatgaagcggttttgcccctattccggccagcggatcagtgccacgatgctgtttgatggctcttgcgatgtcgatcacatcctgccctattcgcgcaccatggatgacagctttgccaaccgcaccctgtgcttgaaagagtataaccgagaaaaaaagagacagaactccgtgggacacttggagagaaacggctcaatgggacaaaatcgtggccaatttaaaatatctgcccaaaaacaaggcctggcgctttgccccggatgcgatgcagcgctttgaaggcgagaatgattttaccgcccgtgcgctcaaagacacccaatatctgtccaaaatcgcccgcacttatctgagtgcgctttatgacggcggcgatggaaaatcgcatgtctgggtggtgccggggcggctgacggaaatgctgcgccgtcattgggggctgaacaacctgctgtcagagggcaaggccgcggtcaaaaccaagaaccgcaccgatcaccgccaccacgccattgacgccgccgtgatcgccgccaccgaccgggggctgatccaacgcatcggcaaaatcgccgaacgcgacgagctggctggagccgaaaaggaggtgcgctcggtccccgccccgtgggaggatttccgcaacgatatcgagcagcaactgaaccgcatcatcgtcagccaccgcgccgaccatggcacgatctcgccgcagggtcgcaaatccggccgcgacagcaccagcgggcctctgcataacgaaaccgcttacggcctgaccggagaaaccgataaacggggcgtgccgctggttgtcacccgcaaacctttgagcagtctgacggccgccctcatccgccgcgatacccccggcaaaggcggcatgatccgcgatgcccatctgcgccagcttctggcggtggctattgagggcaaagacggcaaggctttgaccgccgctttggcagaattcgcgtccaaacccggaccttatcaggggatccgccatgtgcgggtgattgaaccgatcggcacggcgcccatccataatggccagaagaaggcgcataaatcctatgccacctcgggcaatcaccgctatgaggtctggcaactgcccggtggtaaattcacccattgggtagtgccgaatttctatgcgcataagcccgacctgccaaccgatgcccgcccagccagcccggccacttgcctgcgcccccatcccgcggcgcgtctggtcctgaagctgcaaaagaatgatatggtgcgcttgcaggatagctctggcaaggaggttgttgttacggttgagaaattcgaccaaagcggaacgatcgagatggtcccccattccgaagccaacgccgccgaccgttacaacaagaacaagtccgacaatgtctatatccggcgttctgccaacaccctcatcgccgctcaagcccgccgggtctttgtcgatgaaatgggccggttgcgcgatccggggataccagtctaagggggcaaattaggtaaaaacttagggttgtattataatccagctatgaacgattcgcatgggggtgcgagggggtaagatttggaccagatcattgatatcgcgacagatggccgccatctgtctcgcgtccgtggctttctgaaagtcagtcaggacggggccgaaatcggacgcactccgctggatcagatcgccgccgtcatcgtccatgcccacggcaccacttggtcaacctcgctgctggtcgagctggcacagcgcggcgctccggtggtgttatgcgccgccaaccacgccccaaaatccgtgctgatgccgctggaaggccaccacgcccaaggggcccggatgcgggcgcaatggcaggccaaggcaccgctgatcaagcaagcctggaagcagatcgtcatcgccaaggtgaaaatgcaggccgccgcgctggactccatcagccagcccgccgccccgctgcatatgatgctgcgcagggtcacctcgggcgacaacaccaatgtcgaagctcaggccgcgcgttactattggccacgcctgatggggccgcaattctgccgcgatgccggggccacggatgaaaacgccctgctcaattacggctataccatcctgcgggccgccacggcgcgggcggtggtggcggcggggctgcacccgacgatcgggctgtttcactccaaccggggcaatgcttttgcgctggccgatgacctgatggagcccttccgcccgctggttgactgctctgtccgcaacatcgccgccacgcatgggcccgaggtaaacaccgatgccaaacagaaactggccagcctgatcgccaccgatctgccgctgggccaaggcatcaccccggtctcggttgccctgagcaagctggcgatttctttggggcagagctttgaggccggcaagctcagcctcaccctgcccgcgccgcccgatcctctggtttttgcggggttgggcaaatgagcgccgttgtcacccaactttcaggataccgattgatgtggattttagtgatgtttgatctgccgacggacaccaaaaagcagcgcaaggatgcggggaagtttcgggattttctgctggatgagggctttgagcgcagtcagttttcggtctatgcgcgttttgtcaatggcaaagaggcgttcgccacccgcgtggcccggatcgagtgtcatttgccggcggcgggggatgtgcagattctgaacttcacggatcggcaatatcgtgatattgtacatttctcggatcaggggcgcaaagagccccgggaaaatccgaagcaactggtgatgttttgaggtgattcgtgctggaaagtcataacagacctctggaaaaactcttgaatatcagagcgttaaccagagatctattatagccattcaaaacccgcggtccagccgcaacttgaactcgacccgtttgcaggccagttgcattatagtcattcaagactcgggacctcggttgccaaaatgtctcatccgctcggatcgccggatcaggcgctgtcattacgcctgatccaagcatggtgtggaacaaaccccgccagcccccgggccaatcgggcccgcaagccattatccggcgaatgtatagccggttttgaccgtggtgtagaactcggccgcatatcggccctgttcgcgcgaccccagagaggagcccccacggccaccaaacggcacatgataatccacccccgccgtgggcaaattaaccattaccatacccgccttggcgccacgcttgaaggcacgcgcatggtgcaggctggcggtgcagatcccggcggacaggccgaattcggtatcattggccacatgcagcgcttcgtcgaaatcctctacccggatgacactggcacaagggccaaagatttcttcgcggctgctgcgcatgtcgtttgttgcgttcaggaaagcggcgggggcctggaaatagccctcggtttccagattcagctgctggccgccgaccacctcggccccgtctttgtgggcgatgtcgatataggacagattgctgtgcagctgcttttcggaaacaaccgggccgatctgcaccgaggcatccagcggattgcccaccttgagcgcccgcatcccggccaccagcctgtcaacaaagcgatcataaatgccgctttgcacgatcagccggctggaggcggtgcagcgctgcccggtggaaaagaacgccccattcaggcagacgtcaacggcaatgtccagatcggcgtcatccagaatgaccatggggtttttgccgcccatctcggcctgaaatttcttcatgccactggccgccgccaccgccagcccgcgcccgatggggaccgagccggtaaaggaaattgcatctaccagcgggttctgcacaatcgcatcccccacaaccgatccccggcccatgacaaggttaaacacccccgccgggcagccggcttcgtcaaggatttgcgccagaagatgcacgctggccggggtcagatcggcgggtttgcacagcacggtattgccataggccagagccggggcgattttccacgccggaatagcaatggggaaattccagggggtgatgatgccgaccaccccgaccggttcgcgcgtgacctcgacatccacatccgggcgcaccgaggcaatcgcatccccggcaacgcgcaccgcctcgccggcaaagaagcgaaagatctgggccgcgcgcacggtttcgcccaccgcttcggccagcgttttgccttcttcccgcgccagaatgcggccgattttgtcctttttcagcagcagtttctgcgccacggtttccagcaaatccgcccggacctgcggcgaagcattcgcccagcccggcagcgcctgtgccgccgcttcagccgcacggttcacctgcgtggcatcggcgcgggcaaactgcccgatcacatcagacacatcggccggattggtattttcgctcacatcatccgagccaacccattgacccgcaatcaaattcttgtgcatggaacactccctcagaaaaacacccacggcccaatggccatgcgcaacccttatgcttttggggccggcccagcctttgcaaccgggcccgccatgataaacagatcgtcaggccgcgccggaaatcgctgcctcgatcgaggcttcgagaatatccgccgcttcgtcaatctgctccatcggtgtggtcagcggcggcaacaggcgcaccacattgccataggtgccacagggcagaatgatcaggccgcgcttttcggcttcggccacgatccgcgcggtgacatcggcatcgggggcgttgctgtcgcgatccttgaccatctcaaaggccaccatcgcgcccagcccgcgcacatcacccagaggctccatcccctgacgttcggccatggccttgagccgggactgaatccgctcaccaatctcggtggcgcgggcgcagaggtcttcttcttcgatcacctcaaacaccgcattggccgaagccaccgccagcgggttgcccgcataggtgccgccgatcccgccaaccggcgcggcgtcgaccacctcggcccggccggtgaccgccgagagcggaaagccccccgccagccccttggccatggtcaccagatcggggacaaccccggaatgttcaaaggcaaacatcttgccggtgcgcgcgatcccggcctgcacctcgtccgcgatcagcatgatgccataggtatcgcagatctcgcgcagcttttgcagaaactctggcggcgcggtgacaaagccgccttcgccctgcacgggctcgatgatcatcgccgccacgcgctcggggtcgatcgaggaacgcagcatgttttccagcgccaggatcgcatccgcgaccgtcacattttgcatcggattgggaaacggcgcgtgcatcacctcgggcggcatggcgccaaaggctttcttataggggttgaccttgccgcacagggccatgcccatcagcgtgcggccatgaaacgccccgctaaaggcaatcacgcccgaccgcccggtataggcccgcgccattttcaccgcgttttcgaccgcttcggcgccggttgtcaccagcatggttttcttttcaaaatcgcccggggtcgaggcattcaggcgctcggccagctgcatatagctttcataaggggcaacgtggaaacaggtatgggtgaactgttcggcctgcttggctacggcctccatcagcttggggtggcggtggccgcaattgttcacggcgatgccggcggcaaagtcgatatagcgcttgccgtccacatcccacagctcggcattcagcgccttggccgcaaaaatcccgcgcgttcccacgccccgcgcaacagccttttcgcggcgcgtttgaagctcttgtgaatttgtcattgtgttttccctgcgaatcgttggatgatcttgctcattattttgagcgcaaaccccgcgctttgcaagcaaaagcagatcggaacggcccggccagagtgaccatgagcaagcataaaacctcggatacagattttgatgttggtgccagattacgcgatatacgccggaaattcggcttatctcagcgacaactggccgatcaggccggtgttccgcatgggcagatttcgatgatcgagaccaacaaaagcagcccttcggtggcgtctttgcgcaggattctgggcggttttggcatgaccatgtccgagtttttcgaacccgacagcgccgcacccgcgcaggtgtttttcaggcctgatgacctgcgggacctgacatcgcagctttatcacgggccggatgccatgcgcgcgcggctgacctttcggcaggtcggggatgccggggcgcatgggttgcagatcatgcaggaacattacgagcccggcgcggataccggcgcggatatgattgagcatgactcaagcgagggcggcatcgtgatttctggcgagctggaagtgacggtgggcgatgaaacccgcattctgaaagccggcgatgcctatctgttcaacagccgccagccgcatcggtttcgcaatgtttcggggcgggctgccgaagtgatctcggcctgcacgccaccttatttataggccccggactcagccctctttgccaaagcgcatatcacctgagcccagcaccggagcgctttgttcggtggacagggcgctgcgcgagaaattgatcggcgtgcgcaacccggcaaacccctctggattgatgcaaagctcgcgatgggcgatttgcggttcattcagggcttcggcaaccgtgttgatcgggccaccgggaacgccagcgttttccagcgcggcgatcagatcggccttgggccagcgggatgtgacctcggacaggatggcgcagagggcatcgcgatgctcaacccgcgccggattggtggcataggcgggatcgtcgctgagatgttccagctctagcacctcacacaggctgacgaattgccgatcattgccgcaagcgatgatcaaatgcccatcgcaggccggaaacacctgatacggcacgatattgggatgcgcattgcccagccgggtgggagaaatgccgcccagcaggtaattggtggcctgattggccagcaccccaacgccgcaatccagcagcgacaaatccacatgctggccgcgcccagagcgttcacgctcggccaaggccgcctgaatgccgatcacgccataaagcccggtgaaaatatcaatccacgccaccccgattttctgcggttcgccatcaggcgggccggtcaaatccatgatcccgcacatgccctgaatcatgaaatcatagcctgcctgccgggcgcgcggcccggtctggccgaacccggtgaccgaggcataaactacacgcggattgagcgcggcaacactgtcataatccagtccgaatttcttgagccctccgaccttgaaattttcaaccaccacatcggcctcggcaatcagagccttgagattggccagagactccgggcaggagaaatcgcaggtcaccgagcttttgccccggttggcggcgaaaaaataggcggcgctgtgttcggtgccgccttggccatcggggcgatcgacaaagggcggaccccaacggcgggtgtcatcgccttggggcgcttcgaccttgatgacttcggcccccagatcggccagcgtctggccgatccaaggaccggccagaatgcgcgccagctcgacaaccttcaggcctttgagcggtgcttctgccatgatcagccaaaggccggaatgtcagtgatcgcgcggcccaggatcagcgcatgaacgtcatgcgtgccctcataggtgttcacggtctcgagattggcggcgtggcgcataacgtggtattcgttctggatgccgttgccgccatgcatgtcacgggcctgacgggcgatgtccagcgctttgccgcagttattgcgtttgatcatcgacaccatttccggcgcaaagcggttctggtcaaacaaccgcccgacctgaagcgctgcctgcaggccaagcgcgatgtcggtttgcatatcggccagtttcttttggtaaagctgcgttgccgccagagggcgattgaactgcttgcggtccagcccatattgacgggcgcggatgaagcaatcttcagcggcccccatggccccccatgcaatgccgtaacgggcgcggttcagacagccaaacgggccgctcatcccctcggcgccgggcagcagcgcgtcttcggacacctcgacatctttcatgacgatttcgccggtgatcgacgcccgcagcgacagcttgccttcgattttaggggccgaaagcccctccatgcctttttccagcacaaagccgcgcaccttgttgccatgggcttcggatttggcccagacgacaaacacatcggcgatcggggaattcgagatccacatcttggccccgttcaggcgatagccggtatcggttttcacggcgcgggttttcatcccgccggggtcagaacccgcatcgggttcggtcagaccaaagcagccgatccattcgccgctggccagcttgggcaggtatttctgcttttgctcttcggacccataggcgtaaatcgggaacatcaccaacgagctttgcaccgacatcatcgagcgatagccactgtcgatgcgctcaacctcgcgggcgaccagaccataggcgacataagaggcaccgacgccgccatattcttcgggcagagtcacccccaacaggccgtttttccccatttcgcggaaaatctcggggtcggtctgttcgttcatataggccgcctgaacccggggggccagccggtcgctggcaaaggcggcggcgctgtcgcgaatcaagcgctcttcatctgtcagttggctgtcgagcaaaagggcatcggcccagtcgaaacggctgcctttggatatgttggccatgtgtggtctccgcataatcatttgttttatgggctgatatcagtagtcagcgcccaaggaaaccgctaataatgcataaaaacattcataggatgaatagatatgcggccccggcgctttcttccctcggttcagctgttgctggcctttgacgcggttgtgcgccacggttcggccacggcggcggcgcaggaactgaacctgacccaaagcaccatcagccggctgatccggtcactcgaggcccagctgggcaaacagctgtttcagcgtcagcggcggcggctgatccccaccagcgcggcgattgcctatcaaaaagacatcgccaaagcgctggacctgattttgcgcgccagcatggggctggtgacaaaccccgatggcggcacgcttgcgctggcggtgctgccgacctttgccacccgttggctgggcccgcggctgtcggcatttttgcaggcgcatccgggcatttcggtgaaccttgccacccggctgaaacggttcgatttcgagggcgaagcctttgacgccgcgatctgcttcggggtcgaaccgtggcccggcgttgccagcgccaagctgtttgacgaaaaggtcaccgcctgcgtctcgcccagctttgcggcggcgcatcggctaaagacggtgcaggatgttcagcacctgccgctgctgcatcttgaatcgcgccctttggcgtgggcggattggttcgaaggccagggcatccgcctcagccccgggggcggtatggtggtggatcagttttcgatgatgattcaggcggcgatttccgggctgggggttgcgcttttgccgcattatctggccgaaatcgaaatcgccgaacaccgccttgttcccgtcctgacccccgcaatttcggtgcggggggcctattggctggtctggcccgaggccaaaccgggcgatgccccgctcaaagaattccgaaactggttgatggccgaggccaccggcagctgaaatttctggcggcaaccgggccgggccaaggccaaaaaccgtcgggccacgcctgcctgacggcccgatggctctgccccgggctatccattgccagcctgcaatgttaacatcaaacgcaccgaaccgtcacagccccaaaggatttcccatgcccgcagccaccacccgcgccgatttactggccgtcaccgaaaaagaattcaccaaactgaccaagctgctggccgatctgggcgaagaggcggcgctttgcgaatatgaaga

SEQ ID NO: 3686 - DNA, 20496 bp, synthetic construct
  source 1..20496: mol_type = other DNA
  misc_feature 1..20496: note = Synthetic
gaagcgcctcaagcgctaccgtggccttaaaattatctgaaaaactgcgtctcttggtcatttgtgtatcctgtcttcaaggttggatacatcttagcacgctgtcctgttttgccggaccacttcacataggtttggtgtgagagaactggatgagctttaccttgaaaaattcgtagacctccgcctcaagctaaaatcttcagcgcagaaggaaggtctggcagcaaaatcattggtaggtgcgctgagtgtgtctgtgccatttggagaaagcgaagcattctcgagcgagcgcgcgggtgaggtcgcatcgaaaatcgttgaacaaagcggcatcacattccggcaggtcaagaggacagtagagcatatcgacctaacgctacggtgctatcgtgatcagccgatagacctacctctactaacctatgtagcattctcgcgagtggcaatagatgctgaggggagatttaggtttgacgaaagcgtgttacctcgcgcggcactttctcatgagattgcggcaagtcttctttctagcagagaaaaaagcccagtaagcatcgctgatgaggaaagggcggcaaggtcttgcatcgagtttgttcgagataattgtcatgagctgatagagctcccagaagacaggtacaatctagatccgccgatgaataatcgaaaatactacgactggtataaggtgttggctgggttaggcccgacatatatttcgtcacatgaaaaaatgcttaatggtagccatcaactgctggaataggaacttggtataatgattgtggtgcccttgctccggaacactcttagcttcactgcgacgtaaagcttgagtgtcagctattgactgggttgccggaggagccaaactaagccgtttctaaccgagatcagcccgccattttttaaattctccacttcccgattgaataccctacgatggctttcgcgcttattggaactcgataggcgatccgtggcgatacttctttccatccattccttttggtcaacgcaaggagtgtttggatagcgagggtcatgcagacatttcccgcattcttggagtaatgcttccaaggttgaaagagcgatggacgttgggccagtaattttttccggcatgtctgcagcggtatcgacgggttcaactaggcaagtcgtgacgggatcatcgtcctgatcgcgccccaactcgacctgccgcaaggcgtagatgaacttgtatccggttggcccgtctctttgtttggtcacttccgctgagatcaccccaaactcatcccgggttagctcaatttcagtgtctattgcggcccgaagtgatgagtgcccacgcgcgccgcgcgcaacatccttgccggaatggtggatcaacataatgttcgaaccagtccctcgacgcagaacatcaagatttttgacgagatcggcaatatccggtgccgtattttcatctccgtcccccatgacccgcgaaagggtatcgacgacgatgagatcgaaacggcctgtttgagaggctagatgttgcaccatttcgacaatagcgggtgcatctgtggccttgcctgcaaatgtaaccggtgccgcgatgacccagaactgaggatcatccaacgcagagacacggttcgggaaggagctgccaccttcagcggctatgtagagaacatttcccttagtcacccggcgatttccccatttctcgcccttagagatatggtgggccagatcgagagcaaaaaacgatttcccgacattggagggcccgaaaacaaccgcaagtgttcccttgtcgagccagcctttcaccagatactcccgatccagagcggcttcaaaattccccgcccatgttgccgccgctaacagttcctttgccttcggccttaatagtgccgggtcactccggatcggcgtgactttgtcgaaatcattcatattgcattctgcctaaaagcaccgtttgggtcgatgcgggacaaaaatgccctttgatcatctgtcgtgaagctttcccacaaacggataaacagtcgcttccgatccggagttgaagcgctatcggtgtgaagtttgaccaagaaatccggatcatcaaaatcaggaagatcgcactccaattccggatgcgtatcaatcgaatgactgcggcgatactcttctgcaacctctgcaaacagtgatccggtgccatagacctcttggacaataatagcttggtcactaagcttttgcgcgagttcggggtctacttctcttgaaatttcattggcaagttctgctatctcgtactcatctagggcagcgatacatttcagaatgaattccaccgcatccgagagcagggaaacttggttcgacaaggctgtgttttctgttgattgctcaatggctgttttgtgtggggttcgacaggttaactcgttggtaggaaatacaataccttctcctccccagtccgccactaacgacctgtaagtgtatgattttacacgataaatctgcgttgttcagttttcgatcccacatttgttcccacacttgcggttcggttgaattatacattcagtctaaatcagacgtgtttccggtaatcagcctacgttgttcatcgcggctgatttgcccgtagctacgcaatgtcgtcaaaacgtcggtgtggccaaggttttgcgatgtggccaccagttcagcaactgacgtgcaatgcttggcggcgtgacgcgcgagcatatgccggaatgcgtgggggccgtagttgggaacgcccgcagcctcaaacgcgatgcgaacaatcttgcgcacgggttcggttgttttccaatgctgccgcgtgaatccgttcgctgtaaagcctgagttggaatttgctgtgatcgcggttgcggggaacaatggatcatcggggccatagagcacgatgtcgtcacaataggcgatccactcggttagcgcggcctcggcttcctcgaatccttttgcaaagaacgtatcaatcgccttaccaaacttggttgccacttcgcgcgggttttgcgtcacggactgctcgtgcaaatcgacgtgcttaattttgagcgaaaccaaagcggccacccgaatacctgtgaggcaaagaagggcaaagacggccttgtcgcgcttttgctggggcgtggtgcttggcatacgcgctaaggcgtgtttggcttgctttaggctaggtgcaggacgtggcggggccgcgcgtgcctctgcctcatcgcgtcgagacaagttgaaataatctgcatccgccgcttttatccggctgcgaaatccgtcttgctgggaaagccacagaacaaactcacgcaaggttgccaagatagaccgcattgttgatttgcccaagggtgttcccgccgtcgttttgctgtcttccaagtgagtgcgaaaccccatcgcctgttcaatatgaaaacgtgcaaagtccttgcgcccgttccaggcgtcgaaccgttcaagtgctgcgatttcgcgatccaacgtcttttcagaaagttggcgggcgaatttgcgatattccagaaagcggcgtttcaggcgttcgttcttttcattgggtcgtttggtcatctttatatcctgtatttatgagggttgtcgggatggttttcaggtgcgtttgaaggcaacgcgatgcagggtctgaggtggaaatacaggggggattgtgtccaccattataatgccaactcatcccgttttattgtgaggtcgagtttggcgcggatcgcggaaaggctggtcaaagagacgggcttgcacatgagcgtttcgcagacgtcacaaatcgctgtgagcatcgctttgttgcccgtgatctcgtaatcggccatcgcgccagcggggccacgacacgcacggcatcgcaggcaataaaactcacacagacctgttttcactttacgaccttcgcgctgggcgttgatgtgggcgcgtagatcatcaccacgaataagcggggggtatgacgcatccaaaagctgcaacccatctcggatccagtttcgtatcgtgcgaggggaaacgccgacaagtgccgccgcttcctttagtgtataacagcgataggatttgatcccgcttagacgggcctgtttgggcacggcgaattactccgtgcctgattgatgcgttgccagccattcgtgaatggcttcaatcttgatcaggcggcgcgtgccgatcttgatgctttttaggtcacctttggctaacgcggcgtagagagttgtccggccaatgccagcaagtcgtgcagcctcgtctggcgaaacggcaattgggggtgttggttgggtcgttttcggcgaatgtaccatcgttcatactccatcatttgacgatgaatgaactttggcggacgcagggtggatcaaaacagatcgtgcgtttcgatccagttatgatccacgtctagcctctgaaacataacggtttattgaggatagtgcaggcgatgtcttgtttggaaaattggccttgtagacagcaaggaccgccttggcttcttcgttccgtccttttagagcagttccgttctcggcgcggttcgcaatgatttgggtcaacgcctctttgtaggcactcggtcgcccgcccgtccgattcacgggaacgccagcaagcgcatgaaggtcggcatttacagccaatgtgccagattttgggtcaaagcgaagaacgtcttgcagttgaatagtgacatagggcggcacagacaaagtgcctgtcgatgtcaggataatcccaaaagtagacctcatttcaccgatcatagcgcctttaaaatctttgatatcattttcaccttgcatcatcggttggaaatacaatgcaatgtcacccgcagggctatccaaggccccaattcgccatgtttcgccatttaggggtgttgatttcctccgtttgcaattcagctggtctgccatctgtgcggtgaaggcaatcaggtttggttgtgtcgagatgaggtccaaccgggctttcgtgacaaatcctacatcagggcaatagtacccatatgatccggtctcatagacgattgcggcgtcatggggttggtcacacgcatcgcaaacaagcgaagaaacgacgcctgtttcttcgatcaccccagcttttagaagaagatcatatgccggatatttggaatacttgttcgccaagacgctgcagcgctgggcgatgagtgaggcgaagaggtttaccgtttccacttagactgcctcgataacgtcaaaccgttcagggcgctttgccagtaacttccatcgttccaagagattgatcacaaactgccgttccgcttcggtcttgtttgggatggttgtcgtattgggggtgcgcaatgtaaccgtaagggtcttggcgcgtttgccaacttgcggtgcgagcgcgatccgcaaggttgtgccgataatcgtccagcctgctgcatggatcggggagcgttcaccgaactgacgttcaagaaactgatagatggtttcatcatccccccgccgttcaaatcgcgcaaaaccgccacccgtggaataaaactcaagagaagatacttcgacgctggccaccccatcggcaggttcggtgggaaagctgggatttgacgctatattgcccaacaaaacgtcgcggcgcggtgtctcaataggtggtgcggattgcggagcaaaatgctgggaaaaggatgttgcgtattcgtcgcgtatctttttgccgccacgggcgcaaatttctacgatccgttctttggcattgcatgcaattccgacttcaagaaccctttgcacaacttgtcgttccaacccctcagatgatccaaaggtaagttcgctttctgcgttggattcgacgtagatcgtcgcctgtaaaatttccgtttcttccgccgtgatggggtgaacccgaattgacgtgtaccagtcagcttcgcgcttgcggtgttccggcagatcaagaatggcaatcgcgtcggcgacaaagcctgcacgggctacctcgtcgcctagcgcccaaggtttgccatcgtcgtcgaattggaaggcagaccagttttttccaccagtgcgttgcatcaaagaggcctgcaccgaaacccgttccagcgtctttggatgatctatggccagcatcaggagaacgtcctggatgccctgcaacccttctaaatcaatgcgctgggcactgcagatttgctcagcagcggtcatgccttgcggggtagccaaactggcaaggtgatcaagttcggctttgaccttatcttgtcgcaggtcaggtaaatcggcgattagcgtggcaatgtcattcacaagcgctgtcccgcgcccttggccttgccaattaaaatcatcaggggcatccaccccgaacgcctttaggaaagctgccaatctctcgtcgggggatttacggataaagccgctaaatgaagccatgaatagtgccttcggttgttacaaaggctatatttggtgttcacgggagtgtgatacaagccgtggttgcgtaaaaatatcagtgcagggggctatggcgcggcagctggtttgtggtgcgatgggagaggggtgacggaatgggtgttggggagcaggtgctggagttatgtgtccattcaggatgtggctccgccttagaatttgcgtaaatgcattcagtgtgttggacgagtggggctcgtccaaagtcaagctgaggctgtcttggttggcctttataaatctgtattccccgccttcgtgcgtcgtcttcagcggtttactgctggggtctaagcggatgctgaaactagcgcgtggttaacgggccttggatcccgctcaggaagggcgtggccaagcgcagggcgcagatccacgttcgaggcgttgctaccctaactcagattttggcgcgacatgatgcgggcaagtggacgtcgtagtctgcgatctgcaaaccacagggaactggatatttgaagtttggtaaaatagtttggttttgccgccaggcatttgaaagagaaaaaggcacaggccgtagcctgtgcctcaatgtggtgcaatcgaatgcttgttaacggctcgaccgcgaattttgaacgcccccatttttcacgggttgttcgcaaaggtcaagtgccctttatggttgaaatgaactaggctcgatgcgatcttggcgcactacttggaggttgagtgatgcggttgggattggacgttgggacgaattcgattggttggtggttatatgcgagcgagaacaatacgattaccgatgtgatcgacggcggcgtgaggattttttcagacgggcgggaccccaaatccaaaaagtcgcttgcggtggatcggcgcgcggcgcgcgcgcagcggcggcggcgggaccgctatctgcgtcgtaaggcggcgttgatgaaacatatggccacagcggggctgatgccatcggatcccaccgaggcaaaggcgcttgaagtgctggatccctaccgacttcgctccgaggggctggatcgggaactcccaattgcccatttcgggcgggccttgtttcacctgaaccaacgacgaggtttcaaatccaatcgcaagactgatcgcggtgacaatgaaaacggcaagataaaagacgcgaccaagcgtctggatgaggaaatggcaattaagcaggcccgcacttatggcgagtttttgcatatgcgtcgttcggaaaaatgcgagaaacccgcgtcggagccggctctgaacatggacggcactcgcaacgatgaccggcggaccaaacctgtccgcacgcgcttgtcggttgcgcgccgtgacaacgctgaaaaagccgaggcggggtatgatttttatcccgaccgacgacacttatccgatgaatttgaacagctctgggccgcgcaagcgcaatttgcgcccgaagtcttgaccgatgatttgcgcgatgaaattgcgatgatcatctttcatcagcgccccctgaaaacgccagaagtcggtttgtgcctgtttactaacgagcggcgtatcgcaagcgcccacccgctgaaccaaaggcggatccttgtagagacaatcaatgggttgcgtattgcggcacggggagaggcggctcgcgggttgacccgcgaggagcgcgatcaaattctccatgcgcttgacaataaagcgcatacaaaatctatgtcgggcatggccatgacgctcaaggcgctcggcaagacgatcaagctgcgcccagatcaatcctttactttggagactgcgaaccgcgacgccattgcctgcgatccggtgcgggccagcctgtcgcatccggatcgtttcggcccgcgttggtcaatgttggattgcgaccgccaatggcacgtgattgagcgcttgcgcgcggtgcagagtgaagcggaatatgtcgaattggtgaactggttgatttcggcgcatggtttggatcgagaccatgcggaggcggttgccaatgcaccgctgccggaggggtatgggcggcttggcctgacagcgacgcgcaatattcttgcggctctagaggctgacgtgatcccgtatagcgccgcagtggcagcctgcgggtggcaccattccgacggcagaaccggtgaggttttgaccgaacttccttattatgggcagatccttgatcgccatgtgatccccggcacctacgcagagaccgacgatgatgtgacccgctacggtcgcatcactaatccgaccgtccatatcgggttgaaccagttgcggcggttggtgaaccggatcatcacggtttacggccgccctgacgaaatagtcgtcgaactggcccgtgatctcaagctgtcggaagatcaaaagcgcgaggtgcagcgggacatcaaaaagaatactgatgcggcgattgcgcgcgggaaaaagctcgaagagatgggcgtgcggaacacaggcgcaaatcggatgaagtttcgactgtgggaggagcttggcccgacgatcggcccgcgatgctgcccgtattcgggtgaggtgatcagcgcggcgatgatctttgacggctcttgcgatatcgatcacatcctcccctattcgcgcacccttgatgacggctttgccaatcgcacgctttgcttgacggccttcaatcgcgccaaatcgaacaagaccccttgggaggcgtggggcggcactcccgcttgggaaaatattgccgccaacctcaaaaatttgaaggacaacaaggcatggcgtttcgcgccggatgcgatggagcggtttgaaggggaaaaggatttcactgagcgcgccctgaaagacacgcaatatctggcgcgcatagcttgtaggtatctcgaggcattgtatgatggtggcgatgagcgtcgccatgtctatgcggtgcctgggcgaatgaccgaaatgctgcggcgacactggggtctgaataggctgctgcctgatcgggacggtgccgtgaaggccaaaaaccgtaccgaccatcgccatcatgcaatcgatgctgccgttgtggcggcgaccgatcatgcgcttatcaatcgtatcagtaaggccgcaggccgcgatgaagagggcgggaagggcgcggaagacgtcgcccgaactacattgccgccttgggaggggttccgcgatgatattgcaaggcaggttgacacgatcatagtctcgcaccgtgcagatcatgggcgtatagaccgcgaagggcgaaaaagcggccaagacagcaccgccggacagcttcacaatgataccgcctacggcattattgatgatcacactgtggtcagccgtgcgccgttgttatcgcttaagcccgccgatattgccgtgacgactaaaggcaagaacattcgcgatccgcagttgcagcacgctttggctgtcgcgactaaaggctgcgagggcaaagcactcgaagaggcgcttatagcattctctgccaagcccggcccctatcaggggatcagccggctccggttgaccgaaagcctacagtcctcggcgagggtggaaatcacaggcccatcgggacaaccactgaaagcttataagggagacagcaaccactgctatgagatctggcgcatgcccgatggcaaacccaaggcgcaggtgattactaccttcgaggcgcatggcgaagcgattcgccgcccgcatccggcggccaaacgtctgttgcgcgtgttcaaacgggatatggttgcgatagagagggaaggggagcggttgatttgttatgtgcagaggtttgatcccgccaatggtatttttcttgcgccgcatgtcgaagcaaatgccgatgcaaggtcgcgtgcaaagggcgacccttttcgaattctgcaaatgggtcttggcccagctatcaaagccagaatacgccgagttcacgtcgatgaaatgggccgtcttcgcgatcccggaccggtgggataagctgcggattcgcgcgaatcggaaaaatatgtcacacttccaagggtgtaggagtgtgatgagtggatcaaattatagacatcgcgaccgatgggcggcatttgtcccgcgatcgcggttttctcaaagtgtcggaaaacggtttggaaaacggccgaacgccgctcgatcagatcgcaggcgtcatcgttcatgcacatgggacaacgtggtccacatcgcttttgactgaactggctgatcgcggcgcacctgtggtgctttgcgcttccaatcatgctcctaaatctgtgctgatgccgcttcaaggccaccatgcacaaggtgcgcgcatgcgggcgcaatggcaggcaaggtcatcgctgaccaaacaagcatggaagcaggtcgtgggggcgaaactccatatgcaggcggcagtgctcgcagcccatggcaaagctcctgcgccgcttttgatgatggtccggaaaatcacatcgggtgatagcaccaacatagaggcgcaggcggcgcgccattattggccgcgcatgatgggccgtgattttcgccgagacagcgctgcgacagatgcaaatgctttattaaactatggctatactgtcctgcgtgctgctgccgcccgtgctgttgttgccgcagggctgcacccgacaatcggattgtttcactcgaatcgaggtaatgcttttgcactcgcagacgatttgatggagccgttccgccccttggtggattgcgccgtgcggtcgttgatagcgcagcaaggcacagacgtggacacatcagcgaaacaagtattggccggattgatcgctctcgacctaccgctcggcgaggggatcacgccggtttccgtcgcactgtcgaagcttgcaatctcgcttggacaaagtttcgaagcaggaaagctgtcgctggcccttcctgctccgcccgatcccttgacacttaaggggctcggaaaatgacaaaaactgtgacccaactatcgggatatcgcctcatgtggattcttgtgatgttcgacctgccgaccgataccaagcgccaacgcaaagacgcgggatcttttcgaaacttcttgcttgatgaaggctttgagcgcagccaattctcggtctacgcccgtttcgtgaatgggaaagaggcattcgcgacgcgaatcgccagaattgagcgacatcttccggaagcaggtgatgtgcagatcttgaattttactgatcggcaatatcgtgatattgttcatttttcagatcaaggccgtaggcagagacgtgaaaacccgcagcaactggtgatgttttgatgcgattcgttttgaaaattcgcgatagagttctggaaaagcctttgcgttacataggcttaaccagatatctattgtagctgttcaaaattcgcggtccagccgcaaccttgctgaatatccaccagcgcgggcatggattgtagctgttcaaaattcgcggtccagccgcaaccttgtaaaaaaggctttcaacgtcgggcgtattgtagctgttcaaaattcgcggtccagccgcaaccggctcgcgaggtatgaccgttgcggaggcattgtagctgttcaaaattcgcggtccagccgcaacgccgatatatgacggccgcttgtgacgctgattgtagctgttcaaaattcgcggtccagccgcaacagcaattgccgcgttgacggcagaggccttattgtagctgttcaaaattcgcggtccagccgcaacgatggggggctaggggctaagtattcccactatcttgttggcatctgcatttggatcaagcggttcgcgtttgaaaacgcaaattcaggaaagcgcaatcacattttcgcccaaggtttcgggggtcgtaacctgtgcccatgttgccataagatcacggcgcttttcgaaaagatcagaccgcgcataggccgcttcggccttgtctttgatcccgtgcgccagcgccgcctcgatcacttcgcgcgggaagctggtggtctcgcccgcccaatcgcggaacgtggaccggaacccgtgaacagtgatgtcgttgtagtccatccggcgcaaaagcgcggtcatgctcatatcggatatgggtttgcccgcttttgtttcgctgccaaagatcaggtcagtgtctcggccgcgcggtccaagttgggcaatggcggcgggtgccagggggacacggtgttccttggccgctttcatgcgctgggcgggaatggtccacacgccgtttgcaagatcaacctctgcccacgtcatgccacgggtttccccagatcgtgccgccgtgagaatggtaaaggtcaacgcacgcgctgaaacgccactgcggcttgaaagggcgttcataaagtcagcgatatcggcatgaggcagggcagggtgatgtttgacggcccttacctttgtcggcttaggtaagaggttgtccaagtgcccacgccaccgcgcggggttgtcaccttctcgaatgcccagcgccgatgcatagtccagaaccgcttcgatccgttggcgaacacggtttgcggtttcgggtttctgggaccatatcggtttgagcgccccgatcacgtcggcggtggcaatcttggtaacttgcatggtgccaaggctggggaagacatacgcctctagcgtggacgtccattgcgcggcgtgtttcgcgttcttccagccggatcgtttgttttcgatcagttctagggcggcgtccttgaatgtcttgggttgagattgccgacgtttggctatcggatcatccccggctaagatcaaacgccttgcctctgtcgctttatcccgcgccattgccaaggtcacatctggataagcgcccaatcccaggtcgtggcggcgtccttggacctgatacctcagaacccaagaacgcgcccccgtcggttttacatacagaaaaagcccgcgcccgtcgccatgacgtccagtccctgccgtttcaacttttcgagcgcttaacttcatgtcgttcccacatttgttcccacacttgatctaggtttagggcgaacggatttgaacgtcaatggcggggagtgaatttaaggtattgaaagtaaacggttaagatgggtggtggcgaatgtgggtgaacccctgaaaacagggggtatacggttccccagtccgccacttctgccttaaaggcgttgttccccttataaaactcactcattttgacgaacctttcgtgtgtgttagcactttgagcccgtttggttcttaaaaagcttggcaaaacctcgatctgccatgaggccatgcctcgcttttcctgcatgaaaatgaactatttgcggtgacgcatggcccggcatcgtcatgatctcacgctcagatgcccttgcctctgccaactgagttgccagacctttctcaatccgtgcgaggtgccgtgcggcggcgccgcttcattgcaccgctaacctagcgcattgcattgcccgatccgttcggagagcggccgcgatctccagcggtttcaggaaacgtcattttgacgatggtagcagctcaaggacttcttggaggttgcgggtgtcttagggcgggaactggaaaccgaagttgttcatggaacaaacatagccgatagactgtcggatgtatctttcaggggtgcgagtggggcggctaggtgtcgtgatgtaagatgcgctgcgcgagggctgcaatgatgtcggtttgagtgacgatgcccgtcacgttaccattctctagaacaggcagggcttctgtgccgccgccgaccatcatcggaagcaaagccccgatgggggtcgtgatcgtggcacgtggaccggcgacactcataatgttctcggcacatacggttttatcccgattgcgatccagtaaccggatcaatgcggatcgaaagccacggttgaggcgcaacgaatcttcgcgcgcacggctgacgcgcacggctgatcaggtcgatttgaaagataatgcccatgaatttcgcgtcgcggccggccaccggcaaggaggtgaagcgatggcgtctgaataaatctgcgatcgtggccaaagaggtgtctggcgtcacagtcaccgggttgcgggacatgatgtcagcggcggtcaatgtgccggtatgatgggtggccgcctgaagttcggcggcaccgatcaaccgggcaaggtcttcgaccccgacgttgaatgattgcctgtggcgctccagcagattggtcaactcttcttcggagaggccgagccgctccatcggatcggggcctttgccgctttgatgatcggcatcctcgaattggcgaaagggataacggcacccggtcagccgtgcatagcctgtcgcaaatatcaccaaaatcaccgtgcccaacgcgatcggagacagcgcgaaccaaaagccaagatcctgcacagcggcggggctcatcgcggcggtcatggccaccgcaccggctggtggatggatcgcgcggcacaagatcgtgacagagatcgcgccgccgacagccacagcgatacgaagcgccggatcgtcaatccacaggcaggccgacaccccggaccagggccgcaagcgtgttgcccaccacggccgaccacggctgcgcaagcgggctgttgggcacggcgaacaaaagcaccgacgtcgcgccaaagggcgcaacgagatacattccgagcctgtgatccatcgatggagaaagtaaaaacaaccccgtcagtgccaaggcaaggcacgcgccaattccggcgcgggcggcttcgatggacgaggttcgggcgacggccggaccaagtgaacgcaagatgtgcaagatgcggctccccgatgtgttctgcgtaaattttcagcaaaatgtgaaaagttcaagcggtgtgtcgggtttgccgaaccgcatttgatttgaaaatggtagtgaggttaattacctgaaaatgatgacttaaattggtttgctggcaagggcgcagagcatgcgtcaaaacccaactttccccgagggttgcgaaaacggtgccgtcgccgcgccgcgaccggagaatagggcattgcgcccggatgtcgcccgggcgggatttgcggtgctcttcgacctttcggtagctatcgctgcaggggcgactgcaatatgttttggggaaatatgggaagtgaggaccgattccatgcaaatgaatgaccaaagagatatccgtgccgatcgcgcgacggtttgggcggcgttgctcgaccccgaagttctggcgcaatgtgtgccgggcacgcaaagcctgaccggatcccccgaagacgggttcgaggcaaccgttgtgcaaaaggtcggtcccgtgaaggcaacgttcaaaggcgttgtcagcctgtcagatatggtgccattggaaagcctgacgctgtccggcgaaggcaaaggcggcgcggcgggttttgccaagggcggtgccaatgtccgtttggaggaaattcccgaaggcacgcggttgatctatgatgtcgaggccaaagttggcggcaagttggcgcaattgggcagccgtttgattgacgggtttgccaagaaaatggccgatcagttcttcagcgattttcaatctgccatcgagggggacagcgccgtcgatgacaaggccgaggatgatgccacagacgacgcagaaaaaggcaccaaaaaaggatgggtcaaacgcttgatcagctgatggccgtattgcgcaaccgtatctgagagggccgccttttggggcggcctttttgtctttgcctgtgctttggggcttttgcggcgggcggctggtcctgtgcgttggcgcagggcggggtgcgcagttgattttctggtgctccggcgctctgcgctgtagcttgcgtctctgggaaaagacaaaaggcgcgcagatgacagcaattgtatcagtgaaagaccttcgcaaggtctatgatggcggcttcgaggcgctcaaaggcgtgacgttggagattgaagagggcgagattctggccctgcttggtcccaatggtgcggggaaaaccactttgatctccgcactatgcggaatcactgtgccgacgggcggttcggcgacggtggggggctatgatatcatagaaagctaccgcgatacgcggcggctcattgggttggtgccgcaagatttatctctggaaccgtttgaaaaggtgatcacttcggtgcggttgagccgcgggctgtttggtttgcggcgcgatgaggccttgatcgaggatatcctgcgtagactgtccttgtgggacaagcggaacgatcaaatcaaaactctgtccggcgggatgaagcggcgggtgcttatcgccaaggcgctgagccacgaaccacgggttttgtttcttgatgagccgaccgcaggcgtcgatgtcgaattgcgccgcgatatgtgggagatcgttgcggatcttaaaactcaaggcgtgacgatcattttgaccacgcattacattgaagaggccgaagccattgccgaccgcatcggcgtcatcacagatggccagattttgttggtgcaagatacggcaaccttgatgcggcaaatggggcgcaaggaattgcgcattgatctgaaaacgccggtggaggcggtaccgcctgtgctgggcggttatgatctgcaactgacggctgacggcgcggcgttgagctacagctatgacaccaatgccgatggcacggggatcaccgcgctgttgggggatctggccaaggccggtttggcattggccgatatccacaccaaacaatccagcctcgaagaaattttcgtcggcctcgttcacaaggaggatgcgtcatgaatgtgaacgccgtccgcgcaatctatttgtatgaaatgtctcggttttttcgcaccattttacagagcttcatttcgccggtgatctcgacctcgttgtatttcgtggtcttcggtgccgcgattggcagtcgcatcgatcaggtcgaaggggtgtcctacggggcctttatcgtgccggggttgatcatgctttcggtgatgacccaagccatatccaacgcctcgttcgggatctattttccaaaattcatcggcacgatctatgagttgctctccgcgccggtgaatttcctcgagatcgttttgggatacgtcggggcggcggcgaccaaggccttgttcattgggatggtgatacttggcaccgcgagcctgttcgtcgatctggaaattcagcacccgattgcgatgatggcctttatggtgctcacttgcgtctcctttgcactatttggcttcatcatcgggatatgggcgcagaactttgagcaactgcaattgatcccgcttttggtgatcacgccgctggttttcctcgggggctcgttctattcgatcaaaatgttgccgccgatttggcagaccatcacgctgttcaatcctgtggtgtatttgatctctgggtttcgatgggcgtttttcggcgtgcaggacgtcgatgtcgggctgagcctattggcgatcctcggcttcacgtcgatctgtcttggactgatctggtggattttcaaaaccggctaccgtatccgtagctaaatgatgcgaatgcgcgatgggcggcgggtttctttggtccgccgcttgcgcgtgacttgtttgtggcgcagatgcgctctacatccgatgacatgaagcgatttatcccatttgtaaaaacaccgccgaccgtgtcggtcatgcgcctgtccgggtccatcggcacaggcaaccgcagcgctttgtcggatgaggcattggccccgatgatcgaacgtgcgttccggcgcggcaaacccagcgctgtggccctgttgatcaattcgcccggcggatcgccggtgcaatcatcgttgatcggcgcacgtatccggcggcttgccgaggaaaaaaaggtgccggttctggcctttgtcgaagatgtcgcggcgtcgggcgggtattggctcgctgctgccgcagatgagatttacgccgatgacagctcgatcctcgggtccattggcgttatctccgccggttttggcgcgcatgttttcttggcccggcaaggggtcgagcggcgggtttatacggcagggaccagcaaatccatgctagacccgttccgccccgagaatcccgaggatgtcgaacgtctcaaagaaatgcttacgcagatacacggcaattttattgcccaagtcaaaacgcgccgtggcgggaaacttcaagatggcgttgatctgtttaatggcgatatttgggttggagccaaagcggtcgaggtcggattggccgatgggatcgcccatatgatgccgcatctcaaagagcggttcggcaaagatgtgcgtattcgccggtatggaccgcgccgctctgtgttgcagcgcttcggggcgcggatcgttggggatgcgctcggtgccgtggaagaacgcgccgattttgcgcgcttcggtctgtgacgtgattttcaagattgtcactctgtttttggtgggcatgggtgtgttagccatgttcggcaaggcgcgctttcccggccagaaacggttggcggcggcacgctgttcgaaatgcgggcgctaccggatcggcaaggggccgtgcggttgcggcaagaataagggctgaacgtgatggaatggcttttggccggtttaggtttggtgatcttgctgctggcaggggacgcgttggtcaaaggcgcggtgaaccttgcattgcgggtgggtattccggccttgattgtctctttgacgattgtggcctttggcacgtcggcgccggagttgttgattgcgatcagcgcggtcagtgagggaaagccggggctggctcttggcaatgtggtcggatcgaacaccgccaatattttgctggttttgggcattcccgcattgctcgcggtcatgcatacatcgcaatgcaacacacgaaaatcctatattttcatgattgtggcgacgcttttgttcattggactggcctttacggggaccttcacggcggtgtcgggcttgatccttctgggggctttggctctggttttagccgatgcgtttcgtgatgcgggtgcccaccgcaaggcgggggcggcggcggctttgctggccgatcccgaagaggaggtcgaaggcgcggatccggatatgccatggtggaagatcggcgtttttctcgggctcgggctgatcggtttgccgttgggtgcggatatcctggttgaaaatgcctcgatcatcgcgcgcgattttggtgtctcggatacggtgatcggcctgacgctggtggcattggggacctcgttgccggagctggcgaccacggtgatggcagcgctgcgcaggcaagcggatgtcgcgcttggcaacgtcatcggctcgaatatgttcaatcttctggccatcatcggcattgccagtttggttggcccgatcccggttgatccggaattcttgcggtttgatctttgggtgatgttgggtgcgtccttgttgctcgtgccctttgtgttcttggcgcgcgatatcacccgcatctgggggatttttctgacggcgctttatttaggttatgttgtgattattctgatttaggcaccaaaacggaggcccatatgatgcaagagatccaaccacgcgctttgattaccggagcgggaaaacggcttggccgggcgatggcgatatatgtggcgcatcgcggatttgatgtggccgtgcattacgcccgctcaaaggccgaggccgaagatgtggtgcgcgaaattcgcgatctggggcgtcatgctattgcaatcaaggccgatgttcttaacgagggcgaggtgcagcatttgttgcctgcggcggctgccgcgttgggcgggccgatcacgtgccttgtgaacaatgcgtcgatttttgaatatgacaacatcgaaagcaccacgcgaaccacatgggaccggcatttcg

SEQ ID NO: 3687 - DNA, 20005 bp, synthetic construct
  misc_feature 1..20005: note = Synthetic
  source 1..20005: mol_type = other DNA
cgcgcaggtgtccggtatcttcctgaacggctgatagccggcttcactcctcaaccctcagaaaggaatttcccatggcaagtctttcgcagctctgcaccttcgacatgaatgtgtggatcaaccacatccggacggacatgaatgtcgtcctggacgaccggacacggctttgcatgttctactcgcaggatccgcgcgagatcggtctcttcgtggatggtcaccgggtggcaacctttcgcgaagagggcgcgccgatccgccatgagcccaacattgccgcgggcgtgcccgagtatcccgatcatgcggaggtgtccgaggccaggatcgccgaggcctcggcctgcttcgcgacctgagcctgtcaaggtcgacatgtccaaacgcatagctttcgcgataatcgagcacggccgcgcgaccgagtggctgaccagctgcgtgttgctggtcttcgcgatcaccctgatggtgcccggcgacacgatgggacgggccgggttcgcgcccttccgcagcatgggcttcgacgaggccatgctgtcgacgccattggcgctgatagcctcggctcggcttgcggcgctctacatcaacgggcagtggcgtcgctcgcctgtcatgagggccacgggtgctgtcgtgggggccacggtgttcacgatgctggcggtcaccttcggctgggcctggctaacggctggcgccgtcttccagaacgcggtggctttgaccacggggttcggcacgtacctggtcctggcagccttcgatgtacttgcagcatacaggagcggcgctgatgtccgaattgctcggcctcgggcctgaagaagttgcgatcgtcggggcagggctgggcgcctttatcggaacgatcgtcgtcacgatccgtggcgtcaagaaaggcaaaccgaccagcgccgcggtggctgccgcggtctcgggggcgtcctgccgggccggcgacatcgcaccggtcctggctgtcatccagcgcgacctgcaggaaatgagcgaaaagcaagacgagcacggccgcgtccttgcggtcctcgaagatcgcacccgatcgcgttgaaagccgatcggatcagaacaacaggcgagcgtaccacagagccttgtccacgctgatcgccaatccgattgcgcaggccagtatgtcgaaggtcatcgagcggatgtttggtctcatgggccacgtttcgcatcgagaccctgaataagggttaaaagaccaacccgagatccgctcgctaccagacaacccgtaccaaatgccccgcatttacgcggggttttctgcattggagaaccatcatgcccatctggaaaggaaccgccgcgccgatgtcggccggtgcattcgcttcggccgcgatgctgctgaactgcgaggaagccgcgatccgcgcgctttgggatgtcgaaagcgccgggaggggcttccgccccgacggcagcctgacgcgccggttcgagccgcaccacatgccacgctcgctctggccccatatcgggttccggcccggggcgctggcgccgtggaaggcttcgtaccggctcaagacctccgcacgtgaagagatgttctccaaggctgaagcgctggatgccgaagccacgtaccgcgccaccagctggggcgggccgcagatcatgggcttcaactgcgaggcggccggcttcgacaccgcgaccgccatggtcaaggccatggctgcatccgaaggcgatcacctgtccgcctttgtaacgctggtcacgtcctgggggctggcatcggccatccgggcacacgactggcagacgatcgaaacccgctacaacgggggcgggcagggcggcgcctatgcccgcaagatggaagcggcctaccgacgccacagcggcggcgtggcgtcgcctgccgtgcttcgcctcggatcctcggggcctggcgttcgccggctgcagaccgcgctgcagatcgaggcggacggcagcttcggccctcagacggacacggctgtccgccggttccaaagcggggtcggcctgcaggtcgacggcgttgtcggtcaggtgacctgggcggccctggaagcgcggacatcggccgcgccggtcaaacaggccacgcccgtcgaccgggtgtccgaactggtgggcaagggcgctgcgacggtcgggacgatcaccacggccgcggccgggctacaggctgtcgtgccggagcatgcctacgacctgatgatctacggcgccatcgggctggccgtggtcgccggtgggaccatcctgtcacgccgggtgctgacatgaggctggcgcttgtcggcatcggggcggcgatcatcgtcgccgcctacacggccggggctgtgttctgggccaggggtgaccgggtccaggacctgcagaaccacatcgacaccaaagagaggatagacaatgcgctggatcgccctgtcggctgcgcttggtatgagcgcctgcacgactcctgttgagacatcgggcctgtgtgacggcctgcagcgccctgtcgccgccctgcgggccgctctggcccgcgaagcatccatcacgccgcattcggtcggggaagccggcacagacgttgtgctggcctcggaagccggttgcgcgtggtgaactgagatccgttcgggcgacgtttgcacgcgggggccgtcgcatccggtccaaaccggaccttgtcgataccgtcaatcgccacgctgcagcttcatcagaccggacgttcgctgaggctgcgtaatcttggcgcccccgaactcacagcttgcggaccatccgggatgcccagttgagctaatcgcccggccgctctatcatcaagacatgaaattcctcatctttttgggttcagcccgtgacagtactccgccccgaccggcaaggctgggccagcgcgtcagtatgatgtgtcaccgtcttatcgccgaccgcgcccatggcgcgcagatcatcgatccgttggattacgacatggggggcatcttcaagccgcatttcgcctatgccgagggacgcgcaccccaggcgctgagcgatctggccgaggcaatcttggcagcagacggctatgtgatggccagcccggaatacaaccattccatgtccccagcgctggcacatcttctgaaccactttggggcatcgcgctttgcctggaaaccgagcgccatcgtcacatattcggccggtcaatggggcggtgcgcgcgcggctatgggtatgcgcgggtttctctctgagcttgggtgcctaccggtgtcggcaatgtcccaccttcccacggcacaagaagtcctcgacgacgaaggggcatggacctcggactcagcgaaatgggacagctatgtcgggcgcacgctcggtcagctggaatggtgggcagaggccgcgcagcgtcagcgcctggagggtgatacccgagcgaccggcgcattcgaccgagtctcgtcacaacgtaacgcgccatgacaagcctgaaggtatgggcgcttagtgccggtgcgagcagcaagaccatcccgcgactcccattgaaaatggcgacttgatcatgactgaagtcgaagtagctgcgtctatagtcgacaccagcgcacgcttggtcaatggcccgttcgaggccaaattccggcccaaagccgactttcgtgcaagacgcgacggatggccggtcctggccatctccggacattcgcgcgaagcgcatcggatgaccggccccagccgaactggtccctgcgccaagcgcaaaagcaatcggtcagctcatactaagacaagagagctacaggcggtttcatatctgccagttcagacgttcaactcaggcgccgagtgcgatgttagctcgcccgaaatgcaaaagtaatttcctgacaaactcaaatctgaaatggaaacgcattcttggcgtcgatagaaaatttagtgcggatctaatgaccccagaactacttctgcctcttttccaagataggatctgcaagcggtgaagaaccgcagataacgtccattacttttagttagccgagccttagcaatgatttgtcgagcctccgcgggagaccgcccccttcttacctgttcaatcagggcgttagcaacatcgtttagggtgtcgcgtctcgcctttttaagcctatcggcgttcaggttgagttggctaatcgtgcattgggcaagttcagcatcgatgcctgcgatagcgcaggcttcggcgttgacgcctagttcgccactggttctgctcaccttaaatagtaatggagcgcccggcacatgtaggggattcaggattgctgagtccaggatcgcatttgcctttatcttgtcgcaagtaagatcaggcgccccatatcttacgtctggatcgtgaaccgcactattcgatcccccaagacataccgccaacaggttgctccattttgtgacccaagcgatattatctttaaaggagctctttggatggaaatgttcaactccgatgtcctgaattccgccgacaccgtcgcgacggtagatatcaatctcacagtatgcgcatagaaacccctgatcttccaaaagacgatctactacttcgacttgataatccgcttcaagcttaaacttattccagtgctcgttgtgattaactccatcataggcattgtcctcattgaatgatttgatgaagtttggctcatcctgcttgtcaactctcttcaacttttgaatccatttcttgaatggcaacatccatctcgagccgatcaatctctgggtcgtaccctttaccccattcatctaaatctttttttaagctgagcgcccgctcggtcttccatttcccagcctcaactagagcttggtactcattcagtttctccacgatctgaattccctcagggcgggagcttacaccaagaattcgttccacaataagtgcattttcggcaccttcagagaacttcacctccacaagttcggcctcagatccattccactcgattacacgcaactgctctggacgcgcggttgctattacatgtgggctgtgggtggaaacaataaattgaacacctggaaatacccgtgttagatctaacaggattttctgctgccatcccggatgcagatgaagctcaacttcatcaatcaaaaccactccaggtacagcaagagggttgctgccttcaggatttgcctctgccattctggctgcaatatccataaccatcactagtgcaatgcgatacccgtcgctcagttgctcgactcgaagcgggtaaactccatcgtccctttcccaatcgaccattattcctgcaggatacgacattcgcggattgctgaattcaggcatgaatgcctcaaccgcctgtctgattgcgcgaagttcgggacgctgataatcgaaagacttcagttcgcgttgcttgcctgactcgaaattttcaagactataaaagtattcaatgaacttcttgaaattcgccttgctttccaaagcctcgtcgtaagagtcgtacctggtgaaactccctttaaacccccttttgcgtttcggcacctcgaaaacaccgcggccggtcccgtaataggcaataattggaaattccacctcgatattttcattgaatttgtcaacgatgctatctacgtattcattcagttctttgaggccgtgcccagagggtacttgcttggtggtcttgcgtgtcttgtcacgtcgctctgtccggtcccagacaatgccgtcaattgtttcgcatgtaaccctgctgtatggcggcttggaaccatcagtaagtaccctaaaatcggtctctttttgcgagatccctgacacgttaggaatgcgagtaatgaaggcgcccaacgatatcgccaatgcatcaagtattgagctctttcccgcgccatttcttgcgacaagcactgtgaggtgctcgtcgaaatcaaccgtaaagtctctgaaacgacgaaaattttcgcagcggacctttttgatcttcaattggctaccctttgcgataagttgtcgccgataatctagctaccttagctgaggcagataacaaccttacggttccatcctcccctcatacaagtgcatcgataaacgagcaacctatcgccaacttttcggccaatgcggcaagttgcgccgaaggcggctccgttgaggctgcgccgctgtgcttggcaagtcgcaaccggcagctctgggcagtcacagcctaagcaagcactcttcttctagacccggcaaagtgcgtctcccgcgcggagctgccgttcgtgaccgtcgcagcgaaagtcggctccccgccctgggtgttgctcgtgggtaacagtcagtttcggcccgaagccgacatttattgtcttcatcggtgccgcatcgcagcttcgccaaagcggtctttcgatgcgagagcgagaactgcgcccagcccggggtccgccgtacggactttccaaccttacgcaatttacgtgttagggacgctgagctcacaatgcgatgcattaggcatgggcatctaagccacctacagagcgggacagagctacaaaaggaaacgcgccccgtgggacgcgcttcgatgtggtgctacttcgagcttgttaacggctcgaccgcgaattctgaacggccttcttgtcccacggtttcgccgtagtttcaagttgcaaacttgggccgcccaatagaacctgttcagcatttaagattggagggacaggatgcgtttgggtctggacattggaacgaactcaatcggctggtggctctatgaaacggaaagcgctgggaccgacagcgcgatcaaaggcgtgatcgacggcggggtgcgcatcttttccgatggccgcgatccgaaatccggggcctcactcgccgtcgaccgccgcgcggcgcgggccatgcgccgtcggcgcgaccgctatctgcgccgccgcgcgtccctgatgaaggtgctcgccggtgccgggctgatgccggccgatccggccgaggccaggtcgctgacgctccttgatccctatgagctgcgcgcaaggggtctcgacgaacctctgcctctcgcccatctgggccgcgccctgttccacctcaaccagcggcgtggcttcaaatctaaccgcaagacggaccggggcgacaacgaaagcggcaagataaaggacgcgacccagcggctcgactgggcgatgcatgacgcctgcgcccggacctacggcgagtttctgcacatgcgccgagcccgtgcaacggacacgcggaacgtgccctcggtgcgaacacggctttcggttgccggccggggcggaccggacgcgaaggaagaggccggctacgatttctacccggaaaggcgccatctcgaggctgagtttcatgcgctttgggcggcgcaggcggagcatttccccgatgtgttgaccggcggcctccgcgacctggtcttcgaaaagatcttctaccagcgccccctgaaagaacccgtggtcggcctgtgcctgttctcgggccatcacggcgtccccgccagggaaaagcgcctgccgaaggcgcatcctcttgtacagcgccggaccctctacgagaccgtcaaccagctccgcatcaccgccgacgggcgcgagactcggccgctgattcgggaagaacgggaccgggtcgtccattcgcttgacaacaaagcgccgacgaagtcgctctcgtccatgtcgatgacgctggccgccctcgccaaggtcctgaagctacgggacggcgagcgcttcacgctggaaactggtgtccgggacgccatcgcctgcgaccccgttcgggccagcctgtcgcatccggatcggttcgggccgcgttggtcggcccttgcgtggggggaccagtgggaggtgatcgggcgcatccgcgcggtggaaagcgacagcgaccatgaggagctggtggcctggctgatcggggcccaccagttggatgccgatcacgccgcagcaacggcgaacgcgcccttgccagaaggctacggacgactcggcctgacggcgacgcaggcgattttggaacagctgcgcgccgacgtcctgacctattccgaggccgtggccgcctgcggctggcatcattctaatcagcgtaccggagagtacctcgaccgacttccctactatggcgaggtgctggaacggcacgtcatccccggcacctatgacgagagtgacgacgagatcacccgctacggccggatcaccaacccgactgttcatatcggcctgaaccagctgcgccgccttctgaacaggatcatcgacatccacggcaagcccgaccagatcgtcgtggaactggcacgcgaactgaagcaatccgagcagcagaagcgcgaggcgatgaagcgtatccgcgacacgacggcggatgcgcagcgtcggtctagacagcttgaggagctcaggcagccagacaccggccacaaccggatgcttctgcgtctctgggaagatctcgggccggctgttggaccccgctgctgcccttatacgggcgagacgatcagcgtgacgatgctgttcgacggctcttgcgatgtggaccacatcctgccctactcgcgcactctggacgacagcttcgccaaccggaccctgtgcctgcaacaggcgaaccgcgacaagcggaaccggacgccgtgggaagcctggggcggcactttgctatgggacgcggtcgaggccaacctcaagaacctgtcagagaacaagcgctggcgtttcgccccggatgcgatggagcggttcgaaggggaacgggaattcctcgaccgggccttggtggacacgcagtacttggcccggatcgcccggacctatctcgacacgctctataccaagggcggccacgtctgggtcgttcccggtcgtatgaccgagatgctgcgccgccactggggcctcaactcgcttctcagcgatgccgactgcggggcggtcaaggccaagaaccggaccgaccaccggcaccacgcgatcgacgcggccgtcgttgccgcgaccgaccgcagcctcttgaaccgcatcagccgcgcggcaggccaaggggaagaggcgggccagtccgccgagcttgtcgcccgggaaaccccgcctccttgggaggggttccgcagcgacgtcaaagcacgcctcacaacgatgatcgtcagccaccgcgccgatcatggccggatcgacccgcaggcgcgcaagtccgggcgggacagcaccacggggcaactgcacaacgacaccgcctacggcatcgtcgacgcaacgacagtcgtcagtcggacgccgctcctgtcgctcaagcccggggacatcgtggtcacgccgaagggaaagaacatccgcgacccgcagctgcagatggctcttgaggtcgcgacgaggggcaaggacggtaaagcgttcgaagcggcgcttgccgagtttgccgcccggccggggccatatagggggttgcgaagggtgcgcctgatcgaggcgctccagcaaagcgcgcgggtcgagatcggaactggggccgacgggcgaccgctcaaggcctataagggcgacagcaaccattgctacgagttgtggcgtctgtccgacggcaaggtgacaccacaggtcgtcacgacgttcgagtcgaataccggggtggagaagcgcccgcatcccgccgcgaaacggctcctgcgcatcttcaagcgcgacatggttgcagtggaacgggatggacaaacgctgatctgttacgtgcagaaactggacgtcgccaatgggcttttcctcgccgagcacactgaggcgaatgccgatgcgcgacaccgcgacaaggacagcgggttccggctcctccaacttggcgcaggctcgatcgtgaaggccagactgcgccgtgtcttcgtggacgaagctggccgcctccgcgatcccggcccgaaagggtaaggatttccgccatttcaacgaatcggctggtcggggaccctgctccggttttccgggaatgcttttgtggaccagattatcgacattgccacggacgggcggcacctgtctcgcgaccgcgggttcctgaaggtcagcgaggatggggcagaggtcggccgcatcccgcttgaccagatcgccggcgtcatcgtgcatgcccacggcacgacctgctccgcctcgcttctcaccgagttggccgaccgtggcgccccggttgtcctgtgtgccgccaatcacgcgccccgctcggtcctgatgccgctcgagggccaccatgcgcagggcgcgcggctgcgggcccagtggcaggccaggacaccgctgctgaaacaggtctggaagcaggtcgtcgtggccaagatcgacatgcaggccgccgcgctcaaggcggtgggcgaggtgcacggccccgtcaccatgctccggcgcaaggtgacgagcggcgacaccacaaatgtcgaggcccaggccgcccgcctctactggccgctcatgatgggcagtgagttccggcgcgaccgcgccgcttcagacaccaacgcgctcctcaactacggctacaccgtcttgcgcgccgccacctcccgcgccgtcgtcgccgcgggactgcacccgtccatcggcgtgcaccatgccaaccgcggcaatgcttttgccctggccgacgacctgatggaacccttccgccccctcgtcgattgtgcggtgcgaggcctggtcgcgcggaacggcgtgcagatcgataccgaggccaagcaaacgctcgctcgcctgatcgcgctcgacctgcagttaggcaacggcctcacgcccgtctccgtcgcgctctgcaagctggccacctcactcgggcagagcttcgagaccggcaagctcgcgctcgccctgcccgccccgcctgacccgctcacccttgcggggctgggagcatgaacgccgaggcgccctatctctcaggataccgaatcatgtggatactcgtgatgttcgacctgccaaccgacaccaggccccagcgcaaggccgcgaccgagttccgcaatttcctgctcgacgagggcttcgagcgcagccagttctcggtctatgcccgcttcgtcaacggcaaggaggccttccagacaagggtgagccgaattgagcggaacctgcctgagaagggcgacatccaggtgctgaacttcactgatcgccagtatcgtgatatcgtccacttctcggatcagggccgacgagctgcccgcaggaatccagagcaactggcgcttttctgaagatgattccccattttgctccactcgacgcaccctcaaacccctgttttgtcaggggtttgagggtggatcaaggatagccgttcagaattcgtggtccagccgcaacccagctattgccataacaactcgggagcgaggatagccgttcagaattcgtggtccagccgcaactgaggagtttaccattgtcgcctccggtaaggatagccgttcagaattcgtggtccagccgcaaccgcggcgatgcccggggcgccattcctcccaggatagccgttcagaattcgtggtccagccgcaacgggtgagtacaaacccttgataatccatgaaggatagccgttcagaattcgtggtccagccgcaactgcgccggcctgcgcaacattcacaaaagcaggatagccgttcagaattcgtggtccagccgcaacagcatatgctgcggcactggaaacttgtcgaggatagccgttcagaattcgtggtccagccgcaactcgcacatttcgcggatcttgaaggggcagaggatagccgttcagaattcgtggtccagccgcaactcaaattggcccgcccaaatctctctgggcaggatagccgttcagaattcgtggtccagccgcaacttgcgccgggacgaaagcgcgatgttcaccaggatagccgttcagaattcgtggtccagccgcaactgatctccatcacggcagtcaagccgttgtaggatagccgttcagaattcgtggtccagccgcaacgacacgccggtcacggtcacggtcgtgttcaggatagccgttcagaattcgtggtccagccgcaactggctcaagaagtggatgtttgtggccgcaaggatagccgttcagaattcgtggtccagccgcaacgatagagactgccgacactgaaattcagaaaggatagccgttcagaattcgtggtccagccgcaaccgagcggtaatgctgaacgcgtgccaggtcaggatagccgttcagaattcgtggtccagccgcaacagtgacagccaacagggcgatccagcgcataggatagccgttcagaattcgtggtccagccgcaaccgcagcgatcgcttcggcttccagctcctcaggatagccgttcagaattcgtggtccagccgcaacagcacgttcgccgctacggtgcccgccagaggatagccgttcagaattcgtggtccagccgcaactgctttcacgccgatatgctttccgatcataggatagccgttcagaattcgtggtccagccgcaacaaaagatcatcgccaagcatttcaaggaaaaggatagccgttcagaattcgtggtccagccgcaacccacctggtgccccgtcgacgacgaaggcaggatagccgttcagaattcgtggtccagccgcaaccgccgcttcgatccggccttcggtggccagaggatagccgttcagaattcgtggtccagccgcaacaccgggatcagcgctagaaccacccaggcgaggatagccgttcagaattcgtggtccagccgcaactggatcggctgcacaaaggtcagcgcggcgaggatagccgttcagaattcgtggtccagccgcaacttggcgatcggtgccgccttgcccggcgtaggatagccgttcagaattcgtggtccagccgcaactccccctgtgtgtcgagggcggagaggatgaggatagccgttcagaattcgtggtccagccgcaacgagccaccgcgctattgcagaaagtgatttaggatagccgttcagaattcgtggtccagccgcaacgggcgcgttcgtccgcgttcccggtggataaggatagccgttcagaattcgtggtccagccgcaactgaggcttatatcaagttctgtgaggaaaaaggatagccgttcagaattcgtggtccagccgcaacaatggccaagcgccgcctggggccgtgggaaggatagccgttcagaattcgtggtccagccgcaacgccatgccgcttcttggctctgcgcaaaccctcaatcgggatctctgccgaggtgtttgaacggcagctttaacgatttccctacgatgagcatgcgcctgcggcgaacttccgttttccgcggcccttttctgctgtgcttggtgcgagcatggcactatggatagatcatgccaacgatcggtgaccccatacagtccgcgctagagcaagcacgcggcgcagctgcagaactggcgcgcacgcggggggctcagcgcgggtctatcgactctgccctgggggacctgcgtacggcgatccgaaagttggaagaggtgaagaagggcaggtagggtatgctctttggttcgctgaacctgcggaagccgaattctcctgcacaaacggagaacatcactgtttagaaaaccgttctattgctgaaaatgccatgtcttgcgtgggagcccagcccctcctaaggggcaggttgcaggttcgaatcctgccggggtcaccatttcatcattgatcgcaccggacatcaggcagctgggcccctcttgggaccggccgcattcaatgctcccgggccgcaaggcgccagcgatgcaaatgcagcgcaacggcagagtttgcgacgcctatcgcgtgaattcgcgtgccacgtgtgtcgaaacttggcagcatccggcgacgcattcgaggatggtgacgatgcagagactatggcgggtattgcgccctgtggtggccggttgggcggccatcaccctggtcgggtgcggcagcgccgacaccagcccgccggtccgccaggccgtgtccagggcggccgtccccgtgcaggcctttgccggggatgtggcgttctacatcgcgcacagcatcgcctcgcccaagggcgcgctgcctgtcgaactgtatcttggcttcaaggcggaaaccgaaacccggatcggtctgaacgcggccgtcgatctgcgtcagatccagcgcgacctgccgatcctgttgtcgggccgcaaggatcccgattgccggatcggactgaccgtccggctggaccggaccgaggccgaggatacgtcggtgcgcgcgaagggctccgtcacggcggatctgtaccgctgcaagggccacgggacgcctgacgccgttcgcggcattcaccttctgacccagacggtgaagttcgacgcgctgatgggcgccggcctgaagggccagtgcgtggagttcgagcttcgccagcttcagatcgacccgacgggcttcctgggctggctgagcacggccgtgggcgccacggaccgcattcgcgaggcgatactggaacacggcaacaaggccctgcgcgacacgccgatctgcccgaagatcccgcccacgcttgccgtgctggaaccggaactggcccatggcggcccgttcgagatcggcgacggcgggctgggtctggatctggcgggatcggtgtcgacggggtcggcgcagctgatcacgatgctggatctgctgcagaagaacggccacctgcccaaggcgcccgctgatatgcccgcacccacggcccccacggtcgcgttccgcttcgacaacagcctgaaggcggcagagacgccactggaatatcaggtcgaactgggcatgacgtcggtcgcgcccacgcggatcggacttggggcaacgctcgacctccgcgacattcagcagaacttgccgacgcttttcgccggaacggtgctggtggacaattgtgcggcccgggtggagttgaaggatgtggaccttgccgccgagggcgagaccgtgatcgccagtgccaagctggaagcgcgcagctacgattgcgcgcggaccggcgcccagaactgggaacggggcgatgaaacccgggtggaggacatcgacgtccgcgccgccgcgtcggtcaccatcgaagacaattgcgccatcttccagcttgtggatcttgggcaggacagttcggcgccggtggacgaggacgacaagaaggccgcgctgatcgcggccgcgcgcacggcgttcgtgcaggggatcgacctgctgctgacggcgcatcccctgtgtccggaattgccggttgagcttcaggcgctcgatccgcaattcacgcaaggctccccgcacgaggtggggcagggcggtctgggccttggcgtcaagggatctgtcgatctgagcgccgagaccatcatctctctcctgcaggtcctgcagcagaagggcgtcctgccgcccgcgccctaacgctgggcggtctgccagtcgggcgcaatccagggctgggcgttttcggggggcaatggcgcgcggccaaggatgtgatcggcggccttttcgccggtcatgatcgacggtgcgttcaggttgccgttggtgatctgcgggaagatcgaactgtctgccagccgaaggccatggacaccgatcacacggcattccggatcgaccaccgacatcggatcagatgccgcgcccatccgggccgtgccgcagggatgataggcgctttccacgtgctcgcggataaactcgtcgagttcgtcgtcggtctggcaatccttgcccggctggatctcgtgcttgtaatagggcgcaaaggcgggctgttcgaagatctcgcgcgtcaggcggatcgaacggcggaagtctatccagtccttctcttccgccatgtagttgaaaaggatccggggcgcgtccttgggatcggccgaccgcagcgtgacctccccgcgcgatggggagcgcatggggccgacatgggcctgaaagccgtgcccttcgggcgaggccttgccatcgtagcggatcgctatgggcaggaaatggtactggatgtcggggtattcgacgccggcctgactgcggatgaagcccgcgctttcgaactggttcgatgccccggggccggtccggttcagcagccaccgcgcgccgacataggccttgcccagaaggttccagtacctgaacagcgtcaccggctggctggaggccgcctgaatgtaaagctcaagatggtcctgaaggttctggcccacgcccgggcggtcggcgatcacgtcgataccgtgctgggccagatgcgcggccgggcctacgcccgacagcatcagcaactttggggaattgagagaggacgcggcaaggatcacctcggcccgggcggtgatcacttctgtcctgccgccacggtccacttcgacgcccgtggcgcggccatccttgatgatgacacgccgggcaaaggccttgaccagattgcagttggggcgcttcagcgcgggcttcaggtaggcattcgccgccgaccagcgctgacccttccagacggtcatgtcgaaggggccgaagccttcctgctggtgaccgttgtaatcgcccgtcaccgggtagcccgcctgccgcccggcttcgacaaaggcgtggttcagcggattgacccgcgaaccgcgggtgatgtgcaacgggccgtccgtgccgcgccacgaagggtcgccgccatggccaccatcgtgccagttctccagccgcttgaaatagggcagcacgtcggcatagccccagcctttcgcccccgtatcccgccagtgatcgtaatcgcaggcatggccgcgcacgtagatcatcccgttgatcgaggacgatccgccgatcaccttgccccgtggcgtcgccagccggcggccgtccagatggggttcgggttccgactggtagccccagtcgtaaagcgacatgttcatcgggtaggacagcgcgcccggcatctggatgaacggaccgcggtccgatccgccatgttcgatcaccagcacctgtttgccggcctcggccagccggtaggccatggcgcagccggcgctgcccgcgcccacgatgacgtaatcggcttccatcagaacggcgcctcgacatcgcccatgcggacatagacggatttcatctggctgtagtgctcgatcgccgcacggctgttttcgcgtcccacgcctgacatcttcaccccgccgaagggggcttcgacaggcgcgtcgttgtaggagttgatgaagcagctgcccgcctccagcgcgccgatcacgcggtgcgcacgggacagatcgcgggtgaagacgcccgccgacaggccgaactgcgtgtcgttggcgcgggcgatcgcttcgtcttcatcgtcgaaatccagcaccgacatcacggggccgaagatttcctcgcgcgcgatggtcatggtgtcggtcacgtcggcgaacacggtgggttccacgaagaaaccgggccggttcaggcggttgccaccggccaccagagtcgcgccttcggccttgcccttttcgatatagcccagcacgatctgcatctggcgttcgctgaccatcgggccgatgttggtttcaggctcgcgcgggtcgccgatcacggcgcccttcaggcgctcggtcagccggtccaggaaggcgtcacgcacggaacgctgcacgaagacccgcgtgccgttcgaacagacctggccggtggagtagaaattgccgttgatcgcgccgcccacggcgttgtcgatatcggcgtcgtcgaagacgatcatgggggacttgccgcccatttccatcgtcacgtgcttcatgccggccgcggcggcggcgtagactttctgcccggtgggcaccgatcccgtcagcgacaccttggccacacgcggatcggccaccagagccgcgccggtttcgcccattccctgcacgacgttgaagacacccttgggcagcccggcctcgatcaggatctcggccaccttcagcgcgcaaaggggcgtcatctcggacggtttgaacaccatcgcgttgccgcaggcgagcgcgggcgcggccttccagcaggcgatctgcgtgggatagttccacgcgccgatgccgacgcagacgcccagcggttcgcggatggtatagacccagtcctcgcccagcgggatatgttcgcccgtcagcgtcgcggccagcccgccgaaatattccagcgcgtcggcggcgctggtcgcatccgccacggtcgtttcctggatcggcttgccggtgtcgagcgtttcaagctgcgacaggtcctcgttccgttcccggatgatctgcgccgcacgggtcaggacgcggccacgctcgcgcggggaccactttgcccagtccttctgcgcggcctgagcggccgtgatcgcccggtccacgatggcaggcgtgccggcatgcaggcgcgcgatttcctcgccgtcggcggcgaagatcacggggatcggggcgcctgcggtatcttcgacataggcgccgtcgatgaagtggctggcctggggttggggctggtatgtcatgatcattctccgcgcggaaaccgctggttgttctcgacgacgttcaggtccatgtggttgcgcatgaagcgctcgctggcgttcttcagcggctggtaatcccagggataatactcgccgttgcgcagcgcctcgtagacgatccaccgccgcgcctggctgcggcggacctcgtcgtcgaagcggtccagatcccagcgggcatcggcctttgcacgcaggtcggccagcgcgtcggcatgggccggctcgtccgtcaggttcgtcagttcgtgggggtcggcctccacgtcgaacagctgctccgggtccagcgcgcaacgggtgtacttgtacgaaccttgccgcagcgcgacgagcggggcattgctggcctcggccgcgtattccatggccaccgggctggtccggccttcgccgcgggccagcggcatgatgctttcgcccgtcgtccacggcgcgacctcgtccatcgagatcccggcgatatcgcagagcgtcgggcacacgtcgatgttcgacaccggcaccgtttcgtggcgcgggtcgagcccgggggcccggatcatcatcggcacgcgggccgagccttcgaagaaggtcatcttgaaccacaacccacgctcgcccagcatgtcgccatggtcggacgcgaagacgatcaccgcctcctgacgggtacgttccagcgtgtccaggatctctccgatcttttcgtcgagataggagatattggcgaaataggcccggcgggagcggcggatatcctcttccgtgatgtcgaagctgcgccagtcattcgcgtcgaaaatgcgcttggaatgggggtcgtggtcttcgtaatccatcgcggggaccgggggcagcaggtgctcgcaatcctcgtacaggtcccagtacttcttgcgcgcgacgtaggggtcgtgcggatgggtgaagctgacggtcaggcaccatggccgcgcatcatggccgcgcgacaggtcatagatcttgcggacggcctcgtacgcgacctcgtcatcgtattccatctggttggaaatctcggccacgcccgcgccggtgaccgaccccatgttgtgataccaccagtcgatccgttcgcccggtttgcggtagtcgggggtccagccgaaatcggccgggtagatgtcggtggtcaggcgttcttcgaacccgtggagttgatcggggccgacgaaatgcatcttgcccgacagcgcggtgtgatagcccgcccggcgcaggtgatgggcataggtcggcaggtccgacgggaattcggcggcgtt

SEQ ID NO: 3688 - DNA, 19116 bp, synthetic construct
  source 1..19116: mol_type = other DNA
  misc_feature 1..19116: note = Synthetic
gccataccgcgacgtacccaaaccccatcacgataaaaacaggcagaataatggttaaaagcgcttgcatatcggggcctgtgtatggggtcaggccgcagggccgtgtgaatttacgatgaaacggcgcgcatcagggcagggtcagcaccataccgtcataggccggtgtcacgtggtcgggcgtttcgttggccacggtttcataatccagatcgatatgcatattggtcagcacagcgcgttttggtgccaccttttcgatccagtccaacgtgcgggccagatgggcatgggtgggatggggtttacggcgcagggcgtcgacaatccagatatcaaggttttgcagatgttcccacgcgcttggcggaatttcggccacatcgggcaaataggccagaccggcaatgcgaaagcccaaagcatcaatgccaccgtggtttaccagaaacggcgtcagcatgatcggcccgccggcgccgtcaaccgtgaccgcatcttcaatcgtgttcatttcaaggatcggtggatagctggaccattccggttggatgaatgcatatccaaaccgcgccatcagatccttctgggttgggatatcggcccagatttgcaaccgctgccccatgttgaaaacgatcatccgcagatcatccaacccatgcacatgatcggcatgggcgtgggtatagaccacggcatccaacgtcccgatcccggcatcaagaagttgcgcgcgcaggtctggcgatgtgtcgatcaacacacgggtcgtgccatccggcccgtcccgttccaccaatagcgaacagcgtcggcggttgtttttcggattgtccgggtcgcaatcgccccaatgtccgccaaggcgcggcaccccgcccgacgatccgcacccaaggatggtaaaacgataaccgctcatgcctgccacgcggcggccttggtgaacaggcggttgaaattcgcctcggttgcggcggcaaattcatcatagggcagggcgaacagatcggccgccttttgcgccgtatgggcggtgaatgccggttcgttgcgtttgccccggtgcggtggcggggccagataggggctgtcggtttccaccaaaattcgatccagcggtgcagcggcgaaaatatcgcgcagttcctgggattttgggaatgcggtgatgcccgacattgacagataaaaccccagatcaagcgcggcgcgggccaaatcggcactgctggaaaaacaatgcatgacacaggaataggcgccgtttgcgtgttcttcggtcagaatgcgcgccatgtcttcatcggcggctcgggcgtgaatgatcagcggcaggccggtgtcgcgcgcggcagcaatgtggatgcgcaggctggtttgctgtttttccgccgactcggacgtatagtgataatcaagcccggtttcaccgatgcccacgcatttgggatgctgcgccagtgcgatcagttcatcgggggtgaccatgggttcgtttgccacgctcatcgggtgggtgcccatggcgtaaaacacgggcgcatgtgcctcggcgatggcgcgcacctgcggttcttggcgcagcttggtacagatggtcaccatgcgcgtcaccccggcatcggcggcgcgggcgacgatatcgtccaactgcccgtcgaaatcgggaaaatccaaatggcaatggctgtcggtgatctggggtattgtggtcatgaaaccttcaggctcgcaagatttgagccgccgtctgattgatgctcagacccatatcaaggatcagcgcggaagggtcaaggttcaccgcccggccatgggcggcgcgggccgacagggtttgttgcaaatcggcccattggcgcgcggcccatgggcccggtgacagacggtgcaacatcgctgtctcgccccgtgtgatagcaacggtgggcggcaggccggcaccggtgcgcgccagccgcgacatcagggtgttgagcaggcgcagcgtgacatccagccgctccacagccccgcgccccaccatcgtaccggcaagggccagaagacgcgcgcgatccatatttggcgcgccatcggtcaggtctgtcagggtttgatacagtttcagcccgtcaagatgcgtcaggcgcaacgcctcgccaaccgacccatcggccaattcggccagggcatcgggagtttgcaaggtttcaccggtcaacgacaatgccgctgccagatcaccgggcgcaagggtggcgcagcgcaacgtgcggcagcgtgagcggatcgtgggcaacagccgcgagggcgtatggctgatcaaaagtagggtgcaatttgcgggcggctcttcgagcagtttcagaatcgcattcgaggtgttgatgttcatctcatcggcactgtcgatgatcaccacgcggtgcccgccaccgggcgccgacaagccaaagaaatctttcagtttgcgcgcttcatccaccgtgatcacggttttcagggccttctttttatcgtcccacgcccggcgcaataaaaacagccccggttcggccaaggcaatggtgcgccgtgtaacgggatgatcggcgggggtgtccagcgtggtgggcggttcggtcgcgaacatggcatcgcccttgggcggttgcgacaaaagaaaccgcgcaatccgccaggccagcgtggccttgcccacgccacgtggcccggtgatcagccaggcgtggtgcagtttatcgcgattaaaggcatcaagaaacgccgcctcggcctcggcctggccaatcagggtcagggtttcgcgcgggtggggcacgccgacgatccggtcgggttcgggcaggggatcatcagccattggcaagacggggcgcaagggcagcgcggatgttggtggccacggtttcgggggcggcatcaccggaaatggtaatgaaccgggttggaaattcatcggccaaggccaggaaaccggcgcgcattcggcgttgcagatcggtgccgaacccttcgaaacgttcctcgctggtttggcgcgacagggcgcggcgcaggccggtttcggggtccatatcaatcagaaatgtcagatcaggctcagacccgatcatcaggccgtgcaactgatcgaccagcgcacgcagatcgccgcgcgacaggccctgatacatccgcgtgctatcggcaaaacggtctgaaatgacgattttgccggtttcaagcgcgggccagatcgtacgctccagatgatcgcgccgcgccgccgtgaacaacagaatttctgtatgggctgaccagcggtcggtcgcaccctccaataccaaggaccgaatttgttcggcgccggggctgccacccggttcgcgggtcagcaccacatcgtgaccttcggcgcgcaaggtatcggccagcatgcgcgcttgggtcgatttacccgacccatcgatcccttcaaacgtaacgaacaggcccttggtcactctgcgcctgctgcctcggcttcggcggtgaaatcgcgaaacagcttttccgcagccagacgcaggcgcggcatgaacccggcctcgccaatgttgcgatcggccaacagcgacactttggcgtctggcaatccgtcaagtttgatcaccatttcgcccaagggttggcctgcggtgatcggcgccttgaatgggccggtatacatcgcatcaccaatcaggttttcaagctgcaaagccggcaccagaatttcaatgtcttcggcggccaccagacccacttcaggctccatgcccatccagacactggctttggtgatatgttggccctttttcacaacggtgcgttcgacaaactggcggaacgcccagtttaccacgcgctcggcctcttcggcacgggcggtttcgctctgcattccggtgattacaaacacgatccggcgatcaccctgggcggccgacccgaccaagccatatccggcctcttgggtgtggcccgttttcaaaccatcagcgccattgcccaatttcaacagcggattgcgattgaaccggttttgcggcgcacgcccatcaaaaggaaattcggtctgggcgaaatagccgtaatattcgggaaactcggtaatcaaccgggttgccagaatgcccagatcttccatgctcatccggtggccttcggcgggccacccgcttgcgttgacgaagtttgaattgtccatgcccaacgctttggcgcgctgattcatctttgcggcaaaggcttcctcggtgccggccaatccttcggccaccaccacacaggcgtcgttgcccgaattaaccacgatgccctggatcaattcctcgacggtgggtcggtcacgttcgttcagaaacatggttgaaccgcccatgttcttggcccgggtcgatacgccaaacggtgtatccatctgcacgcggccctggcgcaacgcttcgaacagcatgttcagggtcatcagttttgacattgatgccgggggcaggggcgttgttgcgtctttggtcagcagcaccgtttcggtggttacatcatacacatacgcggcggtggcccgggtctcgaacgaggcccaggcaggcagcgccagcatcagtgcgaacagagcagcaaagcagcgggtaaacatggcaattctcctggcgtcggggcgtaaggattcagttcgaagtgaaataggcgtcattgaatcccaacgctttgacttttttcaaaagcgcggcgcgttcggtgtttgtggccgccgggccaacaacgacccgatagaatgttttgcctttggtcgattccttgcgcaccgtggggatcattccggcgctgcgcagggcagtcgcggtattgtcggcgttggcctgcacactgaatatcccgatctggatcaacgggttctttatgtttgacgtgcgggccgggggcggggcggcgggttcgggtgcggctggcgcattcacggcggcggcggtgattcccgcatccggtgcctcgggcgacggcgcgtccaatgacaatgcctcgatctcttctggcttttcgatggcggcttcggtcggggcggggggcgtttctgccacctcttcccggcgcagcgcggtcacgttaaccttgaccggttgccccgccaccatgcccaatgcctcggcggcatcagacgatacctgaaagcgcgggcccggattatcgcgttcgcgccgaaacagcgcgccaatgacgaatttcttgttaacgtcattgcggatgatcacccgctcggggtcggtcacatccgggtgggccacccaaaccccgccaagtgacgggcggccatcccacaatccggcctcggatttctgaaacacttcgggcgattccacgtcacgctcgaccagacgggtcgatgtgggcgcaatcgtttgtgcgccctcatccccggtttccggccgatcgccacccggaaactcaaatccctcttcgcatgccgacaatgccgccagcattcccgccagaacggtcagtttcaccacgtttggcgtcataggttgcccccatccatgcacaggcgttgccgtgcggtttgccggtctccggcgttgctgctcgtgactcaatagcgctgtcagcgctccagttggcaaacagtgtaccgtgcgcgacgaaacaaggaaagagacgcatcgcgccggaatataaaactgtcgtgtacaagagccccctttccgaatcggaatttgggcgataagtcacccaaaccggagaagtggcagagtggtcgattgcaacggtcttgaaaaccgtcgtgcgtgaaagcgtaccgtgggttcgaatcccaccttctccgccatttttcgccggtaagtgtttgtttttgctggataagcaaaaagaacgtcccccactatatcccccacctagatcagggccacctctgaatgcgcaggacatggtaaccaagttcattcgccttgccgcttcgcgattggatgatgacaaatgataaggtcagggcgtttattcgcataaatccctcatcgcgctcccgcttgttggtgagccagtcgcgtcgcgcatttcctcgaatattccttgttccgacccttcattccggtcagcggcggcggctggttaaaaaaccgccgatcgactactggaaatccgaccgtctaatatatcatcaactattatcgctgctacgagcgcacccgccgcctgtgtgaaacctttcccctgacattaacacaaacagttacagctgccgatcgtaagttcttggctcagcgcgaccgcgatctaactctcggtcgcgtcttgagcgggaaggggcagacccctgcaaatcctatctgtcaggagggccatccaattacccaatccgcaaacagcacaggcaggcggatgtgtcgccagtcttatcaactcatacttctggactgcacccgttgcgacaactgcgacttccgcgacataaaggcgtgcgttttttgcttccgggtcatgaccgttgcgacacttgcgactactgcgacaagagggcgggtcagcggtgcgccgccctcttcgattttgtctgacgtttttggatattaaatttggcgcgcaccttgcacgatctgccaagcctccttgcgcgcagccccgcgtattaccgttcctggggcgagcgctaccaaccaaccatgccgttccaacagtgccagcgccgcccttgcctttgggctttcgcgcagtgggttcggcccaagccgcaccacgtcgcgcaaagtaatgtctggatgcggccagttttccaagagccattttcgcaatgtttcggcccggtcgatttctgctgataccgttgccgcgcttgcaagacgtgaagcttcagacaaataaaaccgcgcaagtgtgattgcgtcagccatcgtggtggcctcaacttcgcgcgcttctaaatccgtccagagcgtcagtacgccagccatacgcgccgcctgttcagcaatttttgaggctgcaccagtgatatgtgagagcgtgccaccgggtagttgcatcctttcgatctcatctgagaactccaccaactgcgctcgcgcgtcggacgtcagcgtcaatcttgctggtttaagcgtgcggccatcgtccaaagtcggcatcgcgttggacaagatggcttttagccgctgcgcgaacgcatccagcgacgcatcatccctgcgcatatttgcaaaaagcctctgcccgatactcgattcgggttcgcagatgagggatcgggggaggaagccaaggccgctcgtaagggggtctgacaggaacccatagatagcgacaggctgtgccatcagatgcatagccaaccgtcgctcacgcaacgtatagacaccatcgcccgcccgtgtgcgttggatttccgagccatcccaaagacggttcaagccgccaagggttttcatgcgattgtccgcgttcatcgcatggcccccgagaaactgcgcagcttcatcggagaagaggccgaggctgggttgcccctgctggaaggcgcgaaacaagccttccagcgttggttcgcttgccgtgcggtctggcaatttaggcgcttccggcggatcgcctagtgcggccagatcagcttcggctgcggtccgtttatcacgattggcgcttacagcatcgcgcagagcgctcttttttcttgcgtcatacagttcggaatccttcgcccatgacttggacgcgacgtcatagttttcgctttgctcgcgctcatattcacgcaagccctgcagaagcggtttgtcgctactagacttgcgctcgcccgaccgtgcgatggtcaggaaatagagcgacacagggacaaaacccccgagtgtctccacatcggcaaagccttgaaccgccagcgacgctgccgccagcgccgaggccgctgggatggcgatgggggcttgcgtagagccctgcacagcctccacggctgcgcgtagcggtccgagtgcttctacgggatagacttcacccgctgggatttcccgcactaacggttgcggtccttcggtatcgaacgggatagatttgagaattttcatgctacatcccccttcatggtcagaaggtcattccagtcgcgcccatccggcacaggcaaaagcgatacctcccagccgagtccgtgtgcgcgttcagccaacgcgtgcgcagccgcgcggcccggggcatcgccgtcaggcgcgatggtcagccggtgtggatcggggggtaggtgtagtcctcggatgccagaggttgagagcgccgcccatatggacgcaggagcgggcaacaggccggacgcaaggctaagggcagtttctatgccttcagccaccaccagcggtccttttgtttcaatgagccgcacagccccgcctttcacaggccccagcatcgccttggcgggcttaacatccgccttgcgaccggtcggtgaaaggtatgttcgatgcgccgcaaagccttcggctacaccaacaaaagataacatcgcaggaagatgtattcctaccggatgccaacaggcgggtagaaaacgcaaggtcttgggaagggggcaggtaatgccccggcccctcagatatgcctctgccagcgtgccttctactggtcgcgcatcctgccaaagacgctgcgcctgcgcggaacgcttcgcatcttgtttgcgctgttcagctctgtgctgggcaatagtcgccgggtctggcggcgcacagcttccaggaatgacgcctgctgcaaccagaatatcacgatatgcgcagccggatttcttgcagtccagcaagagccgcccgttttcgccgttggccaacgtcagggcattctgccctttgcggccttcgctttggcaggcagggcaaggtgcgaccccatagttgccgtaccatttgccgcgaaggtcacgcgcgaggtgctttgcatccgtcattggcgcacccccaccacttcagcggtcacattgtagcgcagcacatagcgcgcatcatgcctcggggaagccccccgatgtggttcgcagatgatttcaatttccacgccgatcttgcgcagcttggagatatacgcgcgcccgcatggtgccgggttttcgatcggtgtgaaacccttgacgctcgcgcggcgcaactgctccaaagattgaggtgtgcgaccgcatagtgtgataatgaagggctcggcgcagctggccgtgatgcggtaacgtgtgccgttcggctggttcctgtactttccccgtgatatgtttcgggcattcgtcgcatccgcaaacgaaacgtcccgcgccgtgtcagcctgctcgctgcacggcgcaatttttttgcataccatggtttatgcggtgtcctgcgtgcggttgttcacccacgcggccacgtcggcttctttccagccaacagcgcgcttgccaagcttgattggcctggggaaattgccttcggcaatcatcgcgtaagtcgtgctgcgcgacagcccggtgatatgcagcaccgacggcaggcgcagtattatcgttggtttaacttttgtcatccctatttgctccttcgtttgtgcgagggcaagggagacgaagtgcggatgtgcacggctccatcgcccccacagggactttgaatgccgtcgacacatcttgcgcgactggggccagttggccttgggaaagatggttatcgaatcaactcggaccttgcaagagtatttcgcatattttgtgctatgattggacccgtcacggtttgatgcagccccaaagctcaaagaggatgaagaattttatcgctgttctcgcaccgggtttgtttgacacaaaatggaaacgcaggccgtagcctgcgtttctatgtggtgcaatcgaatgcttgttaacagctcgacgcggattttgaacaaagcaataggtaaatgcctgcaagttattgtcaagtatttaatcgattgaaaaagaaatgccatcaaggtttagtatggacatctgacaggatataatggggatgtgctaatgcgcttaggtctcgatattggcacgaactcaatcggctggtggctttaccaaacagacgatgggatgatcaccggcgtagtagatggtggggtgcgcatcttctcggacggacgcgatccgcaatctaaagaatcgttggcggcggatcgccgtgcggcccgtgcgcagcgccgtcggcgtgatcggtatctacgccgcaaggccgccctgatgaaaagaatggccgaggcggggttgatgccgctcgacccagccaaagccaaggcgcttgaggtcctagacccctatgacctgcgcgcgcgtggcttggacgaggccctgccactggtgcaattcgggcgcgcgctgttccacctcaaccagcgacgcgggttcaaatctaaccgcaagacggatcgcggcgataacgaaagcggtaagatcaaggatgcgaccgcgcggctagactgggcgatgcgcgacggcaaggcgcgcacttacggcgaattcctgtatatgcgtcagcaggaggctgatgacccgaaacacgttccaactgtgcgcacccgtctgtccgttgcgctgcgcgacaatgcggaaaaggaagaagcgggctacgatttctaccccgaccggcgccatctgtccgaggaattcgacgcgctctgggagacgcaggccacgtatcattccgcgctgacggatgatttgcgcaaccagatcaagacgatcatctttcaccagcgcccactcaaaacgcccgaggtgggtctgtgtctgttcactgacgaacgccgcatcccgtcagcgcatccgctgaatcaacggcgtattctaatggaaaccgttaacgctctgcgggtcgtggcgcgtggtgaagccgcgcgagacgtgacgctgcaagagcgcgatcagatcgttcatgcgttagacaacaaagggcatactaaaaccctgtcgggcatgacaatgaagctcaaggcactggggaaggtgatcaaactgcgtaaagaccagagctttacactcgaaaccgccaaccgcgatgccattgcctgcgatcctgtgcgggcgagcctgtcgcatcccgaccggatgggaaggatctggacgacgttggacgctgatgcacagtggggggtgatacaacggatccgtgacgttcaaagcgatagtgaacacgacagactcgtcgactggttgatggacaaacacgtccttgatcgtgcccaagcccaagccaccgcaaatgcccccctgcccgaaggttacgggcggcttgggctgacagcgacacgtcgcattctggctgcactggagtctgatgtaatcccctacagtgccgctgtggccgcttgcggttggtcacattccggcggaccaacaggcgaggtgctggatacgttaccctactatggccaaatcctcgaccgccacgtaatccccggcacctatgatgaaagccatgacgacgtgaaacgatacgggcggatcaccaaccccaccgtccatatcgggctgaaccagatcaggcggctagtgaaccggattatcttggtgcatggcaagcccgccgagatcgttgtggagctagcccgtgatttgaaaaactccgaggagcagaagcgggaaattcagaaagctatcaaaaagaatactgacgcggcaataatgaggggcaaaaagctggtcaatgatttgggtcagaaggatactggtgcgaatcgattgcgtttgcgattgtgggaagatcttggtcctacgatcggccctcgaagctgtccttacacgggcaaaccaatttccgcatctatgatcttcagcgaccagtgcgatgtggatcacattctgccattttctcgcactctggatgacagcttttccaacaagaccctgtgtctaaaagaagctaatcgcctgaagggtaacaagacaccttgggaggtttggggagacacgccgcagtggggtgagattgccgtcaacctcaagaacttgccggataacaaagcatggcgcttttcccccgatgcgatggagcggttcgagggcgagactgattttgccgctcgcgcgctcaaggacacgcaatatctgtcccgcatcgcgcgggcctatctggatgccctttatgacggcgcagacggcaaatcccacgtctgggttgtgcccggacggctgacggaaatgctgcgccgtcactggggtctaaacggcatcgaagcgctgacggacagcgatacccaaaccgttaagcccaaaaaccgtatggaccaccgccaccatgccattgatgccgctgtggtcgccgccacggaccgcagcctgatccagcggatcagcaagatcgctaagcacgatgagaagaccggcgccgagcaggtcgtgcgcagtgtcccaccaccctgggacaggtttcgagatgatatagccgcacagctttcaaaaatcatcgtcagccaccgcgctgaccacgggcggatcgatccgcaggcgcgtgcgcaaggcagggacacgacctctggccagttacataatgatacagcttacggagtgattgatgagggacatgtggttagccgcacaccgcttacatccttgaagcccggcgacattgaggtgacgaccaagggcaagaacatccgtgacccgttcctgcaaaagcacctcgcgcgtgtgacgcgaggactggacggcagagctttcgaggcagccctagttgcattcgctcgggcggctaaacttccagatgatacagaaaatccttatttcgggttgcggcgcgtgcgattgtccgaaagtcttacgaaaagagcaaggattgaggtcgccgaccgaaatggcaagccgttcaaagcttataagggagacagcaaccattgctatgaagtctggcggctacccggtggcaagattaagtcgcagatggtcactacattcgaagctcaccaggccgcagttgaaaagaaaccccatccagccgcgaagcgcctgttacggtttttcaagcgtgatatgatcgcgttggaacgggatggtgctctatttattgggtatgtgcaaaaaatgaaagctggcggattatttattgcaccgcataccgaggcaaatgcagatgcaagagaccgtgatagtaaagacacgtttcgttttctgaatatcggcggagggtccttgattaaggccaaagcccgtcggattcatgtcgacgaaatgggccggatgcgcgacccgggtccgcctcgttaggtgaattacgtaaacttgtataaaatccgttgtgttaacgattcgcgtgggggcgtgaagggatgacacatggaccagattatcgacattgccacgaacgggcggcacctgtcccgcgatcatggattcttaaaggtttccgaagataatgccgaagtcgggcgcacaccgcttgatcaaattgcaggcgtgattgttcatgctcatggcacgacatggtcgacctcgctgctgacggaattggcagatcgtggtgtgccggttgtgctgtgtgcatccaatcatgcgccaaagtcggtgctaatgccgatcgacggccaccatgctcagggtgcgcgtatgcgggcgcaatggcaggccaaaaccccgctgataaaacaggcctggaaacaggttgttacggccaaggtgacgatgcaggcggctgccctcgatgcactcggagaggctgacgcgcccctccgaatgatggcgcgcaaggtaacgtccggtgatactaccaacatcgaagcacaagccgcgcgatattattggccccgcatgatggggccggatttcaggcgcgataccggggcaggggatgaaaatgccctgctcaattacggctacaccgtattgcgcgccgccacagcgcgggccgtggtggccgccggtttgcatccgaccatcggcctgttccactccaatcggtccaacgcatttgcacttgccgatgatctaatggagccgttccgcccactggtggactgtgcggtgcggaagattgtggcaaaacgtggcgcacagattgataccgacacgaaacaggcgttggcgcggctgattgctacagacctgccgttgggagagggcgtaacgcccgtgtcggtagcggtgatgaaattagccacctctctgggccaaagcttcgaatcgggtaagttggcgctggctttaccggccccgctggaccgtctgacccttgcggtgctgggagcatgagctatgaaatcagagttttatcggggtatcgactgatgtggattcttgtgatgtttgatctgccaaccgatagcaagctgcagcgcaaggcggcaggcgattttcggaattttctgctggatgaggggttcgagatgagccagttttccgtctacgctcgattcgtaaatggcaaggaagcgtttcaaacccgcgttaaccggatttcgcgtcatttgccagattcgggcgatgtgcagatactgaattttactgatcggcagtatcgtgatattgttcatttctcggatcagagtcgcaggcgcgctcgcgagaatccgcaacaactggtgatgttttgatccgattcggcgaacttttatccaacgaccaccgtacatatctttatgttttcaaaggcatgcacggcgatgtattgtagctgttcaaaatccgcggtccagccgcaactccaatagagctgccctccccaaagaaaccattgtagctgttcaaaatccgcggtccagccgcaaccgatccggcgggcagtgcggaaaacgttaattgtagctgttcaaaatccgcggtccagccgcaacacatatgcaccatgtatcggccctgcccatattgtagctgttcaaaatccgcggtccagccgcaacatacgcgaaatggtttcgcagttgtcccggattgtagctgttcaaaatccgcggtccagccgcaacgacattctttgtgttaaagtccggaattgtcattgtagctgttcaaaatccgcggtccagccgcaactgtcccatgatggttgtgctgtcgtgatgcattgtagctgttcaaaatccgcggtccagccgcaacagaaacccgcgcgtgtcgtttggtgcggggattgtagctgttcaaaatccgcggtccagccgcaaccattgcgcttgccggtttcgatttcgctgaattgtagctgttcaaaatccgcggtccagccgcaacacccgttgggtgtgctggcgcgggcgggcattgtagctgttcaaaatccgcggtccagccgcaactgcggcggcggctcatgacacaacgcccagattgtagctgttcaaaatccgcggtccagccgcaacccttctctctggcatcggcccgcgatctggattgtagctgttcaaaatccgcggtccagccgcaacgatggctgatgtcggggtccgttccgttgaattgtagctgttcaaaatccgcggtccagccgcaactgctacggtcggcagattatcaccgtgtcgattgtagctgttcaaaatccgcggtccagccgcaactcagccggtcatcgctgtattccaggcctgccgaaatagatgctgaaacgctgacgctgatgaaggagatcggccgggtgttcaccaagcacccgttctttggtagtcttcagattacagcctacttgcccagaaacggcttccacgcggccgaccaccgtgtgcgtcgtctgataggcttgatgggattcaatacccgcaaagccgagtgacgcggcaggtcttgccggccggttcacgggcaaactggcaactctgcactgagatcatgttgcggaaaacttcgacgacgttcgggtttgggttgtggatggttcgccgccaaccataaggcgctcgtatccgtccaacaggccgtggtcggccttgatagcgtcggtttcggcctccggtgccgcgcctgcttcgtccatgccaacggcggcgcgtaccaacgcttcgtgcttgcggctaaacacaaagccgccctttttctctgatcaactgatcttgaatttgccaacatccggcacctgatcctttggaacgccgcgtaaaattgcactgttcgttcggacatactcaatgacaggcgctgtccctgcttctggtgcctgtggcgtggctgcctgctctgcgctggtcgaaccctgatctacatgccgtattttcagcgcgacgattgaaacaagtttatcaagatcaacccaatcgccagcaccaagggtatccttgttgtagccacgctgctttgcggtgtggcgcgcccttgggagtgtgcaccaccacccatcctgaaagccggggtggcttacttgggcggggttttgggctggctctgctgcaacagcttcttgcccgccgctatcatcgtcggctcgttgttcttctgtcctgaccggatcatcgcttctgccgccaacctgttgcgaaggctgttgttgcgagctggcaaaggggtcgcctgattggctttcggcttttcgctatcatagaatttcatcggctatttcccttgcggttttgagtggcgggcgtcaacgccatcaagaatgccctgatcggccctttgatccatagcagcattgacgaagtctgtcggaaaatcttccatcgccttgcgcgataccgggcgcgtgccttcctcgttatggaaggcgtcaatgatggcctcggtcatttcgctgtttgggtccccgccgcctctaggtgcgtctgctcaatgtgggcgcggtatgcgtcagcggtgccgcactgataggcaaggcgcaaccccatgacgcgcccattgccgcttttccctatcatcctcacccttccggctcatgttgcttgcgtcacccacaaggccgccgccaatcgcgctaatgatgaagtggtttaagcaggcggccatcaggtcaacgtacattccggtcgcctgctgaacgccaaaccgcgctgctgcgctttcagcaacttccggtgcgccttcttcccccgccgatattcccgccaaaccaccaagtcgcgcgacagctcccctggcccccgagaaactgcgcagcttcatcggagaagaggccgaggctgggttgcccctgccggaaggctcgaaacaagccttccagcgttggttcgcttgccgtgcggtctggcgatataggcgcttccggcgcatcgcctagcgccgtcagatcagctttggctggctccgagaatcgttgaaagacaagcggatacgcgcctggtttcatctcaccactatctcagatgactattcgccgcgcagaaaagcactccaagccgccatcatgacccggcgccgctccagcatgtcactgcgctgataggcgcgctccacatccgagccgatgaaatgcgcaagcgcgatttcagccatgtcgcgggggtagccttgttccgctgcccactgccggaaggttgagcgcagcccgtgcggcaccgccgggcgcttgctgcgcgggtcgaggtaacccgcgcgacccgccttcacttcgctctcctgcatccggcgcatgacggcggaaattgacatgtctgacagcattccgcctcgcggtgcaaaaaataccaaaggcgaatcgtccatccggggcaggttttccagaatagccactgcgtcgggcgtcagcgccacgcggtgttcccggcctcctttcatccgcgaagccggaacggtccatgtcgcagatgtcgcaggtgtcgcaaccggggtagttctgattgcgctttttatcccgaagtcgatttcatcccaagtcattccccgcacttcacctgaacgcgcagcggtgagcgtcaagaactgcaatgccttcgcagccatcccgtcccggctactaagcgcagcccaccagcctacagcgtcgcccagcgccaacgcgggttgattgccgcccgtcgcgaccttggaaggcttgggcagaatttccgacaggttacccttccagcgtgcggggttgtcacctttgcggtgccctgccactgtcgcccatgaaagcacgttttcgatgcgcccgcgcagacgttttgcggtttcagttttggtttgccagataggttccagcacgcgcagaatatcctgcactgtgatttccgaaaccagcttggaacccagcaccgggcttgcgtaagtgttcaaagtcgagcgccattgcttgcggtgcttttcattgcgaaattcatccagttttgcggccagataggtgtcaacggctgcgtcaaaagtcagccccgctgccgccttacgccgttccgccaaggggtcgccgcccagcatcgccttgccccgattgtcgagtgccagctttcgcgccaatgcgagcgatacagccggggggctacccaggccgatttcgcttcgcttgccgcgaatagtgatgcgctgaacccactgcttgcccccgttcggacgtacgcgaagaaataacccgtggccgtcaaaatgctttcccggctctgtcaccgtttccacgaaacgcgcagtcagcgccttctgcggcctccttattccatcatgtgtcaagttttatcccccataatatcccccacctagtagtggattagataggaatatgctggattcgaccggacgttggaagtccttattgtctttaatttcaaggcttaaacggaagtttttagacaacgccggatctacctatagcggacaccttctccgccattatccccattgcgaaccagtaacgccgcccagacgggcacggatttttccgtgttatcaaaggggtttgcctgaacgggccgaacctcacagacgcgccgctaggctgaagttgggctcagaatggccctcagtctcagtttgggcgaacctcgcccgttccggttcggtcccttttttctattgcatttcaatgccctgccgccgaactccgccaaaacctaaaagcgcgttccgaaagacatcaatggaaacatagacggaacacgcagtaggcgcgttactcgggaggccagcgtaaagcggcggatttctggggttggttcgcatcccattcactcaccgaaacacttgatgacaaaccattttggcaccgctagcgttcaagaaccacagattggtgcaggtcgatgcggaggctgagccaaatc

SEQ ID NO: 3689 - DNA, 18758 bp, synthetic construct
  misc_feature 1..18758: note = Synthetic
  source 1..18758: mol_type = other DNA
agttcgtcctcgatctgcttgatctggcgcgacaggggggactgcgccatgcccagccgttcggcgccacgcccgaaatgcaattcctcggcgagggtgacgaagtaggtcaccagacccacggcgcgcatccgctgttcgttatgcatgatgccgctcaggctgcactccagtcccgacagccagtcatcgcgcccaagcggttcaaaggcacaggaatgggccgtctgcccaaaggccagcgttgccatgaagaaatagatgccttggctgtgcgcgcagaccgcccagatgatccgggccagggcaactgccacgccgatgcccgccgccatcgccacgggtagcatattggcccagcaggaagctgcccccctcccccggtcgagcgggaccatcggcccgaacgaggtttcgaccgcgcggcgatctcggtcacctcgccctcgaccgccagcggcgtgaccttgtgtatcgcagaagacgacggcgccgacaggatacagccggcgccgtcgtctggcaggtcggaggatcagcgccagaggatcgtcgcaacgtgatcggcggcaaccctctggattgcctcgaaccgggcgccggcggcccagtccggcccccaatcctcggccagtgtcagggccatcccctccggcaaccagtcggcatgggcggcggaaaaggcgcgaaactgccgggtggcgggataaagcgccttgaaaagcgcctccttcgccgagaaaacccgtgtgacctcgtgatgcagggacaggccggaccggccgggcggcagttcgggcatgacatcgggggccagccgacgtgcggtctccggggtcaccagccgctcgatatccagcccgatcagccgcgccgtcccggcaggtgcggcaatggctgcggcgaggctgccgccatggctgatgcttccccgccagccggcgggccagaccggcaggccgtccgcgtccatgccgggcgcctctgcttcggccagcccggcccggcgcagcgccgtccgtgcggcgaggcgacctgcggtgaagctcgcccgtcgccggggcgcgctggcgcggatgcgggcgggcagcgtgatctgctccgtggcggccagcggcaccacggccagcccggcgccgggcggcagatgcaggccacgcaaggccgcagctaacagttcggcaggcatccgggtcacatccgctcctctgcttgatccgtgtcggcgctgcgccgggaccgccggcaccatttccacccaggatccgacatgcaacgtcacgccgggccagcggatgccgttatcgccttttgatcgcctgcgccaagtcaaatgaccgaccggtccgttcaacttggcgtccccctgttggcgagcggacgccagagagaagatcaggcatcttcgcgccttcatcacggctcggccgtatcgaggcccgaaacaatggcgctcacggttcacgggtggaaattgccgtgatccttgaattcggtgtgcagggcatataaggctttaactcaagttgaaggttaaggacctgcgccatgaaaatcggcgaaatcgccaaggccgccggcgtcagcacgtcgcgcatccgtttctatgaacgcgaggggatcatcccggctgccgaccgcagcgccaacggctatcgcgattatccggccgaactggtgacgcttctgcgtttcatcgaacaggcgcagggcctcggctttacgctgcgcgaaatctcgggtgtcggaatcggcaccggcgaacatatcgtgtcctgcgcggacgcgctggaactgctggccggcaagcgcgactcgatcactgccctgatcgccgaagcccaggaccgcaagcaacggatcgaagcgctgatggcggaactggaagccagcagggccgcgcggcgcgcgacgggttgaggaaccggcggccaaaagccgaataccaacgcgtgacgccattggaaatgcatccccgcctgcctacatgcgagcagcaagcatatagggggaccaaggatgacctatacgaaatccgacgatgcgattgcccgcctgacgcccgaacagttccgcgtgacccagcagaacggcaccgagcgcgcctttaccggcgaatatgacgagcatttcgaacccggtatctatgtcgacatcgtctcgggcgagccgctcttcgcctccagttccaagttcaattcgggctgcggctggccgtcgttttccaaacccatcgtcgacgcgaatgtcaacgagttgcgcgacaccagccacggcatgatccgcaccgaggtgcggtccgcccatggcgacagccatctgggccacgtcttcccggatggcccgcgcgagatgggcggcctgcgctactgcatcaactcggccagcctgcgctttgtccccaaggcagagatggcggccgaaggttatggcgactatctggatcaggtggaggagagctgatgaccgaacgtgctgttttggccgggggctgcttctggggcatgcaggatctgatccgcaagttgccgggggtcgaagcgacccgcgtgggttataccggcggcgatgtggcgaacgccacgtatcgcaatcacggcagccatgccgaggggatcgagatcctgttcgatccggcgaagatcagctatcgccagctgctggaattctttttccagatccacgacccttcgacccgcgaccggcagggcaatgaccgcggcaccagctatcgctcggggatatattacacctccgacgcgcagcatcagaccgcgctggagacgatcgcggatgtggatgcctcgggcctgtggccgggcaaggtggtgaccgaggtgaagccggcaggcgatttctggcaggccgagccggagcatcaggactatctggaacgcatcccgaacggctatacctgccacttcccgcgcccgaactgggttctgcccaggcgcgccgcggaatagcctttatctgcgccgggtccgagcttgacgtggagcctcgcccggatcggcgcgtggctgccggccccaccatcgccttgtagccacgaagcgcatgccccggccgtcgctccaccgcttcaaggaaaagggtcagcggactgacccgctgacccgctgaaaatcttcagccgcgaatgaaggccagcagatccctgttgatcgtctcggcctcggtggtgggcatgccgtgcgggaagcccggataggtcttcagcacgcagttctgcagcagttcggccgatttcttgcccgagatctcgaacgggacaacctgatcgtccaacccgtgcatgaccatcatcggcgtggtgatgcttttcagatcgtcgcggaaatcggtctgcgagaaggcaacgatgctgtcgtaatgcgccttggcgccgcccatcatgccctgacgccaccagttgtcgatcaccggctccgacgccttcgcacccggacggttatagccatagaacggtcccgccggcacgtcatggaagaactgcgcgcggttttccctggtgttcttctggaagtcgtcaaagaccgacttgtcgatcccgtccgggttatccgccgtcttgaccatcagcggcggcaccgcgctgatcagcacacccttggcgaccttgtcttccgggtgccgcgcgatatagcgcgcgaccacaccgccgccggtcgaatggccgacatggaccgccccctgcacgcccagatgcctgaccacggcggcggtgtcatcggcataatgatccatgtcgtgaccgtcccagacctgttgcgaacggccatggccgcgacggtcggtggcgatgacgcggaagccctcgcccagaaagaacatcatctgggcgtcccagtcatccgcgctcagcggccagccatggtgaaagaagatgaccggagcgtctttcgggccccagtccttgaagtagatttcgacgccatcatccgtggtaacgtaacccatttatattactccgatatatctcaatgactgtggcaccacggcgaatttttcccggaaaggatggcgtcgtcggacggtttcagcacgcggccgaaggaatcgaatacccggcagacagacgcagcgtcttcaacacatcaacgcaaataatcgttcacaaacagtcttctgccgaaaggcggcacggcaggaagattcggtatccgaaagctgacgacctcctcttttcaggacgattcgcggggatgccagccaaggctaacattgaaccggagttaagggtcaagcgccctgaagaaggccattcgcacctccgctgaccgccgggaggatcgggccaaatgccgctggccggggcggcctgcagccggtaatctacatatccgccgcagctgcggcatgccccccgcgttggaccatatgcgccctgccaagcatggccagcgacatcacccgttcggcattgctggcgcaatccatgccgtctgggcggctggaaagggcttcgctgatggccagcagatgcgccttgctggctgcgaggcgcgcctgcgcgatctcgatctcggtgattttccggctcagcgtcgcagtcagcaggtcgtggtcccagaccgccagatcgcgcgggaccagcatctgcatctcctccagcgtgaagcccgcatcctgcgccaacaggatcaggccgatgatgatgaccgcattttcgggatagacacgatagccgttcggcaaccgctcaaccgcccgcaagaggccgatccgctcgtaatagcggatgcgggattgcgagagcccggtccgccgggaaagctcgcctatcctcatccccgttctcccttcgcgctctgccgtcaaagtaaccgcgcgcccccaaactgtcgagcagccccccgaaggcggcccgcatctgcaaggcgcggccccccgtcgcggtgcgtccgcatgggcggccgatccaaagccgagcgggctgtgggcagcagcggaaaccgccgccgctgtcactgtcgctgtcgcggtcccgtttcagcgcgggtcagccgcttcgcgcggcgcccggcgccagcgtcgcagcctggcggcgactcgggcgaggctagctgtagcgcgccacggccaggtcggtcgcgtcgatctccggcgcgcggccggaaacgagatcggcgatcacccgggccgaacccgaggacatcgtccagccgagcgtgccgtgtccggtattcaggaacagacccttgaccctggtgggaccgatcaccggggtgccgtccggcgtcatcgggcgcagccccgaccagaagcgcgcccgcgacacgtcgccgccggggaacagatcggtgacggaatgttgcagcgtcagccggcgcggctctcccagatcgttggtatagccggaaatttcggccatgccgccgacgcggatacgctcgcccaacctggtgatggcgatcttgtaggtctcgtccatgaccgtcgattcgggggcgagcgccggatcgacgatcggaatggtcagcgaatagcccttgaccggatagacgggcagccggatcccgtgcgacttgaccagcaggggcgagaagctgccaagcgccacaaccacggcatccgcttccagcctgccattcgcggtgaccacggcgcgcacctcgccgcgttcgacctcgatgctgcggatgatgctgtcataattgaactgcacgcccaaggcggcggcctgcaccgccagcgcattggcgaatttgaagcaatcgccggtttcatcctgcggggtcagcagaccgccgacgatcttctcgcgcgcatggcgcagcgcgggctcggcccggatgcaaccttccgggtcgaggatttcatagggcaccccgtccgccgccagcgccttcacgtcctttgccgaggcgtccagctgcgcctcggtgcggaacagctgcagcgtgcccttcacccgttcgtcataggagatgccggtctctgcgcgcagttccgcaagcgcgatccggctgtaatcggccagccgcagcatccggcctttgttgatagcatagcgtctggaggtgcagttggtcagcatctgcagcatccaggaaatcatcgcccggtcgaccttgggccgcaggatcagtggcgcgtgctgcatcagcagccatttgatcgccttcatcggaatgccgggcgcggcccagggcgagcaatagccgaacgagacctcgcccgcattggcaaagctggtctccagcgccgggccgggctgacgatcgacgacggtgacttcgtgccccgccttggcaagctggtaggccgaggtgacgccgataatgccggcgccgagaacaatgactctcatgaaatcctcgggaaacgagagaaagggtcagaaacgggtctggacgctattggaaacggtaccgcgtgtctgtgcaagaccttgttgcatcggcaatatgtcaatcttctgcgacttgcgttgctgccgtgcagatcgagtttcagcccccccggttgggagggcgcggcgcatccgcgttccgaatagccacccgagcgccggcgggtcgcgcagagggtcgacctcccctccttgagggatcggcggcgcctttaccgtgcgccggcgagaaatttacccgttttcagccgcggattccccttgaacctctagttgctagagaccttagatttcgattcgatgaaggcaattgccctgtccggggccgagggaacagcatgacgacatccgaaaaacaaagcgccgccgcctgtgactggacggtttccggcatggattgcgggtcctgcgcgacaaagatcaaggacgccgtgaggcgcctgccgggggtcagcggcgtcgagatcggcatcatgtcggagcggctgcgcctgacgctggacgaaacccagacaggccgcgaaaaggtcgaggcggtcgtgaaatcgcttggctatggcatcgcaccgcgcacggcgggggcaaaacaggacttcgtcctgtcgggggacggccccgcggcggggaatgggcacgatcatgccggacatgaccatgaccacgaccacgcgcatgaccacgaccatgaccatgaccatgaccatgggccgaagaaggccgctgtagcccgcaacgacattggacatggcagccccggccatgtccatgatgaccccgccgaccgtggcaagcgatggtatcagaccgccaagggcaaactggtgatcttcaccgcgatcctgctggctgcggcctggatcatcgaactgcttgccccgcagatcggcaaatgggcctttgtcgcggcttgtgtgatcggggtcgcccccatcgcccggcgcgccttcgcggcgctgcgcatgggccagcccttcaccatcgaaagcctgatgacggtcgccgccatcggcgccctgttcatcaatgccgcagaggaggccgcgctcgtcgtctttctgttcgcggtgggcgaggtgctggaaggcgtcgccgccggcaaggcgcgcgacggtatccgcgcgctcgccaacctggtccccaagaccgcgctgctggaggtgggcggggcaacgcgcgaggtcccggcatcgagcctgctggtcggacaaaccgtccttgtccgtcccggcgaccgcatcccggcagatggcgagatcgccgagggcacctcgggcgtcgatgacagtccggtgacgggcgaaagcgtgccggtcaccaaggggccgggcgatcccgtcttcgccggctcgatcaataccgaggcggcgctgcgcatcaccgtcaccaaggcggccgaggacaacaccatcgcccgcatcatccggctggtcgaggaagccgaggacgcgcgcgcgccgaccgaacgtttcatcgaccgcttcagccgctggtacatgcccgccatcgtcgccgtcgcggccttggtcgtcgtggtgccgccgctggccttcgggcagccctgggacacatggatctatcgcggactggcgctgctgctgatcggctgcccttgcgcgctggtgatctcggttccggcctcgatcgcgtcggccctctcaaccggcgcgcggcgcggcttgctgatgaaaggcggcgcggtgatcgaggccgcggcccgaacgcgccgcgtcgcctttgacaagaccggcacgctgacccatggccgcccggccgtcaccgatatcgtcaccttcggcgaggtgaccgaggtcgacctgctggccgtcgccgcaggcgtcgaaacgggatccagccacccgctggccgtggccatcctgaacaaggcgcaggaggcgggcgtccagcccctgccctcgcgcgatgccagggcgctgatgggcaagggcgcgaccgccaccgtcggcgatgcaccggcctgggtcgcctcgccgcgccacgcgctggaaatcggggggctggacgaagccggattgcggcaggcggctggctttgaagacgaaggcaagactgccgtcgccgttttccgcgacaagaccccgctcggcctgatcgccatgcgtgacgaaccgcgtggcgacgcggccgaggcggtgcgccagctgaccgggatgggcgtcagctcggtcatcctgaccggggacaatccccgcacggcagcggccatcgccggcggcctgggcatggagtttcaggccgacatgatgccggaagacaagctgatcgcgatccgcaggatgagcgaacagggcggcgtgatgatgatcggggacggcatcaacgacgctccggcgctgaagcaggccaatgtcggcgcggcgatgggttcgggcaccgatgtagcgctggaaaccgccgacgcagcgatcctgcgcgaccgggtgacggacattccggcgttgcttcgcctcgcccgcgccaccatgaccaatatccgccagaacgtgaccctggcgctgggtctgaaggcggtgttcctggtgacctcggttctggggctgaccggtctgtggatcgccatcatggccgataccggcgccacagttctggtcaccctgaacgccctgcgcctgctgcgcttcaatcccgaacgcgaggcgtgacgcggtgataccggccatcgggtcggccgtcttcgcggccgttgcggtggggttgtctgcccctcaccgcaacggcagcaaggcgatgcttcatcggcaccgaccctgtggcactgcccttggtgacctgtttcccacagcggcgttcctgattgacgtgccggtcatgacggagagggaaatcgcttgtcgatactgctttcccggctcgcccgcgcgacacgccgatcggcaggtttgaaagcgccttccaacagagcgagataggttgccggcgcattccccaacccattgccggcattttccgggtcgccaacggaatccgcatcaccacccgcagcgacttctctgcagaacaggcatcgccgattgcccgaccagcgatgaatatcgctgccgaagcgtctgcgacgttaaatgggtatctagggcagttctttcccggctgttttctggacagcccgcaaaccggagttctgaccagaaattctgccttgggctaagtcagcgccgatccgatcacaccaaaaggaaacacgggccgtagcccgtgttccaatgtggtgctctgtcgagcttgttaaccgctcgaccgcgatttctgaatgttctcagataatcgcgtcaggaacgaaacgtcaagagcgtttcgtcattcagagatcgcggtccagccgcaacgcaaatacgtcgcaaacactatcattgcacattgtggataatctcgcggcgtgcggcaaagatcgaatctgcgtcgtccctctgaagcgtttaagctcgtccagaaccgggagcgccgccggggcgaaccagacctttgccgaagtgaatcggagaaggcgcggctctcactacggttaaggaactggcgcggatcgagagcatatttctcagcaaatgcattcccttatcgaataaatcccatggacaagcgcatatcggtcggcattcaatgcaaatgttccaaatttacggtcatgccatgcacacacgcctcgccctcgatatcggcacctcctccatcggctggattctttatcagattaccgatgaccgcccgacccgaatcctcgatggcggcgtgcgaatcttcggggatggccgcgaggcgaagaccgggcagtcgctggcagtggggcgacgcacggcccgcgggatgcgccggcgccgcgaccgctatctgcgccgacgcgccgcgctgatgaagcgtctgggcaccgccgggctgatgccctcggatccggcccaagccgccgcgctgaacgcgatcgacccttacgagctgcgcgcgctcggcctcgaccaccggctgccgctgccgcatctggggcgggcgctgttccacctgaaccagcggcgcggcttcaagtcgaaccggcgcaccgacaagggcgacaatgaaggcggcctgatcaaggacgcgaccgcgcggctggatcaggcgatgatggctgcgggtgcgcgcagctatggtgaattcctgcacatgctgcgtcagcaggcgggcgacgcgcgcgatgttcccgccgttcgcacccgtatcaacccgcatctgaccggcgaggacggcaaggagcagccgggctacgacttctatcccgaacgccggcatctggaggaggaattccacaagctctggcaggcgcaggcgcagcaccatgcggccctgaccgacgaattgcgcgacagcctgttcgagacgatcttttaccagcgccccctgaaaaccccggctgtcgggcgctgcctgttcctgcccgaaccgcgcctgcccaaggcgcatccgctgacccagcgccgcaccctttacgaaacggtgaacatgctgcgtgtggtcacaccgggcgaggccaaacgccgactgacgcgcgaggaacgcgacatcgtcatccatgccctcgacaatcgcaagatcctcgccgggccgggcaagaacgtgatgacgctcgccgcgctcggcaaggacatcaaactgcgcccggaccagagtttttctctggaaaccgccaaccgcgactcgatcgcctgcgacccggtgcggatgagcctcggctatgagggccgctacggcgcgcaatggtcgaccctgaccattgaacagcaatgggagctgatccagcagctgcgcgaacagcaggatggcgaagcactggtgcaatggatcatggaccgcaccggcttcgaccgcaaccgtgcccgcgccatcgccgatgcgcctttgcccgagggcttcggtcgcctcggcgaaaccgccacccgccgcatccttgaggtgctgatcgggggcaccgccgatcaggaggtggcaacctataatgaggcggtggccttctgcggctgggaccattcgcgcttcggcaagggcgaggcgctggaacgcctgccctattacggcgaggtgctggaccgtcatgtgcttcccggcaccggagagcccgatgacgacccggtcacccgcttcggccgcatcaccaacccgacggtgcatatcggcctcggtcaggtgcgacggctggtaaacctgatcatcgacacccatggccgccccgaccagatcgtgctggaactcgcccgcaacctgaagatgagcgaggaggagaagcgcgaactggccaagaccaacgccaagaaccagcgcgccgccgaagccaacagcgacgatatcgccatcctgaacgacacccgcgccgccgggcagccggccattgtcgataatggcgccagccgcgccatcctgcgcatctggaaggaaagctcgtccgatgtgctgaaccgcgtctgcccctatacgggcacgcagatcacccccgccatgctgttcgacggcagctgcgatatcgaccatatcctgccctattcgcgcacgctggacgacagtttccccaaccgggtggtctgtctgaaatccgccaaccgcgagaagcgcaatcagaccccgtgggaggcctggggcaacacgccgaaatggcccgttatcgaggcgaacctgaagaacctgcccgggaacaaggcctggcggttccagcccgacgccatgacccgctttgaaggagagcgcaacttcgaggcgcgggcgcttgtcgatacgcaatatctgtcgcgtctcacccgcgaatatctggaaagcctctacgccgatgcgctggcggctggccgccgcccgatctgggtggtcgcgggcaagctgaccgagttgctgcggcgtcattggggcctgaacgggctgctgcccgacgcgcatcgcggcacgtccaaggccaagaaccgtcaggatcaccgccatcacatgatcgacgcggccgtcgtcggcgcgacggaccacagcatggttcagcgcatctcgaaaatgtccgccgcgaatatcgccaatgggctggaggcgctagccggcacgatcctgccgccatggccgggccttcgcgatgacctgaagacgcagctcgaccgcaccatcgtcagccaccgcgccgatcacgggcggatcgacgcgcaggcacgcaagcaggggcgcgacagcacctcggggcagttgcacaacgacaccgcttatggcctgaccagcgaaaccctgaacggcgtgccgctggtggtcagccgcaaacccatcgacagcctgaccccggcgatgctggacaagatccgtgactcgcatctggctgggttgttgcgtcacgcgatcgagggcaaggaaggcaaggacctgaaggccgcgatcgaggccttccgtggccgccccggcccctatcatcgcatccgccatcttcgcctgatcgaaccggtcgatgtcatcaagatccgtgaccggaacggcaaggcctacaagggttacaagggcgacagcaaccagtgctatgaggtctggcgcctgcccgatggtcgcctgacccatcacgtcgtctcgaccttcgacgcccatcagggcggcgaatcccgcccgcatccggcggcgaagcggctgatccggctgttcaaggacgacatggtcaagcttgatgacagcaagttcgggccggtgatcgccacggtcagaaaattcgatgtcaacggcggtctttctctggttgcccataacgaaagcaatgccgatcagcgctaccggaaggacaaggaggatgtgttcatccgcatgcagccctcggcgctgatcagggccggggcgcggcgcgtggttgtcgacgagatgggccgcttccgcgaccccggtcggccgccggacagaatccgttaggagcgaatcgcccgtcacgttagcattttcttgtgttttcgtggtgagttaccggcttggaccagatcatagatatcagccaggaaggccgacatctgtcccgcgaaaggggctttctgaaggtcgaggccgagggcgtgttgctgggccgtgtgccgctggaccagattgccgcggtcatcgtccatacccatggcgtcacctggagcaattcgctgctggtcgagctggcggatcgcggcgcgcctgtcatcctttgcgcggccaatcatcagccccgcgcggtgctttgctcgctggacggccaccacgcacagaatgcgcggatgcgcgcccaatgggatgcgcccgcgccgctgatcaagcaggcctggaagcagatcgtcatcgcaaagatcaggatgcaggccgccgcactggccaccatcggtcaacctcccgcccggcttgagcagatcgcccgcggcgtgcagtcgggcgacagcggcaatgccgaggcgcaggccgcgagggtctattggccgatgatgatgggcaaggattttcggcgcgacgccgatctgcccgacattaatgcgctgctgaattatggctatacggtgctgcgcgccgcgaccgcgcgcgccgtcgcggccgccggactgcacccgaccatcgggctgtttcactcgaaccgcgcgaacgccttcgcacttgccgacgatctgatggagcccttccggcccctcgtcgacctcaccgcccgcgcaatcgccgcacgtgacggcgccgacgtcacctctgacgcgaaacgccggatggcagagctgatcgcgctcgatctgccgctgaccggcgagaccagcccggtttcggtcgccctgtcgcggctggccacatcgctggcccaaagcttcgagacccggcggctggcgcttgccctgccggaatcccccgcgccgcttgtgctggcggggcttggtcgatgaacgcccccgccacctttctcagcggatatcgcctcatgtggatcctcgtcatgttcgacctgccgaccgacaccaaaccgcagcgcaaggcggcgggggatttccgcaacttcctgctggacgaaggtttcgagcgcagccagttctcgatctacgcgcgtttcgtgaacggcaaggaagcctttgaggcccgcatccgccgaatcgagcggtgcctgccctcacaaggcgacgtccagatcctgagcatgaccgaccgtcagtatcgggatatcgtccatttttcggaccagggccgacgacgagcccgggaaaatccatcgcaactggtgcttttctgatgcgattcgatgattttcaccacacccgcccttctgctttccataagtatttcaatggattgtagaaggacgaagtgtagccattcagaaatcgcggtccagcggcaactgccgcccgctcgtccatgagcgccagcgtagtgtagccattcagaaatcgcggtccagcggcaacttggctggcggcggcacggaaatgcgctatagtgtagccattcagaaatcgcggtccagcggcaactgcacgtcgcggcgcacggtctcgaacgcccagtgtagccattcagaaatcgcggtccagcggcaacgcattcttccgtgggcttccagtccgggcagtgtagccattcagaaatcgcggtccagcggcaactgctggacgcgcgtcaggtgccgttcgatcagtgtagccattcagaaatcgcggtccagcggcaactcgctgcggtcgctgaatgaaaagacatgagtgtagccattcagaaatcgcggtccagcggcaactaatctcgtcgatccccggttggatagcgtagtgtagccattcagaaatcgcggtccagcggcaactggatgcagctaggcatcaatccggtcttgagtgtagccattcagaaatcgcggtccagcggcaactgctggctgcgacgagtgctgcgcttggtaagtgtagccattcagaaatcgcggtccagcggcaacttgattgggaagcaaccgcctgcgccgtgcagtgtagccattcagaaatcgcggtccagcggcaacaatatatataataaaatgcgcgcagcgtgaagtgtagccattcagaaatcgcggtccagcggcaacagaatgatcgcgcgggcgttagctgcgctgagtgtagccattcagaaatcgcggtccagcggcaaccggtcgcgttcgatttccatagtcttgaccagtgtagccattcagaaatcgcggtccagcggcaactattctgatcgctcggccgcggcgtttcgcagtgtagccattcagaaatcgcggtccagcggcaactatggtaaccatccggcgtaggccgcggacgggtgtccgtgctcagggagtgggcttgggtgctttgggcttgccgggccgcggggaccatttcttcgcgagttggtcaaagcgttcgacgatcctgtcgatcctggcatcttcgggatcgaaggttgcacctgaccagccgaccatgtcgtcgtgctgctcgtggtccggatctgcgagggcttcgaggaattcctcgtagcccggagcaccgccgacatcctcgggcgggcaggccccgctggccttcagaagccttggataggtcacgcccggggtggcctcggtgacccgctcgatccggatgctgtggtcccagtcatcgccgaagtcgtagacatactggatcgtcctgacgccggtatcctcgagcaccttctgcagcgtcgccttcttcgcgggcatcgggccgtcgtagaatccgtccggaccgggcacgccccagcccgcccccccggccctgaattcgtagagatgggtgtccgtccagcccatcgccgcctggaccacctcatgcagccggtcgagcctgatcttcagcggcacctcgatatggcgcatcggctgaggatcgacgtcgttcagaaggatccggaggcgggcgatcagggtcatgcggccctcctttgcggtatttgcgaccagttccagggaagaagttccggcaggcgcgacaggggtatgtccggcagccgggcaaggacatcggccagccaagcctgcgggtcgacgtcattcatcttggccgtgacgatcagggaatacatgaaggcggcgcggtcgccaccgcgcggagatccggcgaagagccaggctttccgcccgagggcgacgccccgcagcgcgcgttctgctgcgttgttcgtcaggcagatgcggccatcatcgaggaagcaggtgaaggcgtcccagcggccgtcctcctcgaacatgtagttgatcgccttggcgacggggttgtgcttcgacattcgggcgcgttcggtccgcaaccagttgtgcagatcctggaccatcgggcgcaccagccgctgacgggcgtcatggcgggcctcggcggtcaggccggtgatctcgcgctcggcatcgaagatggcgtcgaagcgtttgaccgattccagcgcgatgggcgagatctcctcggccaccgatctgcccttgcgggccgtggctttgatatccgccagttcgaagaacttgcgccgggcatgcgaccagcacagcgcgctcagcaccggcgcgggcctgtggctggcatgatagagatcgttgtaaccgccataggcgtcagcttgcaggatgccggtccagcccgtcaaatgccgggtcgggtgttctttcctgcggtcggttgagaagtaatagagcgctgccggcggcgccccaccggcaaagggccggtcatcccgcagataggtccagagccgggcggtttgcgtgccacctttggccagcagcggcacggtcgtgtcgtcagcatgcaatcgctcggcgccgaggacatgggcgcggatcagatcgtggatcggctgcagcgccacggcacaggccccgacctgatcggccagggtcgagaggctgatctcgacgccctccttcgcatagcgctcggcctgcctgttcaggggctgatgctggccaaacttctcgaacagcaccatggccagcaggttcgggccggcccagccccggggtgtcgggtggaacggcgctggcggctggctgatcttctcgcagtcgcggcaggtgaacttctcgcggacggtttgcacgaccttccactgccgcgggatcacctccagcgtctcggtgatgtcctcgcccatcttcacgatgcgcgccgaaccacagcaagtgcaggaagtcggcgccttaaccacgacgcgctcgcggggcaaatgctcggggaacggcttgcgggctgggcggcggcgttcgaaggccgcgaccatcgccctcgggcccgtcgcctcggctttggcccggtcatcggcaatgtcggtctcgatgtcttcgagctgcatctccagttgctcgatcagccgggcatggcgttcggcaccatggccatattgctcgcggcggagtttggcgatctgcagtcggaggtgccggatcatgtcttcagaggccgagacgatcgcctgaacctgggtcaactcccccttggcggcgaccaaggcgtcctctgcggcagatgcgcgagtctctgccgcggcgagtgcggcgcgcagaacagcgatctccgaggtggtctccgacatgccgaagacctatcacgaaaccccggaatagtccaataaaacaagggtattttgactatcaacccgccgaggcaggccgctgcgtccagcgcggattgcgccagtcgattccttccagaagatagccgagctgcgccgccgaaaccggaacggctgagccattctggctcaccggccagatgaacttccccgcctccagccgcttcagatacagcgacatgccgaccccgtcgtgccacaacaccttgatcaggtcacccttgcgcccccggaagcagaagatctcgccaccgtgcggatcgcgacccaggccctgctggaccttcagcgccaggctgttcatcccgcaccgcatgtccgtcaccccgcctgcaatccacacgcgcgcccccgccggaaaggcgatcatgcgctgtccagcaccggaagcagccgcgccagaatgaccgggtcaattcccgcaggaaccacgaggtgccggccattcaccagtgtgatcgcgactgtgacggcatcggagatctccagctctgccgcaggtgataccgatacaggcacaggttcggcagcaatcatcaccggcgcaaaggtcagggcaggctcatttccgagaaggccctcgcgatagtccttccgccagcgcgtcagcaacgcgcgagagatatcgtgacgccgcgccgtcagcgccacgctgcgcgggcgcgacaggctttcctcgacgatacggatcttctcggcagccgaccagcgacgctgccgaccactatcggtcaccgagagaacctcgacttgggaactgaagctatgggtgtccatagcttcagcctcctacatccatcccgccttcagcgtcagacggtcctcaccgggagcttac

SEQ ID NO: 3690 - DNA, 17316 bp, synthetic construct
  source 1..17316: mol_type = other DNA
  variation 14647..15747: note = note, n is a, c, g, or t
  misc_feature 1..17316: note = Synthetic
gctcagggtgcgaatctctttgtgattgctgcacacgccttagatctgatggcgattgctgccagtgagcgccccagccagcctggtgatatgcatggttacatgggcacgatcggcagcagagtgtcatgctgttcgaagcagcagcgctacgaatgcgcagatgtcgatgtgggtcgcgagtatgcttcgacagatcttggcgctgtgcgcatccggaaaacttgtagctgccggaaaaggtaacatcccgtgaccaggtgtcgtctgcagcggtgccactgtctcagtcagtttgcattttgggttgaagtaggcgtttcttcacattagtgtaggcctacacaaatgtgaagtatgcaaggtggatatgtccggcaaagtcatctgttacgtcctgatcacatacggcgcgaatccctccggttcgatccgcacgcatccggctgccaaggcacagataggattgttccagaagtctcttgagcgtttcccgcaagtaaaggccaagttcgttgtcgactacgcgcgacgtatcgaaggcctcgggtcgttgccgaagcttcagcgtatgctcgtagcgctgagtgacatagatgggccctcaatttgcatcgacgacctttcgcgcgtgttccggatcacgaacttgcagcaacggcagaacttgattgaagaactacaagaatttggaaagtatatattctcgatagggcatcaaaagaggctttcggaattctcatctgatgaaatccgtaatctgatccttttccccgagaaatcgaagcgtctcgcaaggcaagatcgcagccgtgacacgacgagcgcgcggttgtcatctgcgaaatcacgggccgagacttcaaagaagaatgcgcacctgctcaggcaagtggaagaagaactcaaaggcaccgaaagccgcgtgactctgcagatgatcgctgatggtgccaacgcgcgcggcatgcggacctcgcgtggaaaggagtggaccccgcaaaacgtgggtcgcatgctgaagtgatgaggcgtgcaccagagcggctgagagcgcccagggcgcacgacttgatctgcgcgcacatgggatcagaaatcgcgctcatcgaatcctgtgcgcaccccagccagccccaggcacatccgacggtctcgtctgcgaagtcggtgacgccaggcagcgatttcagtctgggaaccggccgcctgatagcataacgatccggtccgcggaggatgtgtggcaagaggagaacgacagatgaccacacgaaacccgggtgagcgagatttcgagcgtgagccgctgaggggcggttgtcagtgtggtgcgatccgctttcggatctccgcgcctctcacgatgccgcatgtctgccattgccgcatgtgccagaaagcctctggttccgccttcctggcattgggggaagtcggcctcgagaacttcgcctggacccggggagagccatcgtggttccggtcctcggaagctgttgagcgtggcttctgcgctgcgtgcggcacgtcgcttcactttcgctacgtgggatcggcgcggatcgacgtttcgctcgccagccgccagcatccggaccacgactgattggagggccggcagcctggtgcccccgggcggcgttgtcatgtgtcgagacgagagccagagtcgctgagagcgctcaggaatcgcgacatggtctgcgcgctggtcagggccgcgaaacgtgctcgtcgaatcctgtgagtctctcatcgactctggcggctatcagcggtcgacagggcgggggatctagagcggttccggcgagatggcgtcggtgaatgggcggacgagtgtcgcgagaacaggatgtcggcgcgtcgatcctgcgatatccggagcggcggattcaattagctcctatgtcgtatatcgctacaccaatttgtcggctcaagcggtcgaggcggacccggaagtcgtgaactgcgtgtgccggatggtcagtaagcgctgactaagtgcctattccccggcgatccgcgtgggtcaggcggtggcgcggcctattcactggggaaccctctatacatacaccatactccctcctacaccacctctcccctctccctcccacactcaggagaacacctgatagcctcagggaccgggaaaagcctccggccagcgcgacgccgccgcctcagacccccatacctccccatgctcaggccgaaccggcaccagttagctccaggagaagccgcgccagcgccgcgtcagctcgtccagcgccttgccggtcacgacgttcatctcctcccaggctttcagcccaagcccttcccggtcctggttgcgcggcagcttctgacctgatgcgcgcagttgctcccgttcttccagtgcgcgtgcccggtgtctgagtgccaggccgtagacgccgcgtgtgcgcatctgcgcctgtgcgtcctccagtagatgctgccatggctctgtggtgcccagcttgaacgtcaggtatggcctggtgagccgtctgaacgatttctttcccagatcgtcgatggtgttaaggccgcgctcttgcaacgaggcactgccggatatcgtcacttccacgcgtgctctgcggtcatgatccggtagcaccgtcatggtgtcattatccgggttacgctggtcggcgatcttgtgctggatcgtgacatgatgggcggcgtgcttgccaccttttgcgaacgtggcgttcagatacagatcttcgccggctctctgtgtcagaatgcgatcccggatctcgggtaagtcgagcgtgccatccgcggcccatgtattggacgtgtcggcgaacaggtatcgggttctcttctgtttccctgcaggccggttgggatcgtcgtagatctgccgggcatcgatgtggcgtggtgtgcggatgtcgggatcgagaaagcaagattgcggcgcccagtgatgccgctgtagcaggccgaccatctgttcgcgttgctgaatggcctcctgcggatcaccggttgtcggatagaagtcgacggatacctcgatcatgtgaactgtgacggcgccatcaatgccaggaccatcccggatcacgtccaggatcgcagataacatctccggcgcgggatcctgtatcaggagtgcgaagtgaaacccggtgcgcttgccggggtcaggctcgcgcagcggtttgccccaggcattctcgtccctctgctttgtcagatcccggaccaggtaagacctgccggtctcctttttgatctgcttgttgagcgtggtgtcatctatcttgcggaccgtgctgaacaggatcgcgatccggtcgatcagggcatcgaccttgtaggtgccgcgaatggtgacgtctggcgccagcacgatcttgccgtcccggcccgggtgaatcttgccgctcgaggatgtggaggatggggaaacgcacgcgtatctcagggttgatagcggcatgttgtgcccggccggtccacgatgttcgcttttctgcgcggatgagaagtaaccaagcgggatcgtgaagggggctggtgtcgcgggggtggatgtgaccggtgctgtggcctgcggttgtgacggatgcgcttcgggcttgccggtgatggcctcgagcacggcctgtatctccggggatttcgtgacggccttgccgccgtgcatcaccttgcgcgttttcaggtgggccaggtaggcgggtaacaggcgccgcaccgacttcagccgggaatcgaataaccgaggcggtctcgcttcgttgaagatatccggccaacagtcagacagatcgtgcttggtgatatcagccttgcggcttttgcgtggggtgcgcctggccttcagcgggtgctttttgcgatcctcacgtttcgggatctccaccaggcacgcggcgacacatttcatgatctcgcgatagtccggcggttgcccgggtgactttcccatcccggggcggccgtcgcggagcagccagtgaccgaacagaaccaactcggcttccggcttcgctttcttgtcagactggatggcatccgcaagatccttgggcactttatgcgcccctttgtgccgcctcgcgtgcaccaacgtattgaggcgcaggatgaagctttgatccgtcatctccccggtgatttcgccgtgctcgaacagggctgatgcggcggcgagtttccgagcggtatcttcccgcgcgatttgcgcgcgtgtccgtttcgcagatgccacatgcccctcccgtcctcgtgcgctgtgtgatcgcgctgcctttgctcttctggttgcgcacagcggataaggcctcacgcggagaggtcaatggggggttgggcgggaaagcagtgatcttggaggaatcgcttaggtgaccggatcggttcgaagtcgttggtcatcatgcacggaggcggcctgcaggcaacatgcggaacgggctgcccgcggctactcgacgacaacgtcttagcgcccagcacggcggcggcgtgggacacgcgcaccgcgccgattttcgcgctggaagatgtaggcgcccgatccgaggatgatcgcgatgcccagccaggtgagaccatccgggaactcggaaaagaccaggaatccggccgctgttgcgccgacgatttcgagatactggaacggtgccagtgtcgtcacctcggcattgcggaacgcctcggcgatcaacacgaagctggcggccgcgaaggcgccgctaccaaggatcgtcccccagatccaggcgggacgatcgagtggcgccacgtcgatgatctcggtcgcgcccagaacgcccacgacggcactcagcccgagtgcggcatagatggtcgcgccacattgcaccgtcagccccgagcgtgtcctgcaggcgcggcgcaggatgatcatgttgagcgcgtaggccgtcgccgccaccagcggaagcagtgtcgccaggccgaactcggaaaagccgggccggatcacgatcagcgccccgacgaggccgatcgccacggccgcgtagcgacgtggtcctgcgacctcgccgagcagagggccggccagcaatgtcaagatcagcggctcgacaaagaagatcgcgatggcggtcgcgatcggcatcaccgcgaacgccgtcacgaggcaggacagtgtgatcatgataagcatgccggacagagcgatgatcggcgagaacatcgccccgtgcagacgccggcgcatcaggaacacgaccggcgcgaggcaaagcccctgcgcaagcaaacgccacatggtcacttcgacgggaccgaggacgccagtcagaaccttggcgaaggtgtcgctgaccgggagaagcagcatggcggcgaccatggagatcatgccgatatgcgccgtcagcccggcgggtgcagcaacacggttcacagtcagagcgtgggtcatgacgtcacctcacaacgttggcccctgcagtgcgatacaggggggcacgtccgggcgttcaggacggggatcaggaaatgaagaggttggtgccgacgtgacgccatcacatgggcaacaagggcgggttagtggagccggctgcgtctgtcaacgtgttctgccggaccacgtctgcaaagggcctccgggctaccgctttcagcaagcaggatgaatgcctgtagactgaccttcgagggaatgctgacctgcctgaacggctattcagagcaacttgtccaagtgccgatcaaggcgggtcatcgggttgctttccaccgcacgcggggtcacgggttcctccgcccctttggacttcggcgtcggacggcggtttaggtaatcgctgagcgcgtccatgaacgagatcgcatccgcttcggaccagccataggggtcgaaccggctcagtgacagatgcggcaccagcttgaggctacgcagggtctgatcttgcgttactgcggccgtcatcgaccaatcgggaaaccagcggtcgtcgagcttgcgcaccaacatgagcttgatatcggtgtgccgcggatcgttagagatacgctcgaatacctccctgatttccgttgcttcgccttcgatccactgcaggaacgtgtggttgtcgtagatcagcgcccccgtgagtccggccttcgcattgttgcgccgcgaggccgtgagtatctgctcggtctgttcaaaggaaaaatcaaccggacgggagcaataggcgagtgcaacgatttctgtcattctgaacacctctcccaagtgagtgaccgtcacgtcacggtgtgtcggcggggcggccgccatcgctgattacgatctgcgagtagcatgccacgcttccgccttccagcgaactcgaccatgcgaaagtgtcgtggcgcgggcagaatgttttgcggggctttctgttgtcgcgtcgatcttgtgatagacatggtgagccaacgattcagtctccggcgcgaggaatggctgcaaaccggtatatattgagcctgatcggcggatcccttggcgcagtgcgaagtcccatgagtgcatctctatgcgtgcgcctggtcccggcaaatccagccattcgcaatacgttcgtttttcctgggtcacggacgcgccgatgacctatgactcgtcttctggctcagtcggagagcttaaccgtcttccacttcgtcggatttactggctatcactgcctcataatgcccctccaactcggcagccagatctcgcaactgcatcccaagcccgatgctgagggcatgcatcgcagtcagtgaaggttgtcgccgcgctgtctcgagcagtgagacgaagcgcgctgagacgtcagcacgggcggcgagctcttcctgtgtcaagcccgcacgctcacgttccgttgacagcgttgtggcaaaggcggccaccaaatgttcgttccgtcgctccatgcggatagccatcccgcatgggttgacaagccaccacgaacagttgttctagttgcggtgcatgaatgagataaacacatcaaccaagacgagcagataatcggaaatgatggcagcgacggggatgttccagccctgctgctccttccctccgagacaaaacacatttccagacaacggcgtcgaccaagcctggcacatgtgccgggaagggcgcgcgaaatcgacccaggtgaccaatgagctattcaaccgtgacgataggaacccttctctccgacgtgaaccgacgctacttcctgccagcgatccaacgcccatatgtctggaattcggaccaggtggtcatgctgatcgactcgctcatgaaggggtatccgatcagctcgttcatgttctggtccgtcgacgagcagatcaagcacgagttgaaaatctacaagttcatcgacaactggcagccgggaatgcagaatccgcctgcctccgccgatggccgcgatatcacgctggtgcttgatgggcagcaacgcatgacatcgctgcaggtggcgctgcgtggcaccttcgcggaaaaggtaaaatacaagcggcgctcgaacccggatgcctggacccagaagacgctctaccttgatctcttgaatgacccggcctcgcgtgacgagcatgaagagggcgatctggggataagctatggtcttcggtttcacgcacgtcccccgcgcaatgactaccggcattactggttccggctgggcaacatcctcaactacgagacgcagtcggacctggaaatgctgatcgaagagaccctctcggggctgcatcacggagttacgccctatcagcgcgatctcgcagctcggacgctacgccgccttcaccaggtcatatgggtcgaggaggcgataaactattacaccgaaaccagctcttcggttgatcgggtgctggatattttcgtgcgcgccaatgacggtggggtcaagctgtccaaatccgatctcatgatgtccatgattacctcgaaatgggagagcggttcggcccgcgatgaggtgttcggctttgtggatcacatcaacaaggggcttggccaacacaacgcgatcaacaaggattttgtcctgaaatcgtgcttggtgctgtgcgatttcgacgtcaaatacaacgtgtcgaattttacgtcggaggcggtcgcggatatcgagcgcaactggccagcgataaaggatgcgatcgagcgcaccttccgcttcctaaatggactgggtatatcgcaggagaacctgacttcgcttaacgccgttctgccgattgcctggtatatgttccaagcgccgggggtgacgttgcgtggatcctcgatcttcgaccgccacaacgcaagggcgattcagcgctggctgttgaacagccttctcatgggggtcttcgccggcacgtctgatcgcacgatctcggttgcacgcgtcactctgaaagaagcgcaacaacatggccgggactttcccgagaggcaactctaccatgccctggccatcggtggacggcagacacgtctcgacgagagagcaatcgaagaactgcttgagctcaagtatggaaaagcaaagacatttctcgccctgtcgcttctctatgacgatctcgactggggcggcacggcctatcacattgaccatatcattcctcaggcgcaagccacccgccgcgtccttatgggaatgaacttgcctgagcatcgaattcaggagatcacagcagtcaaggatcgcttgggcaaccttcaattgcttcctggccatgagaatctggagaaaggagatattccatttgacgcttggattaccagtcgcagtgatacctatagggagcggcacatgatcagttacaagccggatctctggactgcgcggcagttgcctgagttcgtcgcggatagggaacgacttattcgcgaacgcttggcaaaactggcgacgagcgcgctggcggcatgacccgtgaagagctgagacgcgcctgcctgatgcgactggacgaatgcgcgatggagcatccgttggggcatcagggtaacaaggtggcgcgatatgtcatgcgttccaagacgggaaacgccgcggaactgatgttcgaaaaggggcctggttcgccgccgaacctgtgggtcttggagcagcgcgtcgccgatttgctcgaacagccggggctggagtttcggcattccccggcatcgacgctgtttgcttcaagggcatcgaacggaacaccgcgctacggtcgtcattcagcgctcaagcccatgaaacagctcgcacatgcggatttgatctgtttccggatcaaaacgctcggcgagctggatcggatccttgaagccctggcaagataaagtccgcaggagtcgatttcttccatcctctcgtgccgtgacgattggttggacgagccattggcaatgcttgatggacgacgatgtcgtatggcgtagatcgacaacacggtgacgtcgcggatttgccattagttttgtggcttcgcctgcgccgggcgaggaatggctgcaaaccggtatactgcttgatcgccgaatcccatggcacggtgcgatgtcctagaaggggcgagtatctgtgatggggatgcgttctggcgccgcacagctactgcgatcggaagctcccatattcgtggccagatggtcggcgccaagcaaagcctgcgaacggaaccaccaggagtttatagccagggtagtctcaacaacctgttccggcggccctacgcgcggattgagttcatggaaaagcatcagccaagaaggagcaactatttcatcattgtctcttcgtttggttgttcatggatggtgcgaattcaggacccaatcaatacaacagttccggtctgatagagcaataaaaggaaaggcgggccgtagcccgcctttcgatttggtgcaatcgagtgcttgttaacggctcgaccacgaattctgaatgacaactgtgtatcatgattggaacgcgtctgcaattatcatcttgcggttgcgtagaggatgacacatcgttgccgcattgttcgcgggctgatgggagagttcatgcgtttaggtctcgatataggcacaaactccattggctggtggctctatgcgactgatggcgagaacatcaccgaagtaattgacggcggcgtgcgcatcttttcggacgggcgtgatcccaaatccaaagcttcgcttgccgtcgaacgtcgcgcagcccgtgcaatgcgtcggaggcgtgatcgctatgtgcgccgccgcgcgtcgctaatgcgaaagctcgctgattccggcttgatgcctgccgaccccgctcaagccaaggccttggagttgcttgacccatatgctcttcgcgcgacagctctcgacgatgccttacccctgcatcaactcggccgcgctctctttcacgtgaaccagcggcgtggctttaaatccaaccgaaaggctgatcggggtgacaacgaaagtggcacaatcaaggatgcgacccaaagacttgacttagaaatggcgctaaagggtgcccggagctacggtgagttccttcacatgcgccgtatgaccgcccccgatccgcggcgggagccatcagttcgcactcggctcaccgtggcccagcgtggcgggccggatgccaaggaggaggctggctatgatttctatcctgatcgccgccatcttgaagacgaattcacgcagatctgggaggtccagcgccaccaccatcccgatgtgctcacagacgacttgcgcgccgcactctacgagacgatcttctaccagcgccctttaaaggaaccagaggtcggcctttgtcttttttcggggtatggagatgtttcttcggatgaacggcgcctccccaaggcccatccgctcgctcagcgccgagtgctttacgagacggttaacagcctacgcattacggccgatggccggcaaagccgtcctctggtgctggaggagcgcgacgccatcatccatgcgctagacaacaagaaggccacgaaaacactggcctcaatgaggctctcccttgatgcgatcggaaaagtcatcaaacttgcaccgggggaaaaattcacgttggaaactgccaaccgagactcaatcgcttgtgatcctgtccgctctagtctgcgccacgacgaccgctttggtccgacttggtcaatcctcgatgcgcaagctcagtggcaagtgatttctcgcattcgcgcggtccaaagcgatgcagacttcgcagagctgatcgattggctgatgcagacctacgggctagaccgagatcacgccgtggccaccgccaacgctccactacccgaaggatacggacgcattggcgaaactgctacgcgccgcatccttgatgctctcgaatctgatgtcctgacctacagcgaggcagtcacagcctgcggctggcatcattccgaccaccgcacgggggaagtgttggaacaactgccctactacggcgaaatccttgaacgtcacgtaatcccgggctcgttcgaccattcaaggcacgaccccgtgaagcaagccgccgaatattatggccgtataaccaatcccacggtgcatatagggctgaaccagctgcggcgcctagtgaacctgatcatcaccgtatatggcaagccagaccaaattgtcgttgaactggcgcgcgaattgaaacagtccgaacaacagaaggcagagatcaaccgcaagaaccgcgaaaaccgtgccgccgccatgcggcgtagcgcccagctagcagaatgtggcaagcctgatactggcgccaaccggatgctcctgcgcctctatgaagacctcggccccgctatcggcccacgcaagtgcccatataccggtaagccgatcacagccaccatggttctcaatggcgaatgcgacgtcgaccatattcttccctattcccgcacgcttgacgacagcttcgccaaccgcacgatctgcctgcgcgaagccaatcgcgagaaggggaacaagacaccatgggaagcatggggtgacacgccacaatgggaggcgatcagtgcgaacctcaacagccttcccggcaacaagaaatggcgttttgcccctgacgcgatggaacggtttgagggagaaaacagttttctcgatcgcgccttagtcgatacgaaatacttgtcgcgcctcgcgcgcacatatctcgatgcgctttatactaggggcgggcatgtctgggttgttcctggtcggcttaccgaaatgctgcgccgtcactggggtctcaactctctcctttctgacaaggagggcgcaagtaaagccaagaaccgcactgatcaccgccaccacgccatcgacgccgccgtagtggcggccacaagtcgcagtctgatcaaacagatcgccgactctgccaagcacgacgaacaagacggaaaatccgccgaagatattgcccgctccattcctcatccgtgggaggatttccgaaatgatattagtgggcaacttgaaagaatcatagtctcccaccgcgccgatcatggctgcattgatccggcatcccgcaggcagggccgtgacaccaccacgggccagcttcacaacgacaccgcctatggcatcgttgatgagcaaactgtcgtcagccgctcacctcttcttgcgctcaaacccggcgatatagagattacgaccaagggaaagaatatccgcgattcctatctccagagcaaactcgcgcttgtcaccaagggcaaagatggcaaggccttcgaggaagccttacgcaatttcgccgccagtgacgacaaataccgaggcatacgtcacgtgcgcctgatcgaaagcctccaatcctcggcccgggtcgagattgatggtccgaacggcaagccgatgaaggcctacaagggcgatagcaaccattgttacgaaatctggcgcctgccggacggaaagaccaaggcgcaggtcaccacaacctttgaggcccatgccggcagcgctcgccgcccccacccggccgccaaacgccttctgcgcttgttcaagcgcgacatggtggcaatcgagcgcgagggtgagaccgtgatttgctacgtgcagaagttcaaccaagccggaatcttgtttctcgcacctcacacagaaagcaacggcgacgcgcgcgaccgaacagcaggtgatccgttttcgctattcagaatgtccatcaacacacttgtgaaagcccatatccgccgcgtctacgtcgatgaaatgggtcgtctacgcgatcccggtcccgtcgcctgaacctcaggattcgcacgaatcggaaaaatgtgtcagtctcccaagggtttgggagagcggcgcgtggatcagatcattgacatcgccaccgaaggtcggcatctatcgcgggatcggggctttctgaaggtttccgagaacggaacggaaatcggtcgcacgccgctcgatcagatcgccggcgtcattgtccacgctcatggcaccacctggtcctcctcgcttctggtcgaattggctgagcgtggcgcggcagttgttctctgtggtgccaatcacgcgccgcgttccgtgctcttgcctctcgaaggccatcatgcgcaaggtggtcgcctgcgcgctcaatggcaggctaaacagccactgatcaaacaggcatggaaacaggtcattcgcacaaaggttgcgatgcaggcgtcagccctcgctgcaatgggcgaatccgatgcgcccctgcgcatgatgcttcgccggatcacctccggtgacggcaccaatatcgaggcccaggccgcgcgttattattggcctcgcatgatgggcgagggatttcgcagagacacagacgccgaaggtgtcaattctctgctgaactatggctacactgtcctgcgcgcggccactgcccgtgctgtggtcgcttccgggctgcacccttcaataggcttgcatcactccaaccgcggcaacgccttcgccctggctgacgatctgatggagccttaccgcgcccttgtagattgtgccgcgcgccaccttgtcacctataacagtcctcaagtcgatctcgccgcgaaacaggcgcttgccaggctaatcgccgcggatttgcctctgggcgatggccttacgcctgtttccgtttctctcaccaaactggcaacgtcactggggcagagcttcgagtctggcaaacttgccctcgcattgccgcgcccgcctgacggcctgatattcaggggactcggccgatgacacagcacccggaaatgctttcaggataccgtctcatgtggatacttgtaatgttcgatcttccgaccgacaccaaacctcagcgcaaggcggcaacgcgtttccgaagtttcctgctcgacgaaggcttcgaacgcagccagttttccgtctatgcccggttcgtaaatggcaaagaggcctttcaggcgcgagtggcccgaatcgaaaggaagttacccgagtccggggacatccagatccttaacttcactgaccggcagtatcgtgatattgtgcatttctctgatcagggtcgccgtgaggcccgcaagaatccgcagcaactggtgatgttttgagcgattcgtgcttgttatacgcacccgatagccgggaatatctctgcannnnnnnnnnnnnnnnnnnnnnnnnnnnnnnnnnnnnnnnnnnnnnnnnnnnnnnnnnnnnnnnnnnnnnnnnnnnnnnnnnnnnnnnnnnnnnnnnnnnnnnnnnnnnnnnnnnnnnnnnnnnnnnnnnnnnnnnnnnnnnnnnnnnnnnnnnnnnnnnnnnnnnnnnnnnnnnnnnnnnnnnnnnnnnnnnnnnnnnnnnnnnnnnnnnnnnnnnnnnnnnnnnnnnnnnnnnnnnnnnnnnnnnnnnnnnnnnnnnnnnnnnnnnnnnnnnnnnnnnnnnnnnnnnnnnnnnnnnnnnnnnnnnnnnnnnnnnnnnnnnnnnnnnnnnnnnnnnnnnnnnnnnnnnnnnnnnnnnnnnnnnnnnnnnnnnnnnnnnnnnnnnnnnnnnnnnnnnnnnnnnnnnnnnnnnnnnnnnnnnnnnnnnnnnnnnnnnnnnnnnnnnnnnnnnnnnnnnnnnnnnnnnnnnnnnnnnnnnnnnnnnnnnnnnnnnnnnnnnnnnnnnnnnnnnnnnnnnnnnnnnnnnnnnnnnnnnnnnnnnnnnnnnnnnnnnnnnnnnnnnnnnnnnnnnnnnnnnnnnnnnnnnnnnnnnnnnnnnnnnnnnnnnnnnnnnnnnnnnnnnnnnnnnnnnnnnnnnnnnnnnnnnnnnnnnnnnnnnnnnnnnnnnnnnnnnnnnnnnnnnnnnnnnnnnnnnnnnnnnnnnnnnnnnnnnnnnnnnnnnnnnnnnnnnnnnnnnnnnnnnnnnnnnnnnnnnnnnnnnnnnnnnnnnnnnnnnnnnnnnnnnnnnnnnnnnnnnnnnnnnnnnnnnnnnnnnnnnnnnnnnnnnnnnnnnnnnnnnnnnnnnnnnnnnnnnnnnnnnnnnnnnnnnnnnnnnnnnnnnnnnnnnnnnnnnnnnnnnnnnnnnnnnnnnnnnnnnnnnnnnnnnnnnnnnnnnnnnnnnnnnnnnnnnnnnnnnnnnnnnnnnnnnnnnnnnnnnnnnnnnnnnnnnnnnnnnnnnnnnnnnnnnnnnnnnnnnnnnnnnnnnnnnnnnnnnnnnnnnnnnnnnnnnnnnnnnnnnnnnnnnnnnnnnnnnnnnnnnnnnnnnnnnnnnnnnnnnnnnnnatgccagtgtagcaattcagaattcgaggtccaagtgcttgaggctcctctgcagtagccaacgtaatgcggtggtgtgaaggattagccattcttctcgcgccccatgacgaaccccgcccagtcctccatcatcgctcgccgcttctcgatcatgtcgctgcgcctgtaagcccgctcgacgtcgctgccaacattgtgcgctagggcgatctcggcggtttcacgtgggtaactcgtgcgctcggcggcccagtcccggaacgtggagcgcagaccatgcggcacggccgggcggcgcgactgtggatcgagaaagccgggacggccctctttcacctcggcagcgtgtatcctgcgcatcacggccgagatggtcatgtcggacatcggcccgtccttgggcgaggggaagacatatgggcagcccatgtgcctgggaagcttcttgagcaggtccaccgccgccctggaaagcgggacacggtgttcccggcgagagcgaagtcacatcgcggagcaaaacccaaattgatcgcggcactgggtgaaatcgggcagtgaccggaatctgaggaattgcagaagcagattgacttgctgtcgtgagtgtgacataagcggtcacggtcacaaaggagtttccaaatggcaatgacacctgcagagcgcaaaaaggcgcaaagagagcgagagcgtgaggcaagccttgtcgcgccggaaagcaccaagccttacctcaagaggcttttcagtgaggcctgggaagagagcgcgcagtcttctgactttgcgttaccattggagttggcgggcattgagccgcctacatttgaagatgagcgcaaccccgaagaggtatctagggataacgaggcaacagggatcggctcggagggctacgaggacgtcttcgttggctacgatggcgccattggccgtgctgaggtcacgatcggcagcctactggacgcggcgcaagagcttgctggtatcgttaaccgctataaacgcgaagagatcaaagcgcggttggctgagctggaaaactcagaaacgatcgaccgggcgacgatgatcaatgaggccgtcaagctcaacaagatattggacctgctggataagcgggaccgcagagatcttccccggtggagggtgacgggcgtgtaacgctcggtaatcgcggcgtggccccagtcgtccaaacctaaaccacgccgctcaatgcaacgtctcgatcaaaggagagacatcaatgactatagactacaaactcctacatctgcacgcaactgccgatgatcgttacaaaagcaatagggcacaggcgttcgcagaatacatgtcgcctccatccatcgacagcatggaagacctccttgacgtcatgtccgattgcggtcttcccgtagtaaaatccgcagaggagtttctcgaggctgaggacgcagaagacgagatggaaacccttatgcagcagcttgagtgctgggcgattctgatgcaagccaagctaaggggtttccgggcgttgcaagaagaaggtttcgaagcgatcaaagccgaggc

SEQ ID NO: 3691 - DNA, 16546 bp, synthetic construct
  source 1..16546: mol_type = other DNA
  misc_feature 1..16546: note = Synthetic
tttcagggaagtgcttgaatctcatcaacaccggccatccgacacattttccagtgaatccagtaatgaaattgaactgcttcccagcatatcttgctacgtccgataatgcaaacttattggacatagtgagacgccacaaggtggggcggttaatgctgtatatgctggagttaagcgccgttgtgggatagtgtcacggcatgacctttcagcccgccaccgtctctaacgacctgaccacgctacccaagctgccggcctgggtcacctccggacgtgcggaaaccttcgagtctgtggcttttcggtccggagcggccctgacggtgctggatgctctggtttccgatccggcccaaggtgtgccccttaaactgcttgccaaccagcttgcattacacgcggccacggcgacgtctaagctcgaaggacgggtggcccgagaggccgatatccgcgactctttccatctgaccccgcccggagaggcacgcggcccagatggagacctgctggtgttctggcgggacacgacgcagttacgattgagcgtgagggattggcgagtgggcttagagggcctcgttggtcggcaccttgcggctgacatgcaaggatggctcgcagttggctccaagcgcgcaaaatctaacgggccattggcaggatgcgttgctgtgatgcgggcagtcctcgaggcagatgaccgggcggaacggattgcttgtttactgtccgatatcgccttggcacgcgtgttaaactggccggtgctcctaccgatttcggcacaaaatctcaccaaagccatgttgcgcgatttggtcgcggacgggcagggggcggacttgaaagttcaggcgggccttttgatttccatcgaagacacgatccgtttggcgggcgatctcgcatcgaaggcagtagcgttgcgggccgtcgcgccgaagctccgggccaagggttcggaggcggccgtcgcgctgttcctgtctgaagatgcaatcggtccttcaatgatgctgtcaccgacaatccagggtaccacgattccgatgaccgatcgtgcagcgcgccggttttgtgaccggctcgtcgcactgggcgtcgcgcgggaactcactgggcggccgaccttccgactctatgggattgtgcgatgacccgctccgccatgacctccgatgccaaaagaaagaattcaaaaccgaaggaggccggacgcgaaggcgtctttgatcgagagctggaagacctgccgcaagagctgcggtggcggggatggatgggacggatcgaggcgacgttgttcgccagtgcctcgccggttgggcgtgaggacctggcacgtgtggtggggcaggaggcctcggtcgagatgctcattgaggatattcaggcggagcttgtggggcgaccatatgaattggcggagaccgccggtggttggatgtttcggacaaagacgcagtttgccgaggcgatcaaggctgcgactgatcttggggatcagcccttggccttcaccgagatggaaatgggtgtactctgcgccattgcgtaccaccagccgattgatcgggcgggactgaaggacatttttggcaaagatgtcagccgcgacctgctggcgcggctgcggtttaaggatctgattgcgagcgggccgagggcaccgcgcgccggtgccccgcatacctttgtgacgacagagatgtttctgacggcgttcgatttacagacattgcgggatttgcctgaactggatttggcgctggcagacacagatgaacagactcgaacggtacagatctgaggctcttcgctttcaattggtcgggctttgacttccaatcagtcggagttggaagcagactttacgtgtgtttgcacctttttgaggtataggattgacttctatagctcaaaaatggtcaatatacgagttatagaaagggtctctataactcatggcatggaactggcagatatccggttggccggaatttcggtatgacgcggcagcattggcaccgcttgagcagcgtttcttgctgtcgttgggtgaaattctgggtgcggttcaccatgtcagtccgtccgagcgcgatcaattgcgcatcgacttgctaagcgatgaagccatgaagaccagcgccatcgaaggcgagatgctggatcgccaaagcgtgcagtcttcgctgcgacgccagcttggattgtcgcctgacagctatccaaccaagcccaaggaacagggcgttgccgagatgatggtcgatgtctattcgacctatgctgagccacttacgcatgagaccctgttccgatggcatagcatgctgttgtcccatgatcggcggttggaaagcgtcggggcttaccgccagcatgaagacgccatgcagatcgtatcgggtcgcatcgatcggccggtcgtgcattttgaggcaccgccctcttcgcaagtagcaggcgaaatggatcggtatgtggattggttcagcagaacggtgccgaatgcgaaagaacccttgcccgctttgacgcgcgctggcctcagccatctctacttcgaaagcatccatccttttgaagacggcaacggtcgtttggggcgggccctcgcagaaaagtctctagcgcaaaacatgggccaacccagcctgatcgcgctcgcctactcgatagaacgggagcggaaagcatattacgatcagcttgagcggcaccagcagacgttggatgtgacgccgtggttggaatggttcgcggagactgttctgaccgcacaacaggtcaccctggatcgggtcgggtttttcatcgcgaaggcgcgtttttatgaccagcaccgcgatcaattgaacgtccggcaggccaaggcgatcgaacgcatgttccgtgagggaccagacgggttcaaaggtggcttgagtgccgagaactacatttcgattactggcacgtcacgggccacggcaacacgggatttgcaagacctcgtcgagatgagcgctctgagtcggtccggcgaacgccgctacacgcgctattggttaaatctaaaaaggccctgaaataggaagcgcaggccgtagcctgcgctccaatgtggtgcaatcgaatgcttgttaacagctcgacgcggattttgaacaatgcaatgttccggcctcacgacctcgttgtcaagcagcaactagcaaggtttggaagaccagctaaacacaaacagaattggtgtggacccaatcttttccccgagttatgctttggttatgtcaattaacccttagcaaggttttacacttaaggggtcaaattatgcgcttgggtcttgacatcggcacgaactcaattggctggtggctttaccaaacggacgacggcacgatcacggatgtgcttgatgggggtgtgcggatattctcggatgggcgcgatccgcaatccaaggaatcgttggcggtggatcgtcgcgttgcccgcgcgcagcgccgccgacgggacaggtatctgcgccgtaaagcggcgctgatgaagcggatggccggggcagggttaatgccgaccgatcaggcgcacgccaaaaagcttgaatccctcgacccatacgcactccgcgctgaagggttggactgcgagttgccattgacccatctggggcgtgcattgttccacctgaaccaacggcgagggttcaaatcgaaccgaaagacggatcggggcgacaatgaaagcggtaagattaaggatgcaaccgcgcggcttgattgggcgatgcgcgatgccaaggcgcggacttatggcgagtttctgcatacgcgccagcaaaaggcagatgatccaaaacgtatgccgacggtgcgcacccgcttgactgtggcgcggcgtgacaatgccgagaaggaggaggcggggtatgatttttatccggatcgccgccacctgtccgaagaattcgacgcgctttgggcggcgcaggcagactatcatgaagcgctgagcgatgacctgcgcgatcagatcaaaacgatcatctttcatcagcggcctttgaaaacgcccgaggttggcctgtgcttgtttacggacgaacggcgcattccatccgcccacccgctgaaccagcgacgtattttgttggaaacggtcaatgcgttgcgcatcgtcgcacggggtgaggcggcacggcgtctgacgctggaagaacgcgatcagatcgttcatgcactggacaacaagaaccacactaaaaccctgtcgggcatggcgatgaaactcaaagcgctggggaaggtaattaggctgcgcagtgaccagactttcacgttggaaaccgccaaccgtgatgcgattgcctgtgatctcgttcgcgcgagcctgtcgcatccggaccggatgggtggcgtttggacgacgctagatgaaggtgcgcagtgggaggtggttcaacgtattcgtgcggttcaaagcgacagtgaatttgacgcgcttgttgtatggctggaacaaaatcacgggttggacaatgcccatgcacaggccacggccaacgcacccctgcccgaagggtatgggcggatggggttgatggcgacgcgccgcattctagcggcgctccagtcggatgtgatgccctacagcgatgccgttgcggcctgtggctggtctcattctggtgggccaacgggggaggtgttggaaaagctgccctattacggtaaaatcctcgatcggcatgtaattcccggcacctatgacgaaaacaacgaagacgtgaaacgctacgggcgcatcacaaaccccaccgtgcatatcgggctgaaccagatcaggcggttggtgaaccggatcatctgtattcatggcaagccggatgaaatcgttgtcgaactggcgcgggacttgaaaaactccgaagatcaaaaacgcgaaatccagaagatcataaagaaaaacaccgacgccgcgattaaacgcggggaaaaactgatcaatgagttgggtcagaaggatacgggcgcgaaccgtttggttctgcgcctttgggaggatctggggcatgacgtgatgacccgcaactgcccctattctggaaaacggatcagtgcaggcatgttgtttgacggatcgtgcgatgtcgatcacatcttgccctattcccgcacgctggatgatggcattgcgaacaagaccttgtgcttgaaagaagcgaaccgccagaaaagcaacaataccccgtgggaggtttggggcgagacagaacaatgggataccattgcggccaacctcaagaacctacctgacaataaggcgtggcgctttgcgtcagatgccatgcaacgttttgaaggggagaacgatttttccgcccgcgctcttaaggacacccaatacctatcgcgcattgcgcgcgcctatctggatgctctttatgatggcggggacggtaattcccacgtctgggtcgtgccgggccgtttgaccgaaatgttgcgccgccattggggactgaacgggttagaggcgctgacggatagcgatgaaaacaccgtcaaggccaagaaccggatggatcatcgacaccatgccattgatgccgccgttgtcgctgccacggatcgcggcctgatccagcggatcagcaagatcgccaaacgcgacgaacaggctggcgccgaagaggtcgcacgcagcgtttcaccgccatgggatgggtttcgcgatgatatcgcggcacagctgtcgcgcatcatcgtcagccaccgcgccgatcacgggcggatcgacagccaagcgaaacagcaaggcgaggatgcgactgcgggtcagctgcacatggacaccgcatacggcgtggttgatgcgggtcgcgtcgtgagccgtaaaccgctgctttcgcttagcgaaagcgatatcaagaaaatccgtgaccctgacttgcagcgccacttaacacgtgtgaccaaagggttggataaaaaggagtttgaacacgcgctgtccgatttcgctaatgcccgaaagctgcccgatcaatctgaaaacccctatttcgggatgcgtcgtgtgcggttgatagacgccctgcaagacagcgcgcgcgtgtccgtcagagacagggatggacatatttataaggcctataaagcgggcagtaaccattgctatgaggtctggcgcctccccgacgggaagatcaaaccgtgggcgatttccacgtttgaggcgcatcaaacaggcacggaatccaaaccgcatccggcggcaaaacggcttttaagggtgttcaaacgcgatatggttgccattgaacgggacggggaaacgctgatgtgctatgttcagaaaatggacattgcgaacgggctgtttctggtgccgcatacggaaggcaatgccgatgcacgcaaccgcgacaaggacgacagtttcaagtttatccagatgtctgcagtgtcgttgatcagggcaaagatccgccggattcacgtcgatgaaatgggccgattgcgcgatcagggaccgccccgttaggagaatccagaaaacttgtataaaatccaatgtgttaacgattcgcgtgggggcgtgagaggtgacacttggaccaaatcatcgagattgccatcgatgggcgacacctatcgcgtgaccgtggatttctgaaagtttcgcaagaccacgccgaggtcgggcgcacgccgcttgatcaaattgcgggtgtgatcgttcatgcccatggtacaacctggtcaacgtcattgttgactgaacttgcagatcgcggtgtgcctgtcgtgttgtgcgcggcaaaccacgcgccaagatccgtgttgatgccgctggaagggcaccatgcccaaggtgcgcggatgcggtcccaatggcaggcgaaaacctcccttgtcaaacaagcctggaaacaagtggtgatcgccaaggtattaatgcaggccgcagcccttgatgcggttggcgaaccggacgccccgttgaaaatgatggcgcgcaaggtcacatcgggtgacgccaccaacatcgaagcgcaggctgctgtcactgtaccctaattaatcagaatcacgactgaaattttcatttgttttcagcagtgggctgcacccttaattttcatattgtaccgttaattgccatactgtaccctttattagcatatggtcgattctgtggataagtatcggccacttgggtcaggagattggcgtggtcagcgagcgtcttgcaaaacatcgagcttcggtcctgcgtccgatcctggagcttgagaagaagggtgagccgatcagtgccgcgatcggagatgctgcttgggaactgggtctggcgaagagccatacctggtccctttaccgccgtttgcgcgagaacgatgggcgggccacggcgttggagctcggccgtcgcgggccgcagctaggatcgaaacggatcgcgcgagaagttgaacacctgatcgatgcgagcctgcggcgctattatctggtccgcgagcggcccagttttctgcgcatttggcgagagatccgttcggagtgcgaggcgaagggttttcagcccccgacgcggaagacggtaaaagctcggcttgatgcgatggatgagaaagagattgttcgaaagcgtcgtggtgccaaggaggcgaataagacctttgcggcacgtccgggccgacttgcggtcggaacgccattagacattgtacagatcgatcacacgatggctgacatcatcttggtcgattacatggatcggcgtccgcttgcgcgcccctatctgacggtggcaatcgatgttgcgacccggatcgttcttggggtttttgtcagctttgatgcgccgtcggtcttgtctatcgcgctctgcctcgatcactgcgtgcgccggaaatcaatccacgtcccagggacgttggaagagttggtctggccaacgtccggtatcccgaaggcaatccatgtcgacaatgcccaggaattccacagcgaggctttctcatcggcctgcgaagattggggcatcgccgtcgaataccgcccgcctggtgcaactcacttcggtggccacatcgaacgtttaattggaacggctatgggggccgttcatgttctgcccggaaccacgcagtcctccgccgccgagaagggcgactacgacagcgggaaacatgccgctctgactctagccgagttcgaggagtggcttgatctggagatttgtcgctaccacaacacgcgtcacgaagcccttgggcgaacgccgctggctgcctgggctgacctgggcggggacacagcgggtcggcaggtcatcgacgttgaagcctttcgcacaagcttcttgccatttgagtggcgccaggtcgggcgcaccgggatcactctctttggggtgcactactggagcgatgtcttcgcgtcgttggtcggacgcggtcagggcaaggttcaggtgaaatacgatccgagggacctgtcacaggtctgggttctcgtcgacgacggccgcatgatcccggcgcggtatcgggatctgagccacccgaggatatcgctttgggaaagccggcgggcgcggaaggaatggcaggatcggcatgttggccggattaatgagaaggccctcttccaggtgatcgatgcgcagcgtcggttggctgaggcggcgcgtgagaagacgaggaccgcccgtctggaaagcgagcgcgcgacgcggcttccaaagcaaaagccgcatcgtgatccatcccgggagatgtttgcgatcgataccggtaaccccgaccttcccacctatccgattgaagagtttgatgaccccagaagaaagaattgaccgcatccgcagcgatcattggatcgcattcgaccgtgcaacgattgttctcaaccgattgacggctttgatggaaatgccgcagcagagccggatgcctggcctaatggtctacggcagttccggcatcggtaaaacgatgatcgccaaacgcatggccagcaagtatccgacacagtacgatgcagaactgggcatcacgaaaacccccatcctgctggttcaggcgccgccggcgcccgacgagcgacggttctaccagcatatcctgtcgacgatcggagcgccgatgtgggggcggcataccgtgtccgaacttgaggttcgcgcgctcagccatcttcgggatatggacctcaaaatgctgatgatcgatgaggtgcacaatttgctggccgggagctaccgggagcagcgccggttcctgaacatgctgcggttcctggccaacgatctttgtgcctcgcttgtcgtgttcggtgtcaacgaagcccttgaggccgtccgcggtgacgaccaactcgcccgtcggttggacgaacactacctgccgctctgggaggatgacgttgagttctctcagctcattcagacgttgattgccgcgatggcactcgagcaacggtcgggcctgacagtcgcgtcgcttcggacgatcctgaaggtgacgggaggtgtgacgtcgcgcgtgttcatcatgatcaagtctttggccgttgaggcgatcgagacgggtgaggagcggatcaccgatgatgccgttcagtcctggcagccggtatgggcaaagcacgcctggagcactccacgccggccaatggcagagttcgggtaacaatcaaaccattgccacgccgtccgccgccgatacgcgatgagctgctctcgagctggatcaggcggctggcacaggccaatcattgttccgtcgaagacctctgcggatatctcggattggggcagggcaggatgccggagctaatgaacgatctcggacaggtgaactgggctcgcttttgctcggcggttcaacggacccgggatgagatcgaggccatggctcttccggacacgacccatcttcccgttcaatgcgtatcgcgtgacgacttccaggtttgcgaaagctgcacggatcagacgcccggactgatcctgcgccactggcgcttgggttggtcgctgacttgcggaaactgtggtcgaccccttttggcgaggcatccgtcagatggtctatcagacaggctacgtgtccgcgccgctcgcggcgcggcagtgctgcagactgtggttcaaaccaacgatcttgggcgcatacgccggatcagccgcaccttgtccgttctgaggatacttggtttggagtaccccgcttcgttcacgtctcggggccagttggagagatcagcagcacttgccgcagtcgatgtctgcacgacccgcccgttgctgggcgcagcaatcctattgtgcagaaacgacagggcattctgggagctccgccgtgtctttccccagcacagacgagtgattgcgcgggtgctaacgctgtcacacgatctcgagaggcgacttccgcgccaaccaaaagggaagcgtgtgccaaagcaagaaacgcgaacagcgaaccgaccggtcgcgtcggaaggtgccctacaggcagcccgccaggccatctctgagcttgggcccgatgcagctcgtcaagtgctcttggcgcgagcggatacaatctggaagcgcgaaagctgcgtcaggtactgacgcggagccctgtggatatattgtaattaagggtacaaaaaccgccgaaaaggcgtccaatccgcagaatctgattaattagggtacagtgacaccgaggctccctcattcataacgagagtctgcgggtctggttttcatattcttcggtttgggtttgagcaagcgcggcgggcgcggagccctcaaattgctcaagcgtccggcgcgcttctgcgggtgtattgttgccgagtgacgagtgcggcctgacgtcgttgtaatcatatcgccatagggccagcttgcgtcttgcatcgtccaggctgtcgaacatctcctcgtttaggagttcgtcgcgcaagctgccgttgaagctctcgatgaaggcgttctgctggggcttgccaggatcgatgtaatgccactcaacgccgttgcggttggcccattccaggatcgcgcgactggtgaactccgtcccgttatcactgacaatgctagccggtttgccatagagccggacaagtgcatccagttcccgtgccacccgtgcgcctgagatgctggtgtcagccatcaggcagaggttctcacgacagcaatcatcattcacagccaggatgcggaaccgccgcgatgcgccgaaagtatcggacaagaagtccaacgaccatcgttcacccagtcttagagcttctggcatcggtgtgcgtgacccacgagcccgtttgcgcccacgtcgcggcctgacgcccagtttctcctccgtatagaggcgatacagcttcttgtggttcatgatcattcccttgcgttccagcatcaccccgatccgccgatagccgaaccgggggcgtttgtgcgcaacggccttcatctcctcgcggatctcaggattgtcaggcggacgatcacgccgaacggttttggggtcgacaccgacaagacggcaggcccgacgttgcgagatgtcatgctctcgcatcgccttaagcgctgccgctcgccgctcagccggtgtcgttagttctttcccagcagatccttcagtacaacattgtccaacatggcatccgccagcaggcgtttgagtttggcgttctcgtcagtgaccgcgcgcagcttcgccgcatccgacacctccatgccgccatacttcgacttgaacttgtagaacgtcccctggctgagaccgtgcttgcggcacacctcagcagttggcatcccggcttcttgctctttgatcatcccgataatctgggcttctgtgaaacggctctttcgcatctgtttgctccttcgaaaggttgagcaaactctacattaaagtgcgggaggtttcggggggcaggtcaatattcttgccccggttttggattcgacattggcaagaaatccttgacctttagatttttgggtctcttcgttgcaggcaagtccgtgactccgaaatcactatttgccttccgaagtagagcaagaaattggaaaatttcaccgatacttgcggatagtttgaacgctttcccgcatacttcgatggttatgacggttgtggaccggctctatgaagagggtaatgtctattgccatctattcgcgcaggcgggttttcaggtggagtgacgtgatgatcccaggcgaccacatgggtttcatatgaatacataattcttgccgactgttagcgcagcgattaatcgtattgggcctacgttcgctgagtggttgaccctcagggccgaaaaggcacacactgaaccatgcgtcatggattttcgtcagaaaatacccgcttggggtcttacgcgccacaaggccagaagagtgaacaaaagacatccgcaaccgccgacggcactgacaattcccaatgggcccggcgtaccatcggcaagccatccaactgtggcagcaccgatcataccgccgccatactggatggctccaacaatcgcggatgccccgcccgttcctgagacaattctcgaaagcgcgccggaaatcgcattggcgaggattagtccgttcatgctgatgaacaggaaattgaccataatcaatgcggtaagaccgccaagatcagttgtcgcaaccaccgcgaagcagagtccgatgagcgctgcggaaaagccgcctataagtaaaaccaaatcgctgtcccagatgcgaacgagaacagcattcaaaagattggctgccataagtccaagaatgaccgacgcgaatatcaacgcatacgtctgcggtaaaaggccataatagttgatataagcaaagggagcaccggcaatgaccgcaaaattcccaacataaaacaagccgattgcggctgagtaggacagtagcaccgggttttgaaaatgggccgcgtagcctttgaaatcatctagtggagtgccggtagaacgccgttccggtgaaaggctttcaggcagtcggagaactgccagaatggttgccaaaccgatggctgagagcgtccagaagattgcttgccagttgatgtacgccagaatttgggcaccggcaatcggacccaataagggtgcaaccgccatgacagtcatcaggatcgaaaggacacgcgcagcttgatcccgctcgtagatgtcccgaaccatcgcacgagcaagtgcaaccccggcgcttgcgcccatagcctgaatgatccgccaaaggataatggtagtgggtgttgttgacagggcgcatccggcagatccgaggataaaaacaagcaatccgatcaaaatcggcctgcgtcggccaaagcggtcgctgaccggaccccagaacagctggccgaagccaaatccgagcaggtaggtcgagacgacgaactcgagctcgccctccttggcaccgaggtctttggccattgccggaagcgcgggcaggaacaggtcagtagaaatcgaagcgaaggcgagcagggccccaagtgttgcgagaagtcgaagctcatcgcgcgggctctgattggccctggcaggtgtcataggccggagaaagccatgatatcgtcaggataccgtgccccttcgatcttgaaatcttgggagaggttgtcgatctcgttgaaatcttctgggctaaggagcacatcgacagcaccaaggttctcttcaaggcgcgacacagcgcgcgtgccgaacagcggcacgataaatggccgtttttctaagagccatgctagggcgatctgggcaggcgtcgctccaagcctctgcccgatgtcctttatgccattgaccaaaaccatgttctggacttgtgcctgttcagtgaagcggggggcgcggctacgtatatcggtgacttcaaactgcatcgaaggggtgaccttgccggtcagaaacccttttccaagcggactaaagggtatgaggccgatccctagttcttcgagaaggggcagaatttcgttttcaggctcgcgtgtccagagtgagtattcgctctgcagggccgtcactggcagaaccgcatgcgcacggcggatggagtctgcacccgcttcagagagcccgaagtggatggcttttccctcggctattagatctttgacagtgcctgcgacatcttccattggtacgtctgggtcaacccggtgttgatagagaaggtcgatacaatcgattccgagccggcgcagcgaaccttcaacagcgctgcgaatttgttctgggtggctgtttactcccccaagatgcacaccactggtttgatcgacgttccaaccgaattttgtggcaatctttatttcatcgtgtcttccggaaatggcctctccgactatctcttcgttgacccaaggaccgtagacctcggccgtatctatcagtgtgatgccacgatcaatcgcagcccgaaggacatcgacaaggcccgaacgatccttcagggtaccataccccattgcaccaatggaaagggccgatacttcaaaattagagtgtccgagtgtgcgtgtcttcattttcgcctcgttccttcggtttttgctgctttcagttatgcgctcgcatccgttctggctatcgccgattccggtaaggtcttcaccgggaagcgatcatgaagatgctttgaagcaaactgtgaaaggacctatcatgttaattgattggtgccttcgatagcaggaccgtcgggcctgctccatttgtgaaactgccaatcgtggcgaaacaattcctttcaacggcaagtatcgagagtgtgcggttgcatggcggaaaaatcggattggtgatcacagaaatgaaaatgggagactaacatgaaaatcgcaaaagcaggttccagtgcatccagttgggccccggcagaaaactttactgggcgcgtgcgtcgagatcctttagttgctccggagagccccggtcgggcggtcgcaggttgtgttacttttgaaccgggcgcgcggacagcttggcatacgcatccggcaggtcagatactcatcatcacagccggaaaaggatgggtccaacgcgaaggtggcccacgtgaagaggtaacgccaggagattcagtttggtttgatgcgaacgaaaaacactggcacggcgcgactgacaagacggcgatgacgcacattgcggtgaccgagtttattgaaggcgaagcggcggactggctcgagcatgtatctgatgccgactatgactataatggctgatctggcttttgctctgtcagatgagcactcatcgaaaatcaacgtggttttgggcagttagctgttcgtcatagacctttgaagacttgttcaggacctttgcagaattcgcaaaagtggtttgattttgaaggcctatagtcatcacaagacacatttggtgactcgccaagtgcatgagacgggtagggaggccctgcatcatgaaatcatcaagaataggaattgctcagcgcctgacgtgttcgtcaaatggcggtgttcacgcgcaatcaatgcgttgccgaatggaagtttagtctaatgggtagtgttgagcgggcacttctgacactgtcgaagctgcttatctggctttccgggttattcttgttttgcatgatgttacacgtcctaagcgacgtaatcatgaaaaccttcttcaattccccgatccccggaacatcagagtttgtcgctcactactacatggtcgctgcggtgtttctacccatgcctttcgtggaaatgcggaattcgggcattgcggttgatcttttttataacctgttcggccctgcgattcagcggatcatgctgctctgcgcttatctcgggcaactgacatttttctctttgttggcttatcagtccggtcttgatgcttggcatgcatgggaagtgcgtgaatacctgtccggccagattatcgtcacgatatggcccgcgtcgttttttctgccagtgggatttggtttgtcggctttggccagtgccctgcggtttgtgcaagtcatccatcgtccagattgggtcaccgtgactgaatacaagtctgcagaagaagtagaccgccgcgtaaaggatattggctaatggaacgcattgaaatcggtatacttggtatcgtcatagcactggtattgatggctttgcgtatgcaggtgggcgtagtgctgggtctggtggcttttgtcgggatttccgtcttgaccagtgtaagcgccgcttggggcattctcactgccatccccctgaacttcattgccgactggaacctgagtgcggtgccgatgttccttctgatgggctacattgcggcgcaggcaggactgaccaaaggcctttttcagagcgcccgtatcttcttggggcgggtaccggggggattggcatcagcgaccgtaatagcctcggcgctattcgcgtcagcgtcagggtccagcgtggcaacagcggctgcattttctcgaattgccgtcccag

SEQ ID NO: 3692 - DNA, 15997 bp, synthetic construct
  source 1..15997: mol_type = other DNA
  misc_feature 1..15997: note = Synthetic
gtatggtgacagcctgattgccgatctgggcgacgtggtcgagggctccatgggcatcgtgccatgggccgagggcgaaggcaccgacgcgttcaacgcgcttggcgaagccgccggcatcaatgtcgcctctgcctacacccgcgaaagctatgacgcggcggctttgatcgcgcttgccatggccaaaggtggcgaagcaacgaaagaagccgtggcggccaacgtgctcgacgttgcgaacgcgccgggtgagccgatcctgccgggcgagctggacaaagcgctcgaaattctcgccgccggtggggacattgactatgtcggcgcgaccaatgtggaactgatcggaccgggcgaagcggcgggcacctatcgctactacaccgtgactgacggtgcgttcgagacggtggacatccgctaaaacacggcgtaagccacgatatccggcccggggcgcacttgacgtcccgggctgactttcttatccggcccgcggcaaatgaggtcggaactgatacgggacacgaaacacatgatcgaagtgcgtgatctgcacatgcatttcggcggttttcgcgcggtggacggagcttcgctcagacttgagcaagggtccatcacggggctgatcggccccaatggcgcggggaaaacgtcgcttttcaactgtattgccggggtgctcacaccgacctccgggcaggtgcttttcaacggtgaggacatcaccggactgaaaccgcatgagctgtttcacaagggcatcctgcgcaccttccagatcgcacatgaattcggctcgatgacctgtcgcgagaacctgatgatggtacctgcggggcaatcgggggagacgctctggaacacatggttcgggcgcaaacgcatcgccgacgaggagcgcgcgctcagagccaaggccgatgaggtgctcgaattcctgacgatctcccatattgcggacctgaaagcgggcgaaatttccggcgggcagaagaaactccttgagcttggccgcaccatgatggtggacgccaagattgtgttcctcgacgaggtgggcgcgggggtgaaccgcacgctcttgtacaccatcggcgatgcgatcaagcggttgaacaccgagcgcggctatacattctgcatgatcgagcacgacatggagttcatcaaacagctctgcgaccccgtgatcgtcatggcgcagggtcaggtcatggccaccggcaccgccgaagagatcatgcagaacgaagcggtgatcgaggcctatctcggcacaggcgtgaagaacaagaagaccgagacggaggacgccgaatgaccttcctccatgccaatgaaatgcgcggcggctatggcaacggcgcggatattctccacggatgcacgctcacggtgcaaaagggcgagatcgcggtgatcgtcgggccgaacggtgccggcaaatcgaccgcgatgaaggcggtgttcggcatgctcaacctgcgcgaggggcatgtgaatctcgacggcgaggacatcacaggtctcagtccacaggagcgggtccgcaagggcatgggcttcgtgccccagacccataacatcttcccgacgatgagcgtgcgcgagaaccttgagatgggcgccttcattcgtgaagacgattacgaggagaccatcgaacaggtctacgaactgtttccggcagtctatgaaaaacgtcaccagaacgcgggcgaattgtccggcgggcaacggcaacaggtggccgtggggcgcgccctgatgaccaagccaaagcttctgatgctggatgagccgaccgcgggcgtgtcgcctatcgtgatggatgagttgttcgaccggatcatcgaggtcgccaagaccgggatttccatcctgatggtggaacagaacgcccgtcaggcgcttgagatcgcggacaagggctatgtgctcgtgcagggtgcgaatgcctacaccgatacgggcgcgaaccttctggccgaccccgaggtgcgacgcacctttctggggggctgattatgagtatttcccccaagaagaaggcccttgccgcgcttcttatcgccgccctgcccctgcccgccctcgcgttggagacttgttcggtcatcgtgcaaggcggcggtgcgccctggcggttttcccttgaagagggcgacggggtgagctgcacgcgctatctgcgtgaggaaggggctcacgatgccacctgtcttttcgagaccaccgccgaggcgccgaacacacaccgctatcaacacagcgacagcaagggcttttgggacctgcgcgatgacggtctgatgaccggctatgtcgatgtgatcaccgaagacccgacgccgggggtcgacatgctccccttcggcggcatctgtcaggaggttgtctgatggatattctcaacgcgctggtcgcgttcaccaatttcgtcgtggtcccggccacggcctatggcgcgcaattggcgcttggcgctttgggcgtcaccctgatctacggcgttttgcgcttttccaactttgcccatggcgagaccatgtccttcggggcgatggtcgtggtgctggtcaccgggctgttcaagagttggggcatctcgctcggcgtcctgcccacggcgcttctcgccctgcccttcggcatcctcgccacggcgcttctgcttctggcgaccgataaggtggtctacaagttctatcgcaaagttaaggccgcgccggtaatgctggtgatcgtctccaccggcgtcatgttcgtgatgaacgggctggtgcgcatggtcgtcggcaccgatgaccgccggttcgccgacggggcacgcttcgtgatcaatgcccgcgagttcaaggcctggtccggtctcgaagaaggcctcgcgatcaagacaacgcaggtgatcaccgtggtcgtggctttgatcaccgtggcggcgctgttctggtttctgaacaagacccgcaccggcaaatccatgcgtgcctattcggacaacgaggatctggcgctcctgtcggggatcaacccggaacgtgtggtgacgatcacatggattctggtcggggctttggcaaccatcgcgggggcactctacgggcttgataaatccttcaaacccttcatcttccaacagcttctcctgccggttttcgccgccgccatcgtcggtggcatcggcaatccgctgggcgctatcgcgggcggattcgtcattgccttctccgaagtcacgctcacctatgccttcaaaaaggtcgtgacctatctcgggcccgacagctggtcgcccgacgggttggtgcagcttctgtccaccgattacaaatacgccgtgtccttcgcgatcctgatcatcgtgctgatcttcaagccgaccggcctgttcaaggggcaaaacatatgacccatgccgccacacagacagggggcaagcccctgccccgcacaccgctttatttcgccgccatggctgccctcattctggccgtcggctttcttcagtcgtggaactcggcgctctccatcctcaacatggggctgatctcggctatcatggctttgggggtgaacctgcaatggggctatgccgggctctttaacaccggcgtcatgggctttgtcgcgcttggcgggctggccgtggtgctgacttccatgccgcccgtgcctgccgcctgggccgccggagggggccgtgtgatcctcgcgctcgcggtcggggtcattgccattgttgccgccgccctcgcctatccccgcctgccgaaaggccgcatccgggggctggtgattgcagcaatcctgatcgtcgggctctgggccttccgcaccctgttcgatccggcggtggcggccatcgaagccgtgaacccagcggtcagcggctatctcggcgggcttggccttccggtcattctggcctggcctgtgggtgcgcttctggccgcaggggctgcatggctcgtggcaaaaaccgcccttgggctgcgctcagattatctcgccattgcgacactcggaattgccgagatcatcgttgccatgatgaagaatgaggactggctgtcgcgcggcgtgaagaacgtcaacggcctgccgcgtccggtgccctatgagatcaacctgcaacaggcggaatggttcctgagcctgatgcacaggatcggcatggacccggtcaccggctcgtcggttttcgtcaagctgctctatgcggggttcttcctggccgtgatcgtcatcatcgtcacagcgatggaactggcgctcaaaagcccttggggccggatgatgcgcgcgatccgcgacaacgaggtggccgccgaagccatgggcaaggatgtcaccgggcgccacctgcaaatcttcgtgctgggcgccgcgatcatcggctttgccggcgcgatgatgaccacgctggacgggcaattgacgcccaccacctaccaaccgctgcgttacactttccttgtctgggtcatggtgatcgttggcggatcgggcaacaactggggcgcggttctgggcgggatgctgatctggtttttgtgggtcgaagtcgagccgatcggcgcgtggatcgtcgggctcctaacctccggcatggaggacggggcgctgaaatccggtctgatcgagcgggtggcttacatgcgctacctgaccatggggatcattcttctggtcgtgctccgcttttcgccccgagggcttctgcccgaaaaatagtaaagcgggcttctgcccgaaaagtaaaatgcgggcgcttgcccgaaaaataagcgtccgaacgcgaaaacctgcgatggggctttgctgaaatttcttttccgcatcgccccatccccacctatcatgtgacagtatctccggtttcacgggcgtgtttgccccaacatgaggtctcaacatgagagcaggactttgaaacttctcgttggaatctgtgccgccggccaatcgcgccgcatggggttcgacaagctttcgaccccaccttcgctgcactccccggacacgcttctgcgccgcgctgtttccgccgcccatggccaccccttcatcgtggccctgccctcggaaaaccatccatatcaccgtgcccgccgcgacctgctacggtcgcatgatccgtttcttgtggccggggatactgaggcggacctctccgacacgttcaaggcgctcgcccgttatgcgttggaacgagaagtcgacggactggcgatcctgatggccgatatgcccttcatcaccgcgagccatctggagacgctggtgaacctgttcgaaaccttcggcgaaagccgcatcgtgcgggcgcaatgtcagagcgggggcgaaggctatccggtgatctttcccgccatcatcctgccggagtttgaggacctgtcaggagacgaagggatgcaaagcctgctgcaacggcatggggtgaaacggatggagatgccctccgaggcaccttgtttgcatgtgaacactcccgaagactggcggcaaatgtaacacacctcacgcgacccacggggacaacgcatcggcatcaaagtgcccgaaacgaagaaaaccgcctcccccgggatgcacccgaggggggcggttacggaccccgcgccggaattccggcggcctcggccagcgtgagatcacccgagtgagatcaggaaaccagaagctccgcctcgtgtttgcgcaggatgcggcgcgcggcggagaaaccacctcgggtcgacacctcggccagctccgggaagagcgcgaagagttcttcgcgggcctcgtcaccaatgccggagagcgtgtaatcgccgggctggaagctttccgaccaggtgccgtccgacagaaccacctcatgacggtcgaacatcacgtggatataggtcaggccggaggcctcgatcacatccacaccttccatccgggtcaggtgtttggccgcaaccagaacctcgtgctcgtcaaagagcagcgcggccttttcgttcgacaccagcatccggtggttcggcgacaccatcatatcacgttccggcagaccggccccaagcgcgccctgacggatcagcaccggattcagttcggaacgcgccgagaggtcggcaccggagagggtcttcgtcccgatccagcggatttgctgaataccgttgtcgcgggtgatgacccggtcgccgatcttcagctcttccaccttcacctctcccttcggcgtcgcgatcagcgtgccgggggtaaagcaggggatgatttcctcgatattggtgtagttgatgttggcatgctcattggttgcggcgttgaagagttgaatctcgccatcgaacccgttgccgtcgctgtcggtgttctgcacatgatcggtgatcacccaaccatcgtccagaagcgcggtcaggtcgagcgtatcccaatcgacgccgccgtcgccaccatgcacggtggtgttgtagacgccagaggtcacgtcggtgaaagtgacgtagatcgtatcctgatcgtcgccaccgtcgagtacgtcattgtcgccgccgccgtagatcgtatcctcgtcttcgccgccatggaccgtgtcagtgcccgcgcccgcgtaaatcgtatcgtcgtcgatgccgccgtcgatgtaatcgtcgccatctccgccatagatcaggtcgtcatcgtcctgaccgtagatcgtgtcgttgccggcgccgccgtcgattacgtccttgccgttttcgacttcgtaatcgttttcgtcgtccgggacgttcaggctgtccgggtaggcgggatcgagaccgccataaatggtgtcgtcgccgtcaccaccgtcaatcgtatcggaaccttcgccaccgataatcgtgtcgtcaccagtgccgccgaggatcgtatcgtcgtcgaaaccgccgtcgatgtaatcgtcatccgcgccgccgtcgatatagtcggcatcgtcaccaccatagatggtgtcgttgcccgcaccgccgtagagcgtgtccttgtcattgtccggctcggcatcgtcggcgagatagggaccgtagccgcgatccggcgtaccatccgcgccgccgatgatcacatcgtcaccggcaccgcccttgataacgtcgtttccgtcgccaccatcgagatagtcgtcgccaccacgaccggagatggtgtcatcgccgcccatgccccagaattcgttggtataggtgtcttcttccgtggtgccctgatgatcgaaaccgatcagcgtgtcgtcatattcggagccgatcaccccgtcgataccgccttgaatcgtgtcattgtcggcatcgccgccggacagtgtgctcgtagagagattgacatatacggcttcatcagaacccgaatagtcgatattgtcctgacccgcgcccccttggaacgtatccgcaccgtcgccaccgataaaggtgtcgtcaccagcaccgccgtggagatagttggtgccagtgccacccaccagtgtatcgtctcccccctcgccgtagagggtgtcgttaccggcgccgccgtcgagatgatcgtcaccgccagcagtacttgcgtcctcaggctcctgaactgagactgtgacgacaacatctttgaaatcctggtcgccaagacctgcgatgtcttcgaaattataagttaccgaaccgtcatcattgtttgtgctctgagcattctcgctatcggagtaaaatgtgccttccgggctggtgattccgacatagacggtttcaccttcctcaagattgacagtgtatgtgttgccgattgaatcgtcatagcttttcgcaagaacaaaaaaccgctcagaaccatcttcggcaacagttttcagaaccagcatgccgtcgtaagccccggcctgactgtcgatggtgatcgtggcttgacgcccgctctcttccgtactttccccctgatcgccataaagcacgtcggcgcctatgccgccctgcaacgtatcatcaccttccccgccatagagggtgtcgttatcggcaccgcccagcagcgtgtcgtctcccccctcgccgtagagagtgtcgttaccggcgccgccgtcgagataatcgttgcccggcgcaatgggggtcacaacggcatcgtcaatcagatcaccgttcatcgaatagccggagttcacatcgcgggccgtcagggtgaaggtgatggaactctggccttcgaaagctgcagagaaccaggcgtcctgatcgctcgggctgttgggttccgtccccgatgccgtcaccgtaccatcggcattctcgataagcagggaactgtcgccgctgacaccgaaggcggtgaaggacgaagcatccaccgtgacaacttcgggatcaaggccgtcgttgcgcgtgctgtcgatgtcgttgaaagtcgcggtggagttgatcgaaatcggttcaccggtttccgcattgtagaattcaagacggaaggttgcagtcatgccaccctggctaacagaattgttgccgttcagcaggatttcagcgccggatttgtatgccagatcgacatcgagcgctggatcggaagtcgaaacaagaaccagccgggcattgacgacagtaccgtcttccagagtggtaacgttgctgtactcggcactgtcaccggcgtgcgcattattgctgccagatgcagtttcacttcctgtgatataattgctgtaggacagcaccagcgggtccgcgtcctgtgccgcatagggagagtcttccccgctgtcgccataaacgacatcgtcgccttcaccggccagaaccgtatcgtcacccccgccggcaataacgatatcgtcatcattaccgtctgcgttgtcgcccgcgtcgatcatgtcgccttctggatcgccagtgtaagcggtgtcgatatagtcgtttcccgatgtaccttcgacaatcccatcggtcgtgggagtctcagggttcggatcagccggatcgcagcgatcatcgtatacccgtttcgtcatcgtctctctccttgcgcaaccgctcaccgggaacgggcatcctcgtcacacacaggatgggatcgggcgcaccgtaaccatccaaaatcaaaagtccgcacacgcgaacaggccctgacgggccatccatgatgggaaagacacgaccagaaatccccgactccacggcgcagcaccatggtcatcggcgtttcatcacctcaagcagcagcagatcggagacccgacctattttccacatcggtcacgctgatcgacatccttcaccatcggacatctttacgcggccgcccccgtggcctttgtgccccccagttgggctctttctggatatgtcaaaaccatggtcaagcaacagggaaaatggcgaaaatgtgctcaaatatggcgttgggatggcgcaaatacctcagagcgatcagaatttaagcacatccccggaggacagccctcctacgcaatgaaaataattaccatttttatgaataagttaagaagaattcaccgaaacctcacagggtattttccagtgcaattgacctaaaggaaggcattacggacgatgacctgaacggactgcgcccaaatatgtcaaaaacaaggcactcatcaaccgggagaaccaatcacggacagaaatcccaatttgcgcaaaagcgggaacaatgcaaaacagcgcggcgaatcacatcacgcagaagtcagacagtgaccctgccggaaaatggtgaacgcaaggctttgtcaaagaacccggtcacatggagtcacatggagaagacatacgggggtagaaacaggccataattcaaaaacaaaacgcgccccgtaggacgcgttttaatgtggtgctacttcgagcttgttaacggctcgaccgcgaattctgaactggaaaaattattccacagccgccttttgaattcaagttgcaattgattgagttccgctgaaaactatccgtcattaacttttacacttttagggggtaagatgcgtcttggtctggatattggcacgaattcgattggctggtggctttatgaaaccgacggccagggcgcgtccgcgcgcatcattggcgtcattgacggtggcgttcggattttctccgacgggcgcgacccaaaatccaaagcctctcttgcggtagatcgtcgcgccgcacgggcgatgcggcggcgccgggatcgttatctgcgccgccgcgccaccttgatgaaagtgctggccaaatccggcctgatgccagccgaccccacagaggccaaagcactcgaattgctcgatccctacacgttgcgcgccaaggggctggacgaggcgctgccgctcacacacttcggtcgagcgctctttcatctcaatcaacggcgcgggttcaaatcgaaccgcaagacggaccggggcgacaatgaaagcggcaagatcaaggatgcgacacgtcggctggacgatgcgcttcatgacgccagagcgcggacctacggcgaattcctgcatatgcggcggcagcgtgccagtgacccgcgccatgtgccgacggtgcgcacccggctttcggtcgccgcacgtggcgggccggatgcgaaagaggaatcggggtacgatttctacccggatcgtcggcatcttgaggaagaatttcacgagctttgggaaacgcagtccgcttatcacccggatgttctgaccgacgatctgcgcgatctggtgttcgagaagattttctaccagcggcctttgaaggagccgaaagtgggactgtgcctcttcaccgccgaagagcgtttgccgaaagcccatcccctcacccagcgtcgtgtgctgtacgaaactgtcaatcaattgcgggtcacagcggacggccgggaaacgcggcctttgacgctggaagaacgcgatcggatcatccatgcgatcgacaacaagaaacccgccaaatcgctgagctccatgaaactctcgctcacagccttgggcaaagtgttgaagctgcgtgatggggagcggtttacccttgagaccggtgtgcgcgatgccatcgcctgcgaccccgtgcgctccgtgatgatccatcccgaggcttttggccccaactggtcgaaactcgactggcaggcgcagtgggaggtgatttcgcgcattcgcaaggtgcagagcgaagatgagtttgccgatctcgtgagctggctcatggagcgatatggtcttgatgcggagcacgcccaaaagaccgcgaacgcgcacctgccggaaggctatggccgcctcgggctgaccgcgacgcaacgcattctggatcggctcaaagccggtgtcgtgacctatgcggaggcggttgcggcctgtggctggcaccattcggatcagcgcacgggggaatgtctcgacaccctgccctattacggcgaagtgctcgaccgtcatgtcattcccggcacttacgacgagaaggacgacgagatcacccgctatggccggatcaccaatccgaccgtgcatatcgggttgaaccagttgcgtcggctggtgaacaagatcatcgaggtctacggcaaacccgatcagatcgtggtggaactggcgcgggaattgaagcaatcggatgctcagaaacgcgaggcgatgacgcgcatccgcaacaccacggcggatgcgatccgccggagtgagaccctgcgcgaacatggcgtgaaagacaccggccacaaccggatgctgctgcgcctgtttgaagaactcggtcctgcgataggtccgcgctgttgcccctatacgggcgaggtgattacggcgacgatggtgctcaacggagagtgtgacatcgaccatatcctgccctattcgcgcactttggatgacagtttcgctaaccgcacactctgcctgaaagaagccaatcgcgagaaacgcgaccagacgccttacgaggcctggggcgacaacgccggacgttgggcaaagatcgaggccaacctcaagaacctctcagacaataagaaatggcgcttcggccccgatgcgatggaacggttcgagggcgagagtgatttcctcgaccgcgctctggtcgacacgcaatacctctcgcgcatttcgcgcgcctatctcgacacgctctataccgaaggcggccatgtctgggtcgtgcccggtcgcatgaccgaaatgctgcggcggcactgggggctgaattcacttctgagcgacaaggaccgaggcgcggtgaaggcgaagaaccgcaccgaccatcgccaccacgcgattgacgccgccgtggtcgccgccaccgaccgcagcctgatcaaccggatcagcaaagccgcaggccttggcgagaaagccgcgcaatccgccgaactaatcgcgcgcgacacgcccgagccctgggagcattttcgctcggacattgccatccaactggagaaaatcgtcgtcagccaccgcgccgaccacggtcggatcgacatcgaagggcgaaaatccgggcgtgacagcacggcgggacagctccacaacgataccgcttacgggatcgtcgacgatatgaccgttgtcagtcgcacacctctcatgtcgttgaaaccctccgacatcgaagtcacgaccaagggaaagaacatccgcgatccgcaattgcaaaaagctctctccgtcgcgaccaaagataaggaaggaaaggcgttcgaggaggccttgcgccaattcgcagccaaggaaggcccctatcagggcatccgccgtgtgcgtcttgtcgaaaccttgcaacgctcggcccgggtggaggtcggacaaacggagaaaggcacaccgctcaaggcctataagggcgacagcaatcattgctatgagctgtggaagctacctgatggaaaggtcaaacctcaagtggtgacaacttttgaggcccatgccgggatcgagaaacgccctcaccctgccgccaaacggcttctgcgcatttttaaaaaggatatggtggtgctggagcgagatgggcaaacaatcattggctatgtgcaatccatgcatgtgagcaacggtctgtatattgcacctcatcaggaagccaacgccgatgcgcgcaatcgagacaagaatgatcagtttcgcttcattcaaattggagccagcccaatggtcaaagccaatctacgccgcatcctcgttgatgaaatcggccgcgttcgtgaccccggtccaccgaaagtttaagcgatctcgcgcgaatcacgaatttatgacatacttccaagggtgtggagtatgagtattggatcgtattattgatatttccagcgacgggcggcatttgtcacgggaacgtggctttctgaaagtgtccgaacaggggacggaagtcggtcgtatcccgcttgacgaaatcaccgcggtcattgtccatgcacatggcacgacctgttcggcctcactccttgcggaactggcggatcgtggcgcgcccgtggtcttttgcagccccaaccacgctccgcgttcggtcctcatgccactcgaagggcaccatgcccaaggcgcacgcctgcgggcacaatggcaggcgaaagcgccgttcatgaaacaagcctggaaacaggtgatcgtcgccaagatcaggatgcaggccgcagccttggacgcccatgcggcggcgcctgccccgctcgacatgatggccagacaggtcaccagcggcgacagcaccaatctcgaagctcaggccgcccgctattactggccccggatgttgggagaggatttccgccgggaccgtgacgcgccggatataaatgcacttctgaattatggctacaccgtcctgcgcgccgcgacggcccgtgccattgtcgccgccggtcttcatccgacaatcggtctgcatcattccaatcgcggcaatgccttcgccctcgccgacgatctcatggagccctttcgccctctggtcgattgtgccgtgcgtggcctcgctgagcgcaacggcacggaagtaaacagcgaggcaaaacaggctcttgcccgcctgatcgcactcgatctgcctttgggggacgggcaatcaccggtttccgtggcgctgggcaaactcgccacctctctgggtcagagtttcgagaccgggaaactgtcactcgccctgcccacgccgcccgatcctctcacactcgcggggcttggatcatgacggatcgccctgcccatctttcaggataccggatcatgtggatactcgtaatgttcgacctgcccactgacaccaaacctcagcgcaaagccgccacggagtttcgcaactttctgctcgatgaaggattcgagcgcagtcagttttccgtgtacgcgcgtttcgtcaacggcaaggacgcatttcagacccggatcaaccgaatcgagcgcaatttgcccgaaaaaggcgacatccagattctgaattttaccgaccgccaataccgtgatatcgttcatttctcggatcagggccgcagggctgccagaaaaaacccggaacaattggtgctgttttgatggaatatgcttggaaatgcgcgtctcgcccccactcaaaaccttgcatttacaaggccttgagcggagatcgagattagcagttcagaattcgaggtccagccgcaacctgaggaagcgctgcgacagtggtttgagaagattagcagttcagaattcgaggtccagccgcaacaacatcggcggtatcatcattgtgaccgtcagattagcagttcagaattcgaggtccagccgcaacatgggttcagaacatgcgcgcgcgtttggcagattagcagttcagaattcgaggtccagccgcaactagcgtagtttcgttcagtggccactggagagattagcagttcagaattcgaggtccagccgcaacaccctgtcacgatggacggttttggcgataagattagcagttcagaattcgaggtccagccgcaacccgtgatcgtagcgggccgtgatgggcagtagattagcagttcagaattcgaggtccagccgcaacagaaagtgattgccgcttgttatggcatgaagattagcagttcagaattcgaggtccagccgcaactcatgatccgtcgcttctttgccgtagtaaagattagcagttcagaattcgaggtccagccgcaacagtcctcgaagccgatcaaggccgccaaacagattagcagttcagaattcgaggtccagccgcaacacctctgcggcctgaatgatctcccactttagattagcagttcagaattcgaggtccagccgcaactgtcagatgatacagaggcacttgagcgcaagattagcagttcagaattcgaggtccagccgcaactatggagaagcacttagccgtattgaaagtagattagcagttcagaattcgaggtccagccgcaactcctcgctcataccctcggtgaaggtcacaagattagcagttcagaattcgaggtccagccgcaactgaacgtcggaacgacttcggtgtcctcacagattagcagttcagaattcgaggtccagccgcaacgcgcatggcgcgatgatcgacctcggttatagattagcagttcagaattcgaggtccagccgcaacgacgacaggcgacagcttttcataattcgcagattagcagttcagaattcgaggtccagccgcaacaccgagggtgcgcgacacctgacgaaaaatagattagcagttcagaattcgaggtccagccgcaactaatcctttgggcggcttagcggtgtgcgaagattagcagttcagaattcgaggtccagccgcaactatgcggagcaacacaaggcggaaagagcagattagcagttcagaattcgaggtccagccgcaacaagagtaaccgcccgattgagaccgcaggttacttctgaagcataggggcgaccaagatgatcgccatgccggtcaggcaaaagattgcgccgatgata

SEQ ID NO: 3693 - DNA, 15835 bp, synthetic construct
  misc_feature 1..15835: note = Synthetic
  source 1..15835: mol_type = other DNA
atcgaatggtcgccgttttcgttccaaacacctgaagaaaacgcaacacgccacaagcgccgcgaagaagagctggcaacagccacatcgcgggtgatcgacccagctgtaaccgcgctcacagacgccgggttcaaggcacaggggattgtgcgtcacggggatgtggccgaaacactgaacgccattactgtggaaaacaaagcctcacagatcatcgtcggccgcgcgtctgaaggtggttttgcaaaacgcatctttggcagctccacccagaacctggtgatgcacgcggacgtaccggtcacggtcgtcggataaggacaaaaacaatgaaaaaaattcagatgtctgtggctacggccgcgactgccctgtttgtggcagcgccggccctcgcacaagagacaatggggatcgacgaaaaggtcaacgcggcattcgccaaagcaaccggaccttttgttgcaactatctttgctccaatcccgggaaccagctttccctggatcgtaatgtggctggtgattgccgccaccgttttcaccctgtatttcggctttgttcagctgcgttacttccgtcacgcgatccagctggtcaaaggtgactactccaatcccaatgacgcaggcgaagtcagccacttccaggctctggccaccgcgctgtcgggcactgttggccttggtaacatcgccggtgttgcggttgccattggtatcggtggtccgggtgcaaccttctggatgatccttgctggccttcttggcatggcctccaagttcaccgaatgtaccctgggtgtgaaattccgcaatgagtacgaagatggcaccgtctccggtggcccgatgtattacatttccaaaggcttcaaggaacgtggcctgcccggtggtaagatcctggcggtgctgttttcgatcttctgtatccttggctctcttggtggcggcaatatgttccaggccaatcaggcccatgcgcagattactggcatcgttggtgactaccccggctggatcaccggcatcgcctttgctgcaatcgtcttcatggtgattgttggcggcatcaaatccatcgccaaggtgactgaaaaagtcgtgcctttcatggccgtgatgtatgtgggtgcggcgatcgtaatcctgcttgcaaatgcagacatgatcggctgggcctttggccagatctttgccggtgccttcaccagcctgggcgttgctggcggtgtggttggtgcgctgatccagggtttcaaacgcgcggccttctcgaacgaagcgggcgttggttctgcggcgattgcgcactctgcggtaaaaacctccgagccgatcaccgaaggctttgtctccctgctggagccgctgatcgacaccgttgtgatctgcaccatgaccgcgctggttatcatcatctcgcaacagctgatcactgacgcggaaaccggcttctatgtgatgaacgaagcaggctctgccattgcaactgttgatggcaactctggtgtggctctgacctccgccgcctttggttccagcatcagctggttcccctacatcctggcgatcgcggttgttctatttgcgttctccaccatgatttcctggtcctactacggcctgaaagcatggacctacctgtttggcgaaggcaaaaccaccgagctcgtgttcaaactgatcttctgcgtcttcgtggtcatcggtgcatccgcaagcctcggcccggtcatcgacttctcggatgcggcgatctttgccatggcagtggtcaacatcttcgccctctacttcctgatgggctttgtgcgccaggagctcgcctcctacagcgcccgcctgaaagatggcaccatcaagaaattcgcccgcaactaagcgcgtgtaaaacaatgttccaaggcggtcaccgccttggagcccaagacacggccgctgcgcggcaacgtccagcaccacccggtctggacattttttatgcacaggcccagggtttgaggatctgatcaaatccgcctacacgcattttcaaacaacggagttctggtgatgaaggtcttttacgcccctgaaaccgaagcacatagccccggctttcgcctcacccacggtcgtcccgccagcaacgccgagctccccgaacgcgcgcaacgcctgctgaacgggatcaaacagctcggtctacccgtgagctccccacctgaggccccacgcagcgctttggagaaagtgcataccaaagaatttctcgcgtttctggaaaccgcctgggaggaatggcaaaaactgccaaacgccagcattgaggtgatcccaaacctgtgcccacaaaagacagaggcgcgttacccacaaagcatcatcgcccgcgcaggttggcatttcggggatgtttctgcgcccatcggtgaacactcctggcaggccacccgccgtgccgccgattgcgccgtggccgccgccaatgcagtgcttgaaggtgacaaagcggcctatgcgctgacgcggccaccgggacaccacagcaacgcggatgctgccgcaggccactgcctgatgaatattgccgccatcgctgtggaacagctgcgcaatacacacgcccgcgtcgccaccctagatatcgatgtacaccacggcaacggcacccaatcgatcttttatgaacgcccggatgtgctcactgtgtcggtgcatgctgaaaccgataactactatccgttttacaccggatatgccgatgaacttgggcgcggcgcaggctccggtttcaaccaaaacttccccctgccacgcagcacaacagacgcccgctggcttgagacgatcgcacaaggcctagagcgcatcaaagaatttgaacccggcgcactgatggtatcgcttggcttggatgcccatgaaaacgacccacttgaaggtatgcagatcagctgggagggttttcgtaaggccggagcaatgattgccgctgcaggctatccaacggtcttgattcaggaaggcggctatctgtcagaagatctgacgacctcgcttgttgccttctttgaaggctacctcggccgttgacgattgcggggcgcaactcttcctgcgcccctgccccaccacaggtttctgaaacgattgtgcaattggtgctagggcaacagcgccagacgtttcaaaaacagcgctttcacagtatctgctgccactttcatgcagacattcacgggtttgcgcccgctgtcaggcgccgcaacggtggccccaatttcttcgccctcgcagatcactttcatcgcaaggctgcgggtttcgaaatgctcgggatgggtacaggcaatcaccgcagccgggtcatgcaatgaacagccctcaagcccggcaaccttcagatagaacgccaaatagaaatgtgacatgtcctgcaacatgcccccaagttcaggagaattggccgcaatctgagtaaagtcttctggcgtgcaaagaatacgatgggtcacatccagccccaccagcgtgaccttttcacctgcggtcatcaccacatccgccgcatgcggatcgtgatagatattggcctcggcaaatttggtaatattgccgccctcttccagcgatccccccatgatcacgatggatttgacgttgtgcacaaactccgcatcccgctccatcgccaccgcgatatttgtcagcggcccgatcgggcagacgaccagttcgcctttgtgctcgcgcgccatgcgaataaggaaatccgcggcgtcctcatccactgccttcccagctggtgtggccgcaggaatatcaccaaacccctcatcaccatgcacttcagacgatggcggaaatggtggcagtttgagcggcgctttggccccggcagccacaggcacctcagcaagatccgcagcctccagcaggcgcaaggcgttccgggtcgcgatctcggttgtcacattgccaaaaatcgttgtcagccccagcaattcaatgtcagcggcagcagccgcgtaaaagatcgccatcgcatcatcaatgcccgggtccgtgtcgataatcagcttggtcacatcgctcattggggtgctcgctcttgtttgattgcggcagtctcacgcaattttgcaaccacttcaacctgagatccaaaaacaacaaaagcgccccaaatggagcgcttttgcaagaaaacatctgatcgcgatcaggtgttaaacaggaagtgcatcacatcgccatcctgaacgatgtagcttttgccttctgcgcgcattttgcccgcgtccttggcccctgcttcaccattgccagagatataatcatcataggcaatggtctcagcccggatgaaacctttttcaaaatcgccgtggatcacgccagcggcctgcggtgcagcggtgccggtcttgatggtccaggcgcgcgcttctttagggccaacggtgaaataggtttccagtttcaacagctcatagcccgcgcggatcagtcgatcgagacccgcttcagccagtcccatttcttccaggaacatggtggcttcatcggcttccagttgactgatctcttcctcgatctgagcagagataatcacatgcgagttgccctggcttgctgccatctctgcaacacgtgcggaatggtcattgccttccacgctttcgctctcgcccacgttgcagacatacagaacgggctttgtggtcagcagctgcagggttttccacgccttcacatcatcggcgtcaacttccaccagacgtgcaggtttgccatcttccagcatcgcctgcgcttctgccagcagacgatcctgttgcagggcttctttgtcgttgcctttaagcttgcgcaccagattggcacggcgcttttcgatgctttccagatccgcgagcatcagctcggtctcgatcgtgtccgcatcggcaaccgggtctacccgatcttccacatgggtcacgtcatcatcttcaaagcagcgcagcacatgggcaattgcgtctacttcgcgaatgttggccagaaactggttgccaaggccttcgcctttggatgcgcctttgaccagacccgcgatatcaacaaaggtcatgcgggttggaatgatctgagccgagcctgcaatcgcagccagcttatcaagccgaaggtccggcaccgccacatcacccacattgggctcgatggtgcaaaacggaaaatttgccgcctgcgccgaggcggttttggtcaatgcgttgaacagtgttgacttgcccacattcggcagaccaacgattcccattttaaagcccatatcggcctcctgaatgccacttggatagggcttctaggcagcattgcccccatacgcaagcgtgtgaaaggtggaaatggggccagaaagacgcgatttggttagattcttcacctgatcgttatcccccctttttattaaggcgaatccaattatatgctggccactcaataaaaactccacgagggcgtatatgaaatctctgttgatgggtgctgttttcgccgccgcaattgcgggctcagcccaagcacaatccctggtctttggtgcagggtattctgacttttccgaaaccggatccgaggacggtttcattgcggccgtcgaactccacggcaaagccttcttggaacgtggcaatttttctgctggctggggtggtgtcgcttccattcaggaaaccggtgacgcctttattggtgctggcctcgtggggaaatttcagctgcaaaaccgttggtttgtagaaaccagtgtgatgcctggcgcctatttcgacaatgaagaaggcaatgatctgggctccaccttcgaaatccgcagccttctgggcgttgggcgcgagctcagaaatggttccgctgtttccgtgtctatttcgcataagtccaatgcgtcgaccgccgaacgcaaccctggcgtaaacagctttatgctgcgctggcacaagccgctgtagtttacagtagacacatcacatgggcggtcgggattgatttcttggccaacattcggcacatcagtgcagaacaaggaacaaaggcccgcccatgacccgtatcgacgccaaattcgccgccctgaaagcagagggcaaaaaagcatttgtcacctatgtgatggcaggcgatcccgatttcgatacatctcttgaaattgtcaaaggcctgcccgccgctggcgttgacattatcgagcttggcctgcccttcaccgatcctatggcagatggcgcgaccattcagcttgctgggcagcgcgcgcttggagcgggcatgacgcttgaacgcacgctcgagctggcgcgtgaattccgcaaagacgacaacacaaccccaatcgttttgatgggttactacaacccgatctacaaccgcggcgtcgacacctttctcaaagatgccaaagacgctggcatcgatggcctgatcgtagtggacctgccaccggaagaagacgatgaactctgcatcccggcacaggctgcgggtctgaactttattcgcctcgcaacccccacaaccgacgacgcccgcttgccgcgcgtgatgcaaaacacctcgggctttgtctattacgtgtcgatcaccggtatcactggcgcagcagaagcccaggcgagcgatgtcgctcctgaagtgacccgcatcaaagcggcggttaacttgccggtgattgttggctttggcatcaaaacacctgaaaacgccgaatccatcgccaaaatcgcagatggtgccgtggtcggcagcgcgattgtgagccagatcgccgacggaaaacccgtcaaagacgtgcttgaattcgtggcggatctcgccgcaggtgcccaccgcggctaatccaaactgagtattcaaacaaaaccgcgtctgcattgtcaggcgcggtttttttgtgtttggcccgccaaacctatcctttgggatagggttccctccagaccttaacctttcgcgtttggcgaaataccaaagcgggacacaacttccattaaaattgtctcatactggctgcacaaacactcaggagatgaacaatggacaaggtttggatcagcgcacttatcggagccctcactggcggcctgctttcgacgtcttgtgttttgttcctcgccgctccgctttggagcctcctggtcatctatccagtggtcggagccatcacaactggagcgatttatgcagtctggcatcacctcgaagctgagatggataaaagccgtgcattggcagaaaacatgtaccacgctgatcatctgatccaataaatcaccagagcggtacagcgcgcgcaaaatgcgccgaggaaatatacctaagtatgaatagagttttaacagagttgtagttagcttttcgttgataaagttctcaacctgtctttaataaatccgggttcaccacacacccattggcgcgtagaggtttaaacatggcatttattggactggtttgcgggatggtagtcggcgctattgcggcatcatttggtgtgtttttcctgggcataccgctgtggctggggctgctgacctactccttcgccggggctgccactatgctgctgtccattgcggccatgtacgcgcgtcacgacgatgatgactctggtcacatgccacgctctgagcgccgcacaggctacatggcgcaggaacgtcgcgaggtcgcttaatacaccgcacgttcaaagcagcagatctgcgatattttcacgatcctttaaaacaagcgttgacgtataattagagctgttggaccatagttgggcaaatgtcactttgagtgagtatcgccatgctgtcccgccgtcgctttatttcgtctactgccgccgccgtttctgtgcctatgcttccttcttttgttgaagcaaaaacagaaactggttttgaccccatcccccaggttgtaaaaatcaaaaagcagtttgaaccggggcaaattctggtgctgccacgctccttttatttgtattacgtgacagaaccgcgccgcgctgtgcgctatggcgttggcgttgggcgcgcgggcttagaatttaccggcagtgccgaaatcgcccgcaaacgggaatggccaagctggcgtccaacccctgatatgatcaaccgcgacccgcgcgcctatgcgaaatttgtcgacaacgattatatccaacctggtggcccccaaaacccactgggggcgcgcgcgctttatctctaccagaacggcgtcgacacctatttccgtatccatggcaccaaccgcccagagaccattggcagcgctgtctcaaacggctgcatccgcctgaccaatgaacatgttgccgatctctacgatcgggttcctgtgggcacgatcgtcacagttctctaatttgatacctggcacgatttcatcccaagatcaccaagaaggtctcttttcctcgcttgttccatctgctagatcacacgaatggtcaggccccttagctcaactggatagagcagctgacttctaatcagcaggctgagggttcgagtccttcaggggtcgccatttcataaatttgtcattatagcatatcagtgccagttttgggcataagcgtgccaactggctgtcaagaggtttctctcaggtcgccagaacaaagcgcctcactcttagcaacttattgattttgggctaattcccgaaacgacacgagcaacatcctggcgcaggtaaattcccccatagctccgagcgtttggagtgaacggcatgagcccggccattttcaagcctcggcttaatgagttgcggtgtaatcctgtttcctcggatagcaacgtgattgtcgcgaacagcgatcgaaacgcagcgatgtccttctatgtcatgtgataggccgctttccccgtcttgggattttcgatcaatgttgcgggcgtgtgaccgtcttggatgaaggcgagaaaggctccttttttacgcaaaccgatgctacgggcaaaggccgcagcggtcggaggctcgacattggtcctcctttgatcaatcacggccaccatagactcgggcaccaccagcgaccgatagccccgttgttcgggccggtcctcctccactggaaggcccatgcagacaagaccatgatccacgatctgtcgcccaatatgcttgcacagtcttgctgcggcaaagaccgtgtggcccttgaaccaagtcccgtctttccccgtccgcaaacgtctgtcgagccacagatcatgggctgtgacattgaaggctgtttcctctgcttgcgccgcgccaagtgttgcttgtaaatctaaaaaccgcgcctgaaagtcccatcgcctcaagggcgtatcttcttcccaaagtggaacaagtggccggttgtgcatgatacagaccttggcgtctttaagctgccagtctcctcgatatgtaatagctgtcagaggcgcgacagactgcgctgcgatgtccgctctcaggcaatccgggcacccccgcaccacgggacttcgcaaggcgcgcgacgggactagctctccgcgaaaatgcatacgaatgtcacctgcaggccgcccagtccaagaaacgagttcgttcagctgttccgctcgaagaccagcaacctcagccaacgtctggagcgcgacctcttcgaagttcaacacccgcttgaaggagaaacccatgtcttttgaaaactcaacaacaccgaggccacttgctgcgaggcgaagaaacctgagcaccacatggaaagcagacatccagcacacgacaggttgcgaggcatcgaggcagaaacaaaaaagcgcaggccgtagcctgcgcttcgatgtggtgcagtcgaatgcttgttaacggctcgaccacggattttgaacaaagcctacgatgcatatttcgaaacagcgcacaaccgcaatctgacattgcatccgagaatccgggatgcaatcctgagtaatattcttttggagattgcgatgcgcttggggctggatattggcacaaattccattggctggtggctctatgccacccatgagggcgaaatttgcggtgtgatcgatggcggggtgcggattttctcggacgggcgcgatccgaaaaccaaagcctcgctggcggtagaccggcgtgcggcgcgggcgcaacgaaggcgccgcgaccggttcctgcgccgcaaggcagcgctgatgaagcggatggccgagaccgggttgatgccagttgatccggcggaggccaaagcgctggagcaattggacccctacgccctgcgcgcacttgggctggaccaggaattgccgctggctcatttcggccgggcgctgtttcatctgaaccaacggcgcgggttcaaatccaaccgcaagaccgaccgaggcgacaatgaaagcggcaagatcaaggatgccaccgcccggttggatcaggcgatgatggccaaggacgcccgcacctatggcgagtttctgcatctgcgccgggccgccgcaccggatccgaaacaggtgccgacggtgcgggcgcggctgtcggtcgcaaggcgcgacacagacgcaaaggaagaggcgggctatgatttctaccccgaccggcgccatctgtcggaggaatacgacaagctgtgggccgcacaggcggggtatcaccctgatgtgctgacggatgagctgcgggatgagatcgcgctgatcatctttcaccagcgaccactgaagacacctgaggttggcctgtgcctgttctcggacgagaagcgcatccctgcggcacatccgttgaaccagcgccgcattctggtggaaaccgtcaatgcgctgcgggtcgcggccaagggcgaggccgcacgcggactgacccgcgaggagcgcgaccagattttgcatgcgctggacaataaaaagcacaccaaatctctagcgggcatggtgatgaagctgaaagcgcttggcaaaacgatcaagctgcgcccagaacaatctttcacgctggaaaccgccatacgcgacgccatcgcctgcgatccggtgcgcgccagtctctcacacccggaccggttcggttcgcgctggtcaacactggacgccgatacccagtggcaagtgatcgagcgcatccgggcggtgcaaagcgatgccgaacataatgcgctgtcggactggctggtgagcgaacatgcgctggaccgcgatcatgccgaaacggctgcgaacgccccgctgcctgaaggttacgggcggctgggcctgaccgcgaccaagcggattctggccgcgctggaagcggaggtgatcccctatagtgaggcggtggcacgctgcggctggcaccattcggaccgccgcacaggtgaggtgctggaacagttaccctattacggtgaaatcctggaccgccatgtgatccccggcagctatgacgaaaaagatgacgacatcacccgctatggccgcatcaccaaccccacggtgcatatcggactgaaccaactgcgccgtctggtgaaccggatcatcaccgtctacggcaaacccgatgaaatcgtggtggagcttgcacgcgacttgaaactgtcggaagagcagaagaaggaagtcaacaagaccatcaagaaaaacaccgacgccgccgcgcagcgcagcaagaaactcgacgaaatgggtatccccgatactggcgccaaccgcatggtgctgcgcctgtgggagagcctgagtgacgatgccatgttgcgcaaatgcccctattccggccagcagatcagcgcgcagatgctgtttgacggctcttgcgacgtggaccacatcctgccctattcgcgcactctggacgatggctttgccaaccgcaccctgtgcttgaaagaattcaaccgacagaaatccaacaagaccccgtgggaggcctggggcggcaccccgcaatgggacaagatctctgccaatctgaagaacctgcccgaaaaccgtgcctggcgctttgcacccgatgccatggagcggttcgagggcgagaatgatttcgccgcccgggccttgaaggatacgcaatacttggcccggatcgcccggacatatctggaggcgctgtatgatggccaggatggcaaaagccatgtctgggtggtgccgggacggctgacagaaatgctgcggcgccattggggattgaacgggatcaccgcgctgagtgacaacggcaagaagacggtaaaggccaagaaccgcaccgaccaccgccatcatgcgattgatgcggccgtgatcgcggcaacagaccgcgcgctgatccagcggatcagcaaaatggcgggcagcgatgagttggagggtgccgaagacgtggcgcgcgcggtgccgccgccctgggtcgagttccgcgacgacattgccgcgcagcttcagcgcatcattgtcagccaccgggccgaccacgggaggattgacccggcagcgcgcaaatccggccgcgacagcagcagcggccagttgcacaacgataccgcctatggcctgacgagcgatggcaccgtggttacccgcaagcctttgatgtcactgaaacccggcgatattgccatcacgaatcgtggcgccaatatccgcgacgccgacctgcaacgacatctggcgcgggttacacgcgggttagaaggcaaggactttgaacaggcgctggctaaatttgccgatgcgcgcaaattgccagatcactccgacaatccctatttcggcatccgccgggtgcggatggaagaagcgctgaaggtgatttccatcaaggataagaatggtcgcgcttacaaaggctacaaacctgatagcaatgcgcgctacgaaatctggaagctgccggatggaactgtctcccatcacgtcgtggcgacctttgacgcacacaacgatacaacgtccaaaccgcacccggccgctaaacgcctgcaccggtttcataagggcgatctggtgcgtctggagcaaagcaagtttggtccggttgtcgcgacagtggaaaaattcaatgtcaatggcggcatcgagctggtcccccataacgaggccaatgcctcggaccgctaccgtaaatcgaaagaagacctttatatccgcctgagcgccgccactttgatcaagtccggtggccgccgggtctatgtcgatgaaatgggccgggttcgggaccccggcgtggcgcaggatttgcgcgcataggttgtgtcataatggccactcccggtgcctgtcggtggggcatcgggtgattttaaccaattctcatcacctgcggccctgaatgaacaccgttttcaaaacgggaacccgcatggatcagatcatcgacattgccaccgacggccgccacctctcgcgcgaacgcggctttctgaaggtctcggaacagggcgccgaaatcggccggacgcctctggatcaggtcgcaggcgtcatggtgcatgcccatgggaccacctggtcgacctcgctgctgaccgaactggcggagcgtggcgcaccggttgttttgtgcgccgccaaccatgcgccgaagtcagtgcttatgccgctggaaggccaccacctgcagggtgcccgtatgcgggcgcaatggcacgccaagacacccatgatcaaacaggcgtggaaacaggtcattagcgccaaggtcaagatgcaggccgccgcgctcgacgcctttggtcaggacgccgcgcccctgcatatgatgcggcgccggatcacctcgggcgacggcagcaacatcgaggcccaggccgcgcgttactactggccgcgcatgatggggcctgatttccgccgcgacatcggcgcaggtgatgaaaacgcgctgctgaactatggctataccgtgttacgtgctgcctgcgcccgtgccgtggtcgcggccggtttgcacccgaccattggcctgtttcacagcaaccggggcaatgcatttgctctggccgatgatttgttggagccgttccgccccctggtcgattgcgcggtgtgcgggatcgtcgcgtctcgcggttcagatgtcgatccccaggccaagcaggccttggccaggctgatcgctacagatttgccgctgcagggcggcacgacacctgtgtcggtcgcgttgataaagctcgctacatcgctcgggcagagcttcgagagcggcaagctggccctcgctttgccggtcccgccgacgtcggatatgctgacgggtttgggtacatgagcgtgaccttcaagcaactgtcaggatatcggttgatgtggattcttgtgatgttcgatttgcccaccgacacgaaactgcagcgcaaaaaagcggcggcatttcgcaacttcctgctggatgaggggttcgaacgcagtcagttttcggtctatgctcgttttgtcaatggcaaagaagccttcgcaacgcgcgtcaaccggatcgaacgccatttacccgcgtcaggtgacgtgcagatcctcaacttcactgaccggcaatatcgtgatattattcacttctcggatcaggggcgccatgcggcccgggaaaatccgcagcaacttgtgatgttctgaagtgattcatgttgaaaactgacaatagatctcgaacaaaacccactcttttcagagagttgatccgagatctattgtagccgttcaaaatccgaggtccagccgcaaccggattcttggtgcgcatggggcgcgccatattgtagccgttcaaaatccgaggtccagccgcaaccacgtcagacgcttgcggggtgtagccggtattgtagccgttcaaaatccgaggtccagccgcaacgcgtcaccacctcatcggtaatgccgggcattgtagccgttcaaaatccgaggtccagccgcaacgacgggatagcgctgtgcggcgttgattgattgtagccgttcaaaatccgaggtccagccgcaaccccgcaacatcttctttgaccatgacgcgattgtagccgttcaaaatccgaggtccagccgcaactaacttcctgatccgcgtgtacgagggatattgtagccgttcaaaatccgaggtccagccgcaacaagcccattaggcaggagatgttcgtgcaattgtagccgttcaaaatccgaggtccagccgcaacctacgattatcccagtaagcactagcccactattgtagccgttcaaaatccgaggtccagccgcaacagtatattgcacaatctcattgtctattgcattgtagccgttcaaaatccgaggtccagccgcaactgtggctgaattgaacaagcgacatgggttattgtagccgttcaaaatccgaggtccagccgcaactaggtaactgtagccttggcagacgtccaaattgtagccgttcaaaatccgaggtccagccgcaacctgtcagcgcgcctgcagcctgcattgcaattgtagccgttcaaaatccgaggtccagccgcaactataatatgggacgatttttctaacatgcattgtagccgttcaaaatccgaggtccagccgcaacatgggttctcccatttcgaagcctaggccgattgtagccgttcaaaatccgaggtccagccgcaacttagtcggacgcgcaagtgcgcttgtgttattgtagccgttcaaaatccgaggtccagccgcaacctctgatcagatcatgaaggaaatgcagcgaatggcggctattgcgggtcgcagtataatacctacagccacctctgccttccgccgtgtttcccatgaatgccgccagatcagttctgacttgatggttttgaagaaggtttc

SEQ ID NO: 3694 - DNA, 15269 bp, synthetic construct
  misc_feature 1..15269: note = Synthetic
  source 1..15269: mol_type = other DNA
gggctcggagatgtgtataagagacaggtcatggacagtgcgtccacccaggggccacttcatccaccaacagggcctgattatcagcctgtcgtaacactaaacgggtggacattaccgtttcgtatgaacaacggggtgaaagagtttcaccttgtagctgaacccgttgagcgtgagctagcagatggaatgacggcttatctttggggttataatggccaatctacagggccaactattgaagcagttgaaggagatcgtgttcgtatctatgtgacgaataagttgcaagaacacacgaccgttcattggcatggtctcattttaccttcgggtatggatggcgtaggcggccttagtcatccaggcattccaccagggaaaacgtttgtatatgaattcgacctgaccaaaagtggtacgtttatgtatcacccgcatgcagatgaaatggtgcaaatggcaatggggatgatgggcatgtttatcgtgcaccccaaagacccaacattcatgcccgttgatcgcgattttgtattcatgctgaatgcgtttgatattgaacctggtacttatgttccacgcatcatgacgatgacagacttcaacctttgggcatggaacagccgcatcttccccgatatcgatccaatcgtggtcaatcacaatgatcgcgttcgtattcgggtggggaatttgacgatgaccaatcacccgatccacatgcacggatatgacttctctgtcacctgtacggatggtggttgggtgccagaggctgcccggtggcctgaagtgacgattgatctaccgataggtgcaatgcgcgcatttgaatttgatgccgtacatttgggcgattgggccattcattgccacaagtcacaccacacgatgaacgccatgggtcacgatgtaccaaccttcattggtacagaccaacgccgcttatcgcaaaaaatccaaaaattccaaccagaatttatggcgatgggatccgctggcatggcagacatgggtgtcatggaaatggaactacctgacaatactgttccaatgatgacaggctgggggccacatggcccaattgaaatgggcggaatgttctctgttgtcaaagtacgcgaaggtattggcgcagatgattactcagaccctggctggtacgaaaaccctcccggtacacaagcctacgaatggacggggaaactgcccgaacatgcaagcatgaacaaccccaaaactcaaataacaaagaaaccaatcttaaaaggatgatcgagttattcgacacctaacttatccaaagaaagaaaaactatgaaaatgcaattactctcaacagccctaatcttagcattagcaaacccggtttatgccagtggatctcatacaggtgggcacggtcatgaaactaagaaaaccgaagacggatcacatggccactctgaaggcaatggtgatgcaggtcatcacgaaatggctgcagggatgcccggtatggctaatatggtaacgcgcacaattaacgtatctatgattgaaacagatgacggagatatgatctttgaaccaaaatcacttgaaataaaagcaggtgaaacggttcgctttgcaattcaaaacaagggtgagttagaacatgaatttgttcttgatactgtcgaaaagaacgcagatcataaaaaactaatggagaagtttccagaaatggaacatgatgatcctaactcggtgcgccttgaagaagggcaatcaggtgaaatcatctggtcgtttacaaacacgggcacattcgagttcgcctgtttgatccctgggcattacgaagctggtatgcacagttcaattgaggttgcagatgctggtggctctgcggctgtgatatataccaaaggtgttgtgaagaaggttagcgcaaaatcaggcaaggtaactattatccacgaagaactaacaaacttagatatgcctgcaatgacgatggtattccgtgtctctgaagacgctatgcttgaaaaaatgaaagcaggtgacaacatcgagtttgttgctgaacgtctaaagggtaaattagttgttactgatctaaagtaaatctcccggattatggcctcccgttaatatatagtggggggccagccccgcattcgcggaaatttggtttatgagtctaaaacttggatgctatatatgaaggctaatagacgattattactaataggtggtactttagccatcatagctgtttacaaatatcagctacttccgattttctttcaaaaacctctgcaattcgagcccctcgaaacccctgctgggttcagacgtgtgcccgacgggcaaagttcaattggttttgatccatttgttagtattaacgcacgctccgaccctgggattgaatttgccatttcgcgtgtaaaagaaaatatttgtggcaacttgttcggccctgggcttgttgccagcaacattgttcaaatcgcggtattttcggacttttactgtccatactgccgtgttctttcacagaaacttacgcgtctcgaaacagaatccgatggcatgatacagatttcctggcatgagcagccaatattcggtgaatcgtccgaattggcggctaaagcggcacaagcggctaaaatgcaaggtgagtatgctcaatttcacgaacgtctcattaaaacgccgtttcaggctacaccagaatatataaaggcactcgcagataacgtcggtgtaaattatggacaactattacgcgatatgagtggagacgaagttgcacggacacttcttgacagtgccgcactggcagaaatctttgcattcattggtacacctgcaatggtcataggccgaacggttgttcagggtgaaatcagtagtgaaatgttaaagaatataatagatcaggaacgttcggatggttcttttattgattgttgaaccgtatgattacctcgagtagatcattaattcgaggtaatcatactaacgcagaagcctcatattattggctcatcaattactagttcctctatgccctatgcctgtatttttcaatacagaatacaccttctcgtcaacgttacatgactcaacatgtaatgctctaggctcccgcaggcacagctttgtcctgtgtggatggctccctttttgcaagtcctttatttgtgattgaccttttgtcagaagcagtcttgtgttcggcctgtttgcgcgacacacatggccgctggccctgatggtttccaccaaccaagtcccattccgctcatcgaacagcaagcgttcaggacaaagcacggggcgtcttggttttagggctgacaaagttccatcacttcattggtcttgcaatctcctgtttctaggccgttgagctcaaacggttctcactttgtacggctcattccggattaatacggccaagatcatacgggcagttttgttggccatggcaaccgctgccactttgcttggcttgcgtgacaggatgtctgcaaaccaaggatcaaatttctctggctccgctctaatcgagcgaatgcgtgacgtcatgccaagaaccagtaaccggcgaatgtattgatcgcccatcttcgagatatgacctaaccgctcttttccaccacttgatttgttgatcggcgtcaatcccagccaggcggcaaactctcggccattgttgaactgcttgccactgccaaccgttgcaacaattgcggacgctgtaatcggcccaacacccggaattgtgcgaagcagtgcaacgcgtttctcactcttggcgatttggttcatctggctggagtaacctaggatctttgaatgcaagaacagtagttggtcgcaaattccaaagatcacatcgccggcaacttcaggtaaatccggttgttctccattcagccaacccttggcgaatgcaagggcgtgatagattccttgaggtataacaacaccaaactccgccagttgcgcccgcagcatattgattgtttgagttcgttgccgaacgatgaggtcacgggttcgatgtactgccagtatcgcctgttgttcgggcgtcttcacttcaacaaatcgcattgtcggtcgcgtaactgcttcacaaatcgcttccgcatcaactgcatcagatttgccccgtttaacgtaaggcttcacgtaaacaggcgggattaacttgacgttatgccccagtttgatcagttcacgcgcccaatggtgactggttccgcacgcttcaatgccaatcaaacacggctcaaggcgttcaaaaaacgtcaagacctgggctcttcttattgcacggttgaatgcaacttcaccatctttgtagataccgtgggcttgaaaaacgttcttggccaaatcaaggccgattgttgtaacatgcatggggtggctcctttctcgagcagttcctaacacctgcagaatagcccattacgacgctaatggtgcaggagccatccacaccatcgctcagccgccgttgggtcattttcagatagaaaatacttgatagaaaatgtcagatgactgctttgagcccttagcgaccccctatggtggataaatttaactttggctttaaggcgctctcccgctaccaatactttcagctcaaaatgcgctttttgatcagctcacacagcataaagccgacattcattttatggatgccgaatggcagcagagccggacaaagctgccgttcgtgcttctcgcaatatccaaccttgccaaattccgttacttgtctcatgtcagtttagtttgacagggcacattaaagaacaaaaatcaggtgcaccgcgataacagtgcacctgaataaggttaagcaaagccacttggcttaaagccagcgcaacattgttgttggttagaaagtcatttcaaagaatgcgcgcaagctgtggctttcatatccattgccaaataatgccccacgatactctgcacccattcggctagatgatttgtctgttgaagacaattccgcagttagacccaaccctatatcaacccaatcactgtcggtagcgtcaacaggtgttaagcttggcaatacaccgccaaaagaagttgaaatcaactgggtatcaccagttcgagaggtataggcaatatgaccgaaggggttgaacgtacccttttcagtcaatatttctttgccgccacgaacacctaagcgcgcaactgtaaagttggaagattgctcgcccacggtgatattgttaatccccgctccagtttcgctgaacctgtcaatcttaacccggtaatattcgacactggccattggaccaaagttaaatgcgccgcgctgtatcatccaatcaccttgcaagccagtatagaatgttgacccatcggtagtgcccagagctgtcgaagaggtcccgccgatagtaatattgcgtttactatcataggacaggtcttgataccctaccaatgcttgaacgtgtccgttagaaccaaattcagtgcgcccgaacagtgtaatggccaaaccgtcggcttcaagttcgccacgcccgtcgtcgatatcagatgtcccgcttgacataccaaacgcaagaccaatagctcggtcttctccaaagccacgctcaaaccctaaagtgacatttgttgtggtaaaatcagcgccaatattattggccgtcctatcagtttgacccgagctaccagagagtgagataaaagcgttcgtatcctgaccaattttccaagcattaggattgccctgactgacgccagctgtacccgtagcaccagcttgtgagccagatccgattgcgaatatctgatcacttgccattgaaaagctaagatccgtataggaactcagaaaactgaacccaatacgttctaaagccagttgctgttcagcagcggttggcaaggctagaatagcactgatagtagttaagtaacctgcatccgcagcaagatagggaatgtttgcagcgtcaaggctaccagcaacagcaaattggtaatcggtcacagccgcttgcacaatcggtgcgaaaactggagtaacccgtaatgtgaactcacccaacgcaatgtcgccgacatcaattgaaaagttcaggttcaagttcgaaaggtcttcgatttcgtcaatcgcaaacaggctatcagaattcatcgcagcaaggatagcgtcgggaactacaccacctggtgtataagccagtgatgcaacacttacaccaagtgacgcggccaatgcatcaatgcgcacctgaaactcatccacagtagcggttgcagggtcgtcaatggcaaggttaccatatagccattgatctgtgccagtattatgccaaccgactaatgaatcttcggtttctgtatcattgtcgtcattccagaaatacgcatccgggatttgggtgcgatccagctgaccgtcaccaaatattgcattatgttcagtgttgaataatggggtagctgtcaatgtagtaccgtctgccgattgtgtaaaaacaaatcctgcatcatcaccactaaaaaaacctatgctgccttcttggccaccttcgccaaacaacccgttgggaaagaacgtgcgttgcaacgggttttgaccagtagtcgcaccacccaaacctggccaagccgctgcttttacagataaggccgtcaattggtcaaacaatacacctgttgtaccgtcgacaactgtgaatgcatcaccagaaccagttcccaatatcatatcaaaacccattaagcgggcacctgatttattggtcatctttccgaaggtaaaatattctgtaacaccagtggttgcagacgtgctaaacctcaaatcaaatcccgacgtgcccgtcagattggttttgatccgtttgccacttcccgcaggggcatcacaattcacaccagcttctctattggccatcaggcaattaaggacacctgatggggaaaacccgtttgcagacgtgaaatcatcattgttgatcgcgccagttacagctttaattcctggctcttctacaccctctgtagggtcagaaaacacaaagccgtccccgctaattccaataaacccatcaatctgaccagcccatacttgtgctggtgttaatgctgcaatcgcaattggggcaacggcagataataatttcattctatatcccataatacattcctttaagagtagtttcagaaccccctgaaatgcaaaataattattaacatccaaggtacatattgtatttattagatatgtttttgctgtttattgacatagatcaagagtgtggatttaggtgggtggaatttaaataatgtgttaaaaatacatcctattgatttgcatatttcaaacatttcaataacaagccaaagcgacaaacaagacgggcccccacttatgattaacggcgtttaagtgcatgatgataatttggacgtgtcgtgatttagtgccgttcgaagttcttgtttaagcggctatacgtttgtaagctaaggggcctttctgagcgcatggcaaaggtctgctttctgcatttaacgttcaagtgtgcttgatgcagaaatagtcaataagggctcaaagcggtagttcgtttcaatctaaccggaggtctggtttgccgccatgcaagtcaataatccagctagcatatttagctcttagtagggcattgaccccgccatcggcttctatacatttttactgcatttcgttattgctaccgtgcatagtctgcgcaggagagatctacatgttaagcgatgacgaactggcgcagctggatgagatgctgctttccatcccgatggagaatgaaggcatgcttctgagtgagttcgatggcttctgcgctgggttggttgtttgtcccgaaatgatcatgccaagtgaatggttgtcttgcgtatggggtgagggtgccgatcattttgccactcttgaagaatttcagtcggcgactgatctcgttatgcgtcactacaacgatgtagccgtctctctcacgccgccgcatattgaatatggccctctctttgatgaagatacgcggacgaaggaaatcctttgggaattctgggcgtgcggttttgaacgggcgatgcggctcagaatggatgcatgggaacagatcatcgaaagccctgatgaggaagctagatcgtcagtcacaatgatgcttgcgatatacaatattgctgagggaaaaagcgatttggcaaagaaatcggttagggagattactaaggaagccccggatcttatcccgaaattggtagtgaccataaacggctggacaaaatcacgcagtataaagggcggtctgccgccgtttatgcaatctgccaatacgccgtgcgctccgttgtcagggaagaaagttggtagaaatgagccgtgcccttgcggatcaggacgaaagtacaaacactgttgcagtgcgaattgagaattcacgacggcaaagttcggtaattgcataatacaggagtagagtggcatgcagaaatagtaaaaacagattgatatcagtgacttatgtggatttcaaaaagctacagacttaattacacactatcgtgtaactcactgttattactagttgtcctcgctatcataatccgcgtgtcgggggttcaagtccctctcccgctaccaatacctttaataacttagcaggcaacaaccaaaacctaatacgatattagtctctttttagtcacttatgtctaatgtgtttgaatgttctggtatgttcaaaatctttgaatgacttcctatatgcaaagactgaagctacagcacatggttttcgctcaacggctagtactatcctaattgaacggggatacgatcctgatgtgattgaagccgctttggcgcatcaggatggaaatgtggtgagccgcgcctataatagaacgacgtattggaaacaacgggttaaattggagcaagagcgggcggaattggtggatagatttaggttcgaaaactctaactctagttgaatgtaagtgacgtataaaagaatgccatataggcattctagtaacatttaattgtgcgttattttttcaaaaatccaaattacatcgcttacaataaatgtctgaggtcagagactattggataaaaacagagtttcatagatgttaatttttaatactcataaaaattgctttaaaacaagaaacgcgggccgtagcccgcgctctgatctgttgtagtctacgctacttgttaacggctcgactacgaaatctgaataaagcatacttgcgtttttcattaaaactgtcaactataaggtgaatatttaaagggtttattattatgcgtcttggtttggatattgggtcaaattctattggttggtggctgtatgagacaaatcagaacaatgagataatcgggcatattgtcggcggttcgcgcattttccccgatgggcgcgatcctaaatccaaggcgtcattagctgtaggccgacgcgaggcgcgttctgcgcggcgcatgcgggatcggtatttgcgcaggcgtaccgtattgatgaatacactggccactgcgggtctgatgccagactcacctgacgatcgtaaggcactggaaggactcgatccgtttgagttgcgtgcacacggcttgtcagaacggttagaactagtggaattgggtcgagctttgtttcatcttaatcaaaggcgcggatttaaatcaaaccgtaagacagacggcaaagacaacgaaggtggtaaaattaaagacggggctgcgcggttggatcaggctatactgacggctggagccaagacttacggggaattcctacacgtacgcagagtagcggcaaaagatgaacgggcaataccgccagtgcgtacacggttaggattggttcaaagtgatgataaacaggtttcgggatataatttttatccgacgcgggctttatttgaagaagagttcaccaagctatggacggcacaagcggcgcactacccaaaggttttaactgatgaattacgggacgaaatatggcaaattatcttttaccaacgtccgttaaaagaaccaaagatagggctttgcttctttgaagatgaaccgcgtatggccaaggcacatccgctgtttcaggagcggcgtttatatgaaaccgtgaatgcattacgcgttgtggaagatgggcatggagcacgccctcttacgctagatcaacgagatgcacttgtgctgaaactgcaagatgccaaaacggtttcctttgcacagttacggaaagttttgaagcttctcccagatcagagattttccttggagcgaggtaaccgtaccaaagtggatggtaacgaggtgcgctatgcgctgaaaaaagcctatggtgccaactggtctgtcctttcattcgaggatcaatgggcgatcattcaagccgtgcgcaaagcggaagatactgcaactttactggatcagttgcaaagtaaattcgatatgggtgaggatcaggctaaagaagtcgctcaggtgagtttgcccgatggatatgggcggttaagtgaaactgcaacacggaagatactggaaaaactgaaagcgggtgtcgtactttatagtaaagctgccagcgatatttatggctcgcattcagatgacggaacgggtgaactactggacgagctaccctattacggcgaactgttacaacgccatgtcattcctggcagtcacgacgcaaagcagcacgaccctgtaaaagatgcggccgaatattgggggcgaattaccaacccaacggttcatataggactgaaccaactgcgccgcttggtgaatgatattatccgtattcacggtatgccagatcagatcgtagttgagttggcacgggatttgaaaaatagtgaaaaagaaaagaaaaagatcaacgtggaaattcgcaaactgaccgatgctgcgattatgcggggtaaagaaattgaaacggaaataggtgaacatgccaataccggtcgcaaccgcttgaaaatgcgcttatgggaagattcacaccctaacgccttgctgcgctgttgcccctattgcagtggggcgataggcattacgtctttgtttgatggatcaacagaaattgaccacatcttaccatattcgcaaactttggatgatagcgttgctaataaagtcgtttgccatcaattgtgcaatcaggaaaaaagcaacaagcacccgtataaagcttggggacatattcccgcaaaatgggatgtcatctcaaccaacttaaaaaacctaccgcataacaaagcttggcgatttgcgcctgatgcaatggagcggtttgaaggcgaaagcggtttccttgcgcgtcaattgactgacacgcagtacctgtctcgtatttcacgtgaatacctgtcacggctttaccctgaccccaaaactgccccagtgtgggtggttcctgggaaattaacagaaatgttacgccgtaaatgggctttgaatgagcttctgcaagacagcgagaaccaccatacagtcaaaaagaaaaaccgtcaggatcatcgccatcatgcgattgatgccgccgtcattgcggccacagacagaggtctattacagcagatttcacgcacctcagcgcgtagtgctgaaatgggcaaaaaagaagaggctaatatagagttgccttgggacgggtttcgcgccgagatgaaaatcatacttgataatataacaaccagccataaacccgaccatgggactgttggcaaaggcagtattggagccagttccgggcagttacacaatgacacggcttacggattgacgggctcccaatcgagtactggagctgacattgttgtaacccgcaaaccactgggcagtttggggccaaaggatattgccaagattagggatgaagacctgcgcgataagctttggcagacgacccgagatctgtcaggcaaagattttacggcagctttacttgctttctcacaaaataatgtcatttatcgcggcattcggcgagtccgtttgattgatgcggtgaaggttatcccgattaaggataaaacgggtacgacctataaaggttacaaaggcgattcgaaccattgtgtcgaagtttggcgactgcctgatggtaaatggaaggctgaagtattgtcgacgtttgacgccaatcaaaaagggttaggggcgtcgcggccacaccctgcagcaaagttggtcatgcgtttgttcaagagagatatggtggctttagatcatccgaaacatggatcaatacaggccgttattactaaaatgagtacacaacgactggatttgtcgcccatgaatgaagcaaatgttgatgcccgctcaagagatactaatgacccctttgattatatacgcttgggtttaggaacattacaaaaatacggcttacacaaaataggaattgatgcacttggtagggtcaccgacccaggaccacataaactttaagactcgaatcaaaaaataagataatatcaatccattagccgaaaggtaacaatggatagaatagttgatattgcaacagataagcgacatttatcgcgctatcgcggatttttggtagtctctgaaggccatactgaattggggcgtgtgccgcttgatgatattttggccattgtcgtacacgccaatggcgtgacttatagtaattcattacttgcagaattggcacgcaggggtgctttagtggttatctgcggggcaaaccatgctcccctcgccattgtaaccccgattgagggccatcatgcgcaagcgggtcgcattcaaaggcaatggaatgccaagcaacccctgctaaagcaattatggaaaactttgatcatttctaaaattaaaatgcaggcggaagccttggcagcctttagtcaaaaagatgagcggctaaattacttggcaacacaggtgaaatcgggtgatcctgaaaatatcgaagcccaggcagcgcgtcactattggccgctgttgatggggcaagagtttcgacgtgaccgacagtcacctgggatcaacgggcttttgaactatggctatactgttcttagggccgctgtttcacgggccattgttgctagcggtctgcacccatccattggattgcaccatcacaacaagttaaacgcatttgcgttggcagatgatttgatggaaccgtttcgcccattggttgattgtgcagttttggggttgataaagcgcggggtggatgaggtatgcccagatgccaaatccgttttgacggccttgatagcatttgatctggatatgggtatgacccgttcaccgatgacaagcgcactcaacagcctttgcttttctttggcacaatcctttcagcaaggtaaaccaaacttgcttttgcccataccgccttcgcggctagagctgatttcactggggggtgctgatgggtcagcatgatgtaacttttttaagtgggtatagaattttgtggtgtcttgtaatgtttgatcttccaacggatacgaaaccgcagcgcaaagctgcgacaaagtttcgtgaattcttactggacgaaggttttgatcgtgcacagttttctgtctatgctcgtttcgtaaacggtcatgaaggattcgaagcacgtgtgcgccgcgttgagataaacttaccagattggggagatgtacaaatattacaattcaccgataaacaatacgagaatatccatcactattctgatcagggcagaagagcacgcagaaaaaaccccgaccagctggtgatgttttaaggattaacaatgcttttttcatataaaacccctgctaatttgttttgtttcaacaccttaacagaggctctattgtaatcattcagatttcgtagtccagccgcaactgcgaaatattaccaaaccgcgaatgttgaattgtaatcattcagatttcgtagtccagccgcaacctcggggaccgcaatcgcattgctgcccttattgtaatcattcagatttcgtagtccagccgcaactaattggatatgatgggcatgagttcgaatattgtaatcattcagatttcgtagtccagccgcaacatgtgtcatcacccacacctgaaagctgctattgtaatcattcagatttcgtagtccagccgcaacgtgtttgatgggcctataataaaattacccattgtaatcattcagatttcgtagtccagccgcaactagtctaccctataggaatacacaatagttattgtaatcattcagatttcgtagtccagccgcaacgtaagtgtgattgagccagtgcctttaaagattgtaatcattcagatttcgtagtccagccgcaacgccgtgtgatttgaaccctccaaattaactattgtaatcattcagatttcgtagtccagccgcaacataagggggtataggttcttttctatgaatattgtaatcattcagatttcgtagtccagccgcaactctaaaaaaggtggtacggtattaatgaaaattgtaatcattcagatttcgtagtccagccgcaactcctgattaactgtaccaaggtttaagtcaattgtaatcattcagatttcgtagtccagccgcaactgcaggctgctggcaagcttggcgcgcaatattgtaatcattcagatttcgtagtccagccgcaacaagatgactgttttacctttaatgctgcaaattgtaatcattcagatttcgtagtccagccgcaacgtcgtggcggttgcgtgcttaacccgattgattgtaatcattcagatttcgtagtccagccgcaacagcctgcccatcacgaattgcatatcaatattgtaatcattcagatttcgtagtccagccgcaacttaacagctattcatgcggtgcgggtaatgattgtaatcattcagatttcgtagtccagccgcaacgaacgtattgacggggtagcgcgggtcgatattgtaatcattcagatttcgtagtccagccgcaactacgaattgcaagctgtgattggtgaagatattgtaatcattcagatttcgtagtccagccgcaacgagagaatgccttggattgtggtggccaagattgatccaatttacattggaataaagtggtaactaggctcgaagcagacattcgcatgacagcagttattgacattttcctgcaacgc

SEQ ID NO: 3695 - DNA, 14874 bp, synthetic construct
  misc_feature 1..14874: note = Synthetic
  source 1..14874: mol_type = other DNA
cgacgggtggcagaccctcgaccagccaatcgagcccatgacccttgacctcgccgcctgatcaggcacaaatcaaaccgctcggaggacgccgctggagaatttcaaccactttcgagacacaacccttcgaggaagccgatatttttgacgatgcagggcagttgtcacactggcgttcgggctctcagcagatgctgcgccaaggttatgggcaatggctgtctttcttggcacgcaatcatgttcaggttctgaatgaatgccctctggcgcgcgtgcgacctgccttgatcagaaaatacataaatgagtgtcagctccgtcttgcgccgcagagtgtctacaacttgatggcggacatttgcatcttggtgcgcgctgccgcccccgatcaggattgggcttggttgcaccgcgttgcaaaacgtctcgcaaacaaagttgacagtgtttccatgaaaaagcgtgcacccctgacagcggctcagatattcaactggagtcttcgccgtatggacgacgtctgcgacgacacaagcctctctgagaaaaagcgcgccatccattttcgtgacgcccttatcattggctttctcatcgcgcgcccggttcgtaaacgcgctttgctcgcgatggacgtagacacgcacctcgtggttcgagggcagggcttttcgcttcacttccccaaggagggcatgaaagatggtcggcctcgggattatccgtttcctgaaaaactgacggttccgatgcaagagtatctggacgtgcatcggcccatattgctgggtacaaacggcgggctcggtctttggatcaaccaatacggcaatcggtttgcctacgatggtttcacgcggttgttcggaacccttatggagacccatctgggttgccatctgagaccccatagatttcgcgacatcgcggcgacatccatcgctgaattcgatccagtgcatgtcggtgttatccgggatatcctcggccacgcgactttggatatggctgagaagcactataaccgtgcctctcaggtgtcgagttgtaacgcgttgcagtctcttcacgaaaagctcttaagagattatgcaatctcgccgcacaattctcgaacgtcacaaaacccttgagttttctgcgaattgtctaggaccggttaagcgaggtgggcaggttctggcccttcattcaaagtgtgaaatcctacaagtgtcgccgatacatggtgatctgagaagaaattcattgagatacagaatactcaaacaagaaacgcaggccgtagcctgcgtttcaatgtggtgcaatcgaatgcttgttaacggctcgaccgcgaattttgaacatctgcattttcgccgagctcagtcttctagtcaagccgcaactaacacggcttttgcaggccagttagaaatcaaacagagttagtgtggacccaacctcttccgtgcgctatgctttatctgctttgatttgcgtatagaaacctagggtgcaccagggctgtagcgtagcattgcatggaccacgtagtttgatccttcaagcttgacagaaactttcatcggcgtcaataattcctaacacggtttatatagaggaaaatggttatgcgccttggtcttgatatcggaacgaactcaatcggttggtggctctacgcgaccaatggtggtgagattaccgaggtgctcgacggaggcgtccggatattctccgacggccgcgatccgaagtccaaagcttcactggccgtcgatcgccgggcggcacgcgcgcagcgtcgtcgccgtgacaggtacctgcgacgtaaggcggcactgataaaacgcatggctgcggcggggctgatgcccgccgatccgatcgaggccaaagctctggaattgcttgatccctatgctttgcgcgcaattggactggaccaggaattgcctctgacccatttcggacgcgcattatttcacttgaaccagcggcgcggtttcaaatcgaaccgcaaggccgacaagggcgacaatgaaagcggcaagatcaaggatgcgaccgcgcgtctggatcaggagatgatggcgaaaggcgctcgcacctatggggaatttctgcatatgcgccgcgccgcagccaccgatcccaagcacgtgccgaccgtgcgcacccgtctatccgtcgcgcggcgtgacaatgccgacaaggaggaagcggggtatgatttctaccctgatcggcggcatctgtccgaagagttcgagaaactctggaaagcacaggccacgcattacccggatgtcctgacagatgagctgcgcgatgaaatctctgtcatcatctttcatcagcgtcccctgaaaacgcccgcggttggtctgtgccttttctcgggatcgcatggtgttcccaaagaagacaaacgtattccaagcgcgcatccgttgaatcagcgccgtatcctttttgaaatcgtgaactccctgcgggtggcggcccgcggggaaccggcccgcgggctgacgcgggaggagcgtgacgcgattgttcacgcgctggacaacaagtcgcataccaaaaccctttcgggcatgtcgatgaagcttaaggcgcttggcaaggtgatcaagctgcgcccgggacaatcctttaccctcgaaactgccaatcgtgacgccatcgcctgtgatccggtgcgggccagcctttcgcatcccaaccatttcgggccgcgttggtccacgctggactccgatgggcaatgggacgtggtgcaaagaatccgtgcggtgcagagcgatggcgagcatgacgcgctggtcaaatggctaatggggacgcacagccttgaccgcgatcatgctgaaagtactgccaatgcccccttgccagaaggctacggccgtctaggcctgaccgcgacaaagcgacttttggctgctttggaagcggaggtgatcccctatagtgatgctgtggcggcttgcgggtggcatcattccgacgggcgcacgggggaggttcttaccgaactgccctattatggtcagatccttgaacgccacgtgatcccgggctcctatgacgagaatgatgacgacgtgacccgatttggccgcatcaccaatccaacagtgcatatcggcctgaaccaattgcggcggctggtgaacaagatcgtcatggttcacggcaaacccgatgagatcgtggtggagcttgcccgtgatttgaaactatccgaggatcagaagcgcgacgtgcagcgcgatatcaagaaaaacactgacgcggcgattgctcgcggcaagaagctggtagaggaactgggccagaaagatactggcgcgaaccggatgatcctgcgcatgtgggaagatctcaaccaagacgattgcatgaaacggttctgcccttattcgggcaagcggatcagtccggggatgttgttcgatggctcctgcgatgtcgatcacatcctgccgtactcgcgtacactggacgatgggtttgccaatcgcaccctttgcctcaaggaatacaatcgccacaaaaccaataagacaccgtgggaggcatggggcgacacgcccgcttgggatgcgatccagtccaatctcaaaaacctgccagccaacaaagcttggcgttttgctccagatgcgatggagcgattcgagggtgagaatgatttcacggcccgtgccctgaaggatactcaatacctgtcgcgcatcgcccgcacctatctggacgcattgtatgatgggacggacggcaagagccacgtctgggttgtgcccggacgcctgactgaaatgctgcgtcggcattgggggctgaacagcctgctgcccgacaaggatggcgcggtcaaagccaagaaccgcaccgatcaccgccaccatgccattgatgccgccgttgttgcagccacggatcgttccctgatccagcggatcagtaagatggctcaaagggacgaggtgaaaggtgccgaagacgttgcccgatccgtcccacccccttgggaagattttcgcgccgacatagcaacgcagttgacccgcatcatcgtcagccaccgcgccgatcacggacgtatcgacttcgcagcgcgaaaggccggacgggacagcacctcgggccggttgcacaacgacaccgcttatgggcttggtgaaggcagttccgtggtcagtcgtaaaccgcttttgtcactcaagccaaacgatattgaagtgacaacgaggggtgccaatatccgcgacgtcgacctgcagcggcatctcgcgcgggtcacgcgtgggttagagggcaaggcatttgaagtagccttggcggagttcgcggtcacctcaaagcttcctgatgggactgacaatccctactatggtttgcgacgtgtgcggctcgaagaatccttgcagcaaagagcgcgcatcgaggtccgagacagtaatggcaagcctttcaaagcttacaagggcgatagcaaccattgctatgaaatttggcgtctgccgaatggaaaggtggtgtcacaggtcatcacgacctttgaagcccacaaaattgatgccgacaagaagccccatcctgcggccaaacggcttttgcggatcttcaagcgggatatggttgctattgaaagggacaatcaaacaatcatcggatacgtacaaaaacttgaccccgccaatggcctatttatcgctccacatactgaggcaaaggcggatgctagacaccgtgataaagaagacgattttaggtttcttcagatgagtgctggccctctggtcgaagccaaagcgcgccgcgtctacgtcgatgaaattgggcgcctgcgtgatccgggtgcgccgagttaagcaagaatttggtgaatcgacagagttgcaatattatcaacacgttaatgattcgcgcggggcgtggagtatagcgtgtggaccagattatagacattgcgactgacggtcgtcacctgtcgcgggatcgcggttttctgaaagtttcggaggacggacaggaaattggccggactccgctcaatcagatcgccggagtgatcgttcacgcccatggtacaacttggtccacatcccttctgtgcgaactggcaggccgcggcgcgccggttgtgctctgctcctcaaatcacgcgccaaaatctgttttgttaccgattgagggccaccacgcgcaaggcgcacgtatgcgcgcgcaatggcaggccaagacaccgatgatcaaacaggcttggaaacagatcgtgactgcaaaggtgctgatgcaggccgcagcactcgcggcaattggagaaccccccgcatcacttcggatgatggcgcgcaagattacctctggcgacagcaccaacattgaggcacaggccgcccggcactattggccccgaatgatgggcccggatttccggcgtgatgcggcgggaacggaagcaaacgccctgctgaactatggctatactgttctgcgcgccgccaccgcccgtgctgtcgtggccgcaggtcttcatccgacaatcggcctgtttcattcaaatcgcggcaatgcctttgcactggcagacgatctgatggaaccgtttcgcccgcttgtggacagtgctgtcagaacgatttctaaggcgcgtggtgcgacagttgatagcgaggccaagcaatctctcgccaggctaatcgctatagacttgcccttaggtgatggccttacgccagtttcggtggccttgatgaaacttgccacatcgctggggcagagtttcgaggccggaaaacttacactcgcgctgcccgcgccgcccgactcgttgacgttcgcggggttgggccaatgacttcgaatgtgacatatttatcaggatatcgacttatgtggatacttgtgatgttcgatctcccgactgacaccaaaccgcagcgcaaggctgcaacagcctttcggaattttcttctcgacgaaggtttcgaacgcagccagttttcggtctacgcccggtttgtgaatggcaaggaagcctttaccgcccgcgtcaaccgaatcgaacatcagttgcctagttcgggcgacgtgcaaatcctgaacttcaccgaccgccaatatcgcgatatcgttcacttttcggatcagggtcgccgaaaggcccgtgaaaatccgcagcaactggtgatgttctgatgcgattcgttccgaaaaagatcaatagcccccggtttaagcccttccttcacaaggacttagccggaggtctattgtagctgttcaaaattcgcggtccagccgcaacgcgatgcagctgttgaccgccaccacatgcattgtagctgttcaaaattcgcggtccagccgcaaccgcccgagggcaacatgtggcgcgcgatgcattgtagctgttcaaaattcgcggtccagccgcaaccgaaacggaaacgaccttgcgttattatgcattgtagctgttcaaaattcgcggtccagccgcaactgccagccgcgccgcgtgaccgtggcgcgaattgtagctgttcaaaattcgcggtccagccgcaaccattttcccccacgggcagcgacacgccgattgtagctgttcaaaattcgcggtccagccgcaacgctggccgtggcgggcgcgagccacccgtcattgtagctgttcaaaattcgcggtccagccgcaactcgcggggggcgcagcggcggcgcagagcgattgtagctgttcaaaattcgcggtccagccgcaacttgtcggtctccatgtcatagggcggcaggattgtagctgttcaaaattcgcggtccagccgcaacgcctccatctgcgccgcgatctcactggcgattgtagctgttcaaaattcgcggtccagccgcaacgcaggctcgccggggttggtcttgctgtaaattgtagctgttcaaaattcgcggtccagccgcaactaattctcgaagtgggaacggataataataattgtagctgttcaaaattcgcggtccagccgcaactaaccgacctcctttgaaagcgtagcgacaattgtagctgttcaaaattcgcggtccagccgcaacccctgcacctatcttgccaactcgggcgtgattgtagctgttcaaaattcgcggtccagccgcaaccgacgcagtagcccccagagtgaggcgctgattgtagctgttcaaaattcgcggtccagccgcaactgaatctgcatcacccattccatcggatcaattgtagctgttcaaaattcgcggtccagccgcaaccgctcgaaaactgcgacgtgctttgcaaggattgtagctgttcaaaattcgcggtccagccgcaacgggcttgtcgcgccaggcgttgcgcaaggtattgtagctgttcaaaattcgcggtccagccgcaacacatcatcgcggacaacaagctggcgttgaattgtagctgttcaaaattcgcggtccagccgcaacccggtcggggtcaggacacgccgcagatcgattgtagctgttcaaaattcgcggtccagccgcaactggaccggggcgtgaatctcggtcttcgggattgtagctgttcaaaattcgcggtccagccgcaacgaccggcacgaggtactcgttgaagtatgtattgtagctgttcaaaattcgcggtccagccgcaacggccagagccagcggtcatcttccttgcctattgtagctgttcaaaattcgcggtccagccgcaaccatttacaccggcggaacagaaaaacgcagattgtagctgttcaaaattcgcggtccagccgcaactgatcgccccaccgttgcggcgtctgacaaattgtagctgttcaaaattcgcggtccagccgcaactgcttcgcccggttgctgatattgtcccagattgtagctgttcaaaattcgcggtccagccgcaacccgttgtcgcgcttggcccgcagaccctcgattgtagctgttcaaaattcgcggtccagccgcaacgcagaggccgagcgggaccagttgcgacttattgtagctgttcaaaattcgcggtccagccgcaacgggcgatgaatacaggcgctgcccgaccgtattgtagctgttcaaaattcgcggtccagccgcaacttctgtgtctgtggttgtttcgatccacatattgtagctgttcaaaattcgcggtccagccgcaactgatcacgttattgaagattgcgtttaccgattgtagctgttcaaaattcgcggtccagccgcaacccttgctcgtgaccggggccaatgatcttgattgtagctgttcaaaattcgcggtccagccgcaacccttgctcgtgaccggggccaatgatcttgattgtagctgttcaaaattcgcggtccagccgcaaccaaatgctggggtcgatgaacctgtttcaaattgtagctgttcaaaattcgcggtccagccgcaaccgcggcaggggtacagagcgacccaaaacgattgtagctgttcaaaattcgcggtccagccgcaaccaccgcccccaagatcggcacccgcaccacattgtagctgttcaaaattcgcggtccagccgcaacggttcagttcaaccgctcgcggcgtgttgaattgtagctgttcaaaattcgcggtccagccgcaacgccacagccctgcactgcgcacggcccatgattgtagctgttcaaaattcgcggtccagccgcaacttggtctagtgcaacggactttggcagtgcggacggctgcgatacggagtaaaatcatttgatgaaaacaaatagcactgcgtggctatttctgttcatcgatacgacgcaccaacgtcgttggaaggacgtgccattggttgcagcagttgaatgtgacacaccaagcgcgctgtctagggtatttgattcccgatttgcatgtttgggttccggtggtttgaacgggggtatcaatacaaatttagttaccacaagtatctgattttaaaaacctagtggtgccggttcgagtccggccgcgggtaccacgcgaccgacgggtcacgatggtcggcctgcattgttctgtggcctgccttatctgcggaacgccactggcaggttgaaggcgtggcgcttgcccggcaattgcgcgggtttcgagggcaggcgcgcgcgctgcaccgcctgaagcgccgccgcgtcgagcgcgcggtcgcccgaggattgccgtacccgcgccgccagcagctgccccgcgcccgaaacagtgagcgtcagatgcaccgtgccgcttgcgcgggtgccgcgcggatagcgtttctgcctctcgattcggctgcggatgctgccgccccattgggccatgaggctgtttcgggtggcgggatcaagggtcccggcgggcgtagatttggccgtgccgcccgccgtttgcccgccagtgccgcgcgccacttccctagggagggcgggggcggattgtgcgggctgtcggcgcggctcagcgcggtcggggcgcgccacgggtcggatgcgcggcagggcgggcgcggtgtcgaccaccggggacgcgtcggttgtggcgggcctgtcgagccgggcgctcatcgtggggcgagccggtgcgcggtcatcggtgctggctgtacgcggcgcgtccgactgtgtttcgggcgcttgtcttcggggcgcgcggtcgctgagttctggcgcgggcggcgacaggggggcggcctcgacctctggcaggtccgggtcgggggcggccatttgcggtgccgtgggcgtggccgccgtccggggggcggggtcggggcgcagcgcgaccggtgtcgcgtcagggcgcatgggcggtgcgggctgtaccgcctgctgcatcatttcgaccgggcgctgccaggcctcgaccagcgcggccatctgcgcgctcgacgcctcaagggtgacgctttcgctgccttgcgctccacccgcgccgctgtggcctccgggggcggcggtccagaccccggcatgcacggcggcggcaagcgcgaggaagccggtgaattccagaccgcgaatcatggcatccccgtcagaagttcaatttcggcgatgccgcgcgccgcgagttctggcagaaaccgcgcaagcgcctgcgcctcgagtcgcgcatcggcgcggatttgcaggggggtgtcgggtgcggcgcgggcggcaatcgcgtcataaaccgcctcgccccgcgcggtgttgaaggcgagctgcccctgtgcgtccatgtagagcgtgtcggcgggacgggccgcgttgtcgttttcactttcgggcagggttacgtcgaagggggcgggcggggtgatctgcgcgctcatcagaaagaagatcagcagcagaaagaccacgttgatcatcggcacgatggcctcggcggggcggcggcgtcttggggtggcgaagtccatgaccctactccaccacgatgagccgcgtcagaccgacggcgcgcagcgcatccgtcacggcgatcagcgattgcaggtcggccccgggggcggggcgcagaacgacggcatcgttcgtgtcgtccatcagcggggcgagggcggcgggtagcgtgtcgagcgtcacagcggttccgttgagcgtgatcccctctgccgcgatcccgatcaggcggggcgggccatcataggtggcattaccgttcctgccggtggataggggcagggtcatgtcatggccaaaacgcgaggccagcatgaaaaacaccagcagcaggaacaccacgtcgatcatcggcgtgaggctggggcgacgcggcgcgcggggctggccaaagctcatcatggcgcgcctcgctcgcgcggggtggtgaagatgcgggtggcggcgtcctccatatcggcctgcacgtggtcggcgacgctctcgaaccaggtgagcgccatcgaggccggaatcgccaccgccatgcccgcggcggtggtcagcagcgcctcccatatgccgccggcgaggatcgagggatcggcgctgttgccgctgtcctgcagggcctgaaaggcggcgatcatgcccagcaccgtgcccagaaggcccacgagtggcgcgatggtggcgatgagttcgagcacgcgcagcccggagcgtgcctcgttcagcagggatttggcgatgcgggtggtgtcttcgcgcgcctcgcgctcgccccaatgcggggccgttgccgcctccatcgccgcaagggccagccgggcgcgcaagctgcgtcgtgggcgcagcagtgccgtggcctccgtgccttggccgtgctgccacagtgccaccgcacgttcggttaccgcaccggaccacgcgccggtcagcaagagccgccagaccttccacaggatgagcgcgagggtcagcaccgagagcgccgcgatcacccagagcgcggggccgccgcgatccagaaatccgatgagcgtggagctatccatgttgcccctcctttgtcggtcgggtccatgcctgtgcgccttggcgcaccgcgtcaagcaccgcgcggcccaccgcctcgcccgtctcggtatgcaggcccgcgtagcgcgtcgggccctcgggtgccgcgatggcgatgcaatcggtgccggtgccggtggcgatgccggtggcaagccgcagcccggtctcggcgatggcgacggtgcgggcctgcgtggcgatgctcagcgcctccagccgggcggcgtcggtcaggcccgtatccagcaccaccgcgatattgatcgtgccccagccatgcgccgaggggggcaggcgactgcccacgcgctcggcattcgataggccgacggtggccacggcgcgggcggtgacggcacccgccgtggcgcgcgcctcgcgataggtgccgatatcgcaggaggtgaggaaacagaccgcgtccttcgcctgccgcgcggcgaggtcacggtcgagccaggcctcgacatcgagatccacgggcaggtcggcattgcgcacttcgcgccacaggatgcgtcgcgcccgcacctgaccggggcggttcaccgcccagctcagcaccggcatgtcacagcccagatcgagcgacagccaggggcgatccaggtgcaggcggctcatcgggtcacctcgagcggttgaaagacggggccttgcggcgtgtgcgcgtaatgcgccgagacatggaagatgcgcgcgaggttgtcgggtgtcaaaacggcatcgggggggccgtcggcggcaatgccgccctcgcccagcagaatgagccgggtgcaatggcgcgcggccagccccagatcgtggatcgcgacgatgacggcgcggccttcctctgccagccctgcaaagacctgcatcgtggaaatctggttggccggatcaagccccgcgatcggctcgtcggccatgaggagcggggtgtcttgtgccaacgcacgcgcgatcagcaccatcgcctgttcgccgcccgacagccgcgtggcggtgcggtggcgcagggcgtccagccccatcgtggtgagcgccgcgtcgacatgggtgcggtcggcctcgctgatgccctgtagccctgacaggtgcggggtgcggcccagggcgaccagcgtctcgacgctcaccggccaggcgatatcgcgcgtctgcggcatccacgcggcggcgcggccacggtcgcggggcgagagcgcggcaaggttgctatggccatcatgcgggacaagcccgaggatcgcacgcaagagcgtcgtcttgcccgcgccgttggggccaatcaggccgacgcattcccgtggcccgacgctgaagctgacatcgctgaggacgggccgcgcgcgcagccgcaccgaaaggctatcgacgctgagcagggtcatgccatctccgcccgtgtcttgtagatcaggtgcaggaagagcggcgcaccgacgagggcggtcagcacgcccaatttcaggtcgcgctcgggcaggaccagccgcacggcgagatcggcggcgagcaccatcgccgccccgccaagtgccgaggcccagagcagccgcgagggccgcgcgcccaccagagggcgcaagaggtgcggcaccacgaggccgacaaacccgatggcccccgccacggcggttgccgcgccaaccacgcaggcagtgcccagcaccagcgtcaggcgcagtcgggtgaggcgaatgcccatggcctctgccgcgtcctcgcccaatgtcagcgcatcaagcccgcgcccgagggtcgcaagcccgatccagcctaccaccatcagcggcagcgccacccagacatgcgtcatcgagcggtcggcaagcgagcccatcatccagaacacgatctctgaggcggcatagggattgggcgagaggttgagcaccagcgaggtgagcgcggcggccagcgccgatatggcgattcccgcaaggatcagcgtgatcgacgcaccgcgcggcccggccagcatcagcaccagcaacacgccggtgcccgcacccgcaagcgccgccagcggcaggccaagagtaaaggcggcggcaagcccggtatggatggccagcaccgcgccgagggcggcggagcccgacacgccgatcaggcccggctcggccagcgggttgcgcaggtagccttgcatcgcggccccggcgagtccgaggcttgccccgatcatcaggcccagaagggcacgcggcaggcggatctcgcgcatcaccaacggcagggggccgtcaccgccgaggaccaacgcggagatgtccgacaaggcgggggtgtccgacggcccggtggtgagcgaggcggcgaagagtaccgccacaagagttgagagggcgagggcgaggcggctcattgcgtgccctctggcaggacgcggcgcgcctcggtcaggcgctcgaccgcgttcaggacatgcggcgtaccgcagatccagtcgggcgaggtgatgcgcagcccggcgcgtcccttgcgcagcgcatcaagcgcgggatggcccagcaccgcctcggagcgcgaggtgccgggcaggggggcggcgctgatcaacaggtcgggggcggccatgacaagctgttccagcggcagggtgcccccgccgcgatgccccagttccgcagcgaggttgcgaaagcccgcggcgcgcaggatgtcatccgccagcgtgccgccgccgagcgtatagccgttggggtggtagagcgcggcgcgcgggcgggggccagcctcggcctcaagctctaccatacgtgcgtcgaattcggcgatcagcgccgcaccttcgttttcgcgccccagaacgcgggccatctgcgcgatacgcgcgcgggtgtcgttgagcgacttggcggtgtcgaactgttccacccgcagccccacccggcgcagcatctgcaccgtggcgggatcgctataggccccggcgagcaccagatcgggggccagcagatagacctcctcggcgcggccccgattgaccggatagccgcgcgcggcgtcggccatggcggaactgtgcggatcggcggccagatcggagaccgaaacaagctgccccggtgccgccagcagcatagccagctgatcggtgcacaggttgatcgacacgacccggcgcggagccgggtcggccggggcctcggttgcggccacggcccctgcaaaggcgagggccgcgccaagagatatgagcctagaaagacgcacgcagccccacgaaggccgagcgcccggcggtgttgaacccgcccgccgtctcgtaatcctcgtcaaacaggttctcgacgcggatataggcggtcgcattgtcggtgatcgcatggctcagcccgaccccgacaagggtatagtcacccacct

SEQ ID NO: 3696 - DNA, 14509 bp, synthetic construct
  misc_feature 1..14509: note = Synthetic
  source 1..14509: mol_type = other DNA
cgaggtcgagccggggcatctcaggcgctcaaggtgatctgcaagccgagatcgcggcagatctgcaggacaagaccgatgcgggcggtctccttgccgttctcgatcgcgctgaaagttgccgccgagaccccgctttgcatcgcggcttcggcctgatgcaagccaagcgccagcctgcgcgcccggatcgcctgtccgagctcggcaacggtggagatggtggtgagggtgtcggtcattgcgccatctacgatcgttgaaatgagtattgaggatgcaccaccttggagcccgcgtcaacgatcgttgaaattgcggtttgagatgggcagcccggcgggtcgtttcagtgatcgttgatatgcggtcccgagcaggccggggcagtcaccgatgcaaaggtgagggtcgtcgggctcaggcgcgagggctcgggaaggttgacagcatggttgacaacgtaacattttggttgacaaaaacaggtccaaagttgacagaacctaacattttggttgacaaacgacgctgaaaatgtcgtttttgtcaacttttcaggccagtttgtcaaccgagtcaacctcgaaaccccaataaaataagggttttcctctgccaaggttgacagattttcggaaaactttttttctcctgaaagcgcggcctccgggacggctcatccggaaacgaaatccatcgaaacaggatcgaaaaccccggtgctcggcatgacaacgcctcggcctacgacgatcgcaccggcgcggatttcgatctggaggtggtgatttcggtctcgtttcctgcgccgcgcttcgtcatatgactgtagctcatcagctgaacagctcttcagctatgtagacagcgcggcgcaggacggcgtttctccggttcgatcgaaaatgcgcatggggcgctcacaggctgcgatctcgcgcgggtgcaccgcgacatcatgcgtgatgatggatgcgactcagcgcgcgccccaatgggtctgacgcacgctccttggtcaggtgcgcttgtctttcgaaccgacatcaactcgaggagtggaggttgtgtctgccgcgcgtgattctgtcttgttctgcaggacgtcggcgccctccaccctgcttcctgcctgccgcttggatcgtgccgatgcgtcgtgccgcatgctgtcccacttgacactcgcctcaaagcggagaaccttccgccagcacttgtcgcgagaaacgcaaatctttcaaattgttagtatacgagacgccgtcgcccagagatccgaacctacatccgcccgctccccccgcatctgcaaatctcggcctgcacggtttcccatgagctattcttccaagacgatcggcactctccttcaggaggtgaataccacccatttcctgcccgcaatccagcgtccctatgtctggacgcctgcgcagatcatcgctctcttcgacagcctgctgaagggctatccgatctccagcttcatgttctgggcggtcgatgaagccacgaaagccgaggtgcggatctatcgctttctcgaaaactatcaccccgacaagatgaacgaaccaaccggtgccgaggggcgggaggttaccttggtgttggacggtcagcagcggctgacgtcgcttgtcatcgggctgcgcggaacgttctccgaaaaggccaaaggggcccgcaagaccaatgccgccgcctggtcgtcaaagacgctctggctcgatctgctgaaggacccgagcgaggaggacgaagacggcgacagcgacatgggggtcacctatggtctggcgttccacgaccgcaagccgtcgaacacccatcgcagccactggttcaaattgggcgcgatgcttgactacgaaagcgacgcccggctcgaggcactgatcgccaaggtgaaatccgagctgcatccgggtgtcagcgcctatgagcgcgagatagccgaaaccaccctgcggacgctgcatcgcgtgatctggcgcgatcaggcgatcaacttctacaccgagaccgaccaatccgctgaccgggttctggacatcttcgtgcgcgcgaacgatggcggcaccaagctgtcaaaggccgatctgctgatgtcgatgatcacctcgaagtggcagaacggctcagcgcgcgaggacatcttcggctttgtcgatcacatcaatcgcggccttggaacgcccaacaaggtgaccaaggatctggtgctgaaagcctgtctggtcgtgtgcgattacgacgtcgtctacaacgtcaagaacttcaccgccgacgccatcggcgagatcgagcggaactgggagttcatcaagcgcgcgatcgaaaacaccttccggctgatcaatcgtcatggtctgggcggtgacacgcttggctcgctcaacgcggtgctgccgctcgtctactacctctacaacacccctgatttcgattttcgcggctcgaccgaattcgagcgggtgaacgcggctgcgatgcatcgctggttgctcaacagcttgctggtcagcgccttcgtcggccattcggaccaaacgatcactacggcgcgggcgacgatccgcgatcatctgcgcatcgcgcgagaacgcgatttcccggtgcagaagctgttcgatgcgatggcgaagggcgggcggctgtcgcaggtcgacgagcgcacgatcgaggaactgctcgaactgcaatatggcaagccgcgcacctttgtcgcgctgtcgctgctgtatcagggcatcgactgggcagggtccagttggcacatcgaccacatcatcccgcaggccgacgcccaacgcaacgtcttgcgcgggcgcaacatgcccgagcatcggatcgtcgagatccttgaaaacgtgaaccgtctgggcaacctgcaactgctgcgcgccgacgagaatgtcgaaaagagcgacatgccgttccggtcgtggattaccgggcgcagacgcgacttccatgagttgaacatgataccggaacggctcgactattgcgatgcgatgtggctgcccgaattcgtgcaggaacgcgaaaagctgatccgcagacgcctgcttgcgcttttgggcggcgtgtcggcatgaccgaggcggccatggcacgcgcagatctgaagcgagcctgtctggcgatgctcgatgcaatggcgatcgaacacccggcgggacatcagggcgtctatgtcgcgcgttacctgctggtcagtcgcggtggcgaccggatcgggctgatgttcgaaaagggagagcggtccgcggcgaacctgtggttcgcacgtcgtttcgcggggccgctgtcagaggcgggtctgaccctgcgcgactatccggcaagcgcgctgcaccagctgtcgagcgacggcaaggcgcgcagctacggccgacattccgcgctgaaatcgatgcgcgaccttgccaatgtcgatcttgtgcgcatcaccatcgaacggccgaccgagatgcgcctgatcctcgataatctggctgcgctttgaagcagattcatgccggatgctcgatttcctgctgcgtccatttcgatcgggtctcgatcctgaactcaagatcgagcgcccccagcaccgacaggagggtgtctatccttgcggggctttcgccgcgctcgatggtcgagatcgtggcctgacgcaagcccgcgcgttcggcgaggtcgctttggctccagccgaggttttttcgggtgcgctgaatgacggcaccgatctgcttgggtgtgcgtgcaaggttggtcatcgcgcgattatgcgccaaggcgtataaatcgtcaatatgcgctgtagcgtatattgcctcgatcgcgtgctccgatgtcagcgtggcttcggcagaatgctcgaaaacatgcgactgctgatcgatgccaccgcagtcccgaccatgcagggcggcctcaagcggggagcggctgcaaggcgggatcggtcaacgaaggacgccggtcctgacaatcactggctgcatcatcgccacattcggtgcaggttttttccaccgtcatcagccttgtccgcgatggtgacccctttgtggcagccttttctgcaaggagtccgagcgaaagaccctgctttcggtccttttaactgtagataagcacttactcagaggcttccacacacacacagctgcatcaagccttcagcttcttccacgccgttccttcacgcttctccagcgctgtcagcgcaacgttcaccttcctgttcatctcttcccaggcaacgaacgagtccgcgagccgctttcctgcaaaaacgcgcggccgcggacctttgatccttcgcaccgctttcgccacatcgcgcttctgcgtctcgaggaaattttcgctcgcgcggtccatcgccatcaaaccgaccaacccggcgcgcaaccaggtctttgcacgccagcgctgcttttcattctgcagcacatcgctcccggtcctgatctgtgaccgggccgaaaacgtgggcagcttgaactggaaggtgcgcttttgcagcttgcttgcctgcagtgctttcaaggaagcgatgtcggtcacgccgatcgcagacagttcggcccccttcagcgtcgcttcgatccgcacccgtttccggtcctccgaaaggtcggtgaaactcccatccatgcgctgcgtgtcgatcaccttgtccatgagccggatcatcaggtcatcgtcgctcgcaccaagatacatcgttgcatcgatgggcgggatctcgtgcgcatccgggctcaccgctgacagatcccgttctcgcatggttggagcacgcaggagctttcgaacccctgtctctcctttcgcaaagaccgcgcgcgggcggctgttcttgttcgaccagatgtctcgcccggtccagatcgtgcgctgcatcgcacccagaagcaccgccctgtccttgtcacctggttggacagggtaggcgtcgatgctgatttcgagacctgtcacgcgcgctgcgcttgcttctccgaaagaggtcttcaaggcagcatggatctcggtgatccgcgccatgctggccggttcctgcaccttgatcgtgcaagcggtgaagaccccacccggtcccagatcctccggctcgatatgactgttccggtcgaggaactgtttcagcacccgctgcacatgctgcgcctgcgtcggccgcgcgaaatgaaagcgaacctcgatccagtcatacacagcttggaagcgatacgcgtccagatcgaccttcggcaccattgcgacacgtcctgcaaggcgacgctgggtgttcgtcaacacccgaacctcatgctcaaggcgcaaagggtcggcgagctttttcgcaaagagcagaagggcttcggtgggcaatctcatgcgcgtctcgtatcgaaacccgcgctgcagtcgcaagcggtttcgatggcctcggggtcgtgacggtttcccggtcacggcaaacggcagcaaagcgggatcgatgaccggggggggtgagcaagatcgcgacgcaggcgggcagctatccagctatcgagccagaaagctggctgtctagtttcctggggtgccttcaacgatggaaatattgatatcatatcgaaatcactattgatccaatttggtgatggcgctatatgatccgcatcaccaatgaggttcatcatgagcaagcccaaccccgccccctacagctggtccgagatcgaagcccaggtgcgctctgcgatcttctgccaagcctccattctcgcctgcctcggcccggtcgctgcagaggcggtcgcgcattaccttggtgtcgaccccgaccgggcgagcgcgttgagcgacggtttcaacgagggtctcgacaagaagcccgacactggcgtcgtgatcgagcgtcaccacctctacgacctcgctcgcaatgcctatgatttcgcctatcagctcgacggctatcagcgcgccagtcacgaagatcagtatgagatcagctgcgcggtgctgacgggctttccgcaaaccgacatgcacggcaacccgtcgccgctgtcatctgcctgcgacgaaccgctccggcgggttttcgaaaccttcgtcgcgcgctggaagttcatggacacgacgttcggtgctggcggtctcaccgtgcgcgagcttgcgcttttatcgaacatgaccatccccgccgtgcgcacctcgctcagcaaggaagggttcaagctcgacctgtccgggcgtcgtgacgatgacaaggggggcgtgcttgacctcgacaacgcgttgacctggctcatgcggcggcgcggtttcattccgaaccgctggtcagatggcgatcggcccggcatgaccgtcaccgaggtgtttgcgctgcctgacttgagtttcgacgccgctctgcgtcaagcgctcgaaatcagagcgctctcggctgtccagcttgctgcaactgcgcaggtgcctgcgacgtggcttgatgcgatcctcgaaggcaaatcggcgagtgcggatgtccctgcattgcgcgccatcgcccgcgtcttggcccagtctgaacccgaattcgtcggtcgcgcggtgcagcacctgctgagcttcgaggtgctgaaagcgcccagctgatcaccgggatttcgaactccaacccgtcagatccgagaccaagcgcgcgctcggtgaaagacacttgcaaatggtgtcggtgttgatgtaaccatacatcagtaacaggagactcatgatggccctttccaacgcggaaaaagtcaggcgctaccgcgagcgccagaaagcaaagaagcaagaagcgatgaagacgccgacgcagaacgccgatctgttcaagacgccgttcttcgaggtcttcaccctcgacgaccagtatgactcgcaatacgcgaattcgctcgaactcgccggtgtgcagccgctttacttcaccgacgacagcggccccgaagcctgcaccctcgacgatctgcgcgacgatttcgaggaaagcgggttctcgaaccccttcggcacttcgaagggtagctcgctcggtaaagccgaagtgcttatcggttgcttgctcgatgcggcgagcgatcttgcgcatcgggtgcgtgaatacaagcaaagcgagatccgcgcccgcatcaccgagatcgagcaagccgatctgagcgatcccgagacccggcgcgcggcttttgcgaccgtcgccgagttgaacgcgatgctcgccgaactcgacaaagagttccgctatccgattccgaaatggaaacccgacatccccctcctgtctctggaagaatggatggcgaactatgtcgcgagcatgaacgtcgtcttcgtgcgctgacgcgctccgcctcgtaaccaagacgacccctgccacaaacgggtgagtgtgacgctcgacccgaccggcgatgcgtggcctgatcgcgcatcgctcgatccatcatgcgcaaagcgcgccagcccccgcgacatcgttgtctcgcgggccgggcgcgctcatgcctgcgagagccgtgcttgacgagtgcgccttctgttttcgcccacgaagacattctgaccccacccaaaaagcgcacagcgcagaaagaaatctaaaatgaacgccctccacctgatccaagccatccccgatgaagacgacgccgcgcatcacgcggtcaatgcgccgtcgaaacccgcgcccgcgcttcaactcgttgcctcgacgctccttgatgatgcgactgagccctcgatcgacatcgaaacgagtgcccaggtgatcgaaatcgagcccaccacggacgattccggttcggagaatacgatttccgcaatggtcccgccggtcccgtcggtcccagccccgatcgaaaacgaagataccgcgcagcaatcgaaagtctcgacctcgatccctgacggttttgcgcttttcgaagatggcatctacgagctgccgagcgaagacgccgatcccgtcttcatctgttcgcctcttcgcgtcgatgcgatgttcgccgatcccgatggtcaaggctgggggcgggtgatcgttgtgcgcgatgacgatggtcgttggcacgatgtgccggttctgaacgccgagctcgcgcgtcacgcgcccgaagttcttgcccggctctttgatcgcggtcttgcgcttggtgcgcagaagaccgccaaggatcggttgctgcacctgatccgcagctggaagcccgaagcacgactgacctcggtccatcggctcggctggaccgacgacagcttcgaaagcttcgtgctcgccggcgaagtgatcggcgccgcgaaggttcttccgatgctcgcccaaggtcacggaccttcgcgccaccttgccgtgaaaggatcgatcgagagttggcgcgacagcatcggttcgaaatgccacggtaacccgttgatggtgcttgccgtctcgctcgccttctccggcccgcttcttgcggttctgaacgcggatggtggtggtttgcactttcgcggcacctcgtcgagcggaaagacgacgctcctgcgccttgcggcttcggtctgggggtctcgtggactgatcggtcagtggcgcgcgaccagcaacggccttgaagccacggcatctgcgctgaacgacatggttcttccgctcgacgagatcgccgagattgctccgcgcgcgttgcacgaagcgatctacatgcttgccaatggtcgcgccaaagcccggatgacgaaagacgcgacggccgccgacagcgcttcgtggcgacttgcgttgatttcctccggcgaggtcagtgttgcggagaagctgaaagaaggtcgtttcgatgcgatgatcggtcacgaagtgcgcctgatcgatatcgaagcggacacccgcacgcatggtgtattcgatacgcttcatggagcgaaaagcgcagccgccttcgccgatgcgctgcgcgcggcggcgcaagaccatcacggcgcggttggtcgcgaattcgtgcgaagactctcgattgtgctgcgcgacgaacaggcgagcgcgaagatcgagagcatggttcgcgaccgagtgaccgcgtggctgggcgccctgccaagtgcaccggatggtcagatccagcgcgtcgcgcgtcgtttcgcgatcatcgcggtggcgggtcgcctcgcaaccgcgatgaagctgaccggctggggcgagacggatgcggtcgatgctgcgcatgcggcttttatcgactggtatgagcgccgcttcggtgacaagcgcgatgcggttgacagtgtcgcgaaacgcctgaaagcgttccttgatgcggagctttcgagcttgcagcagctgaccgcgctgcaggtttccgatgccgacgtccaaggctggcgtgatgacacgcgcgcctatctgacggctgcgacctggtccaaactctatcccgatgccgagggtgcgacggccgcgaaagcgcttctcgatatgcagatgctcgtccccggtgacggcggtcgcctgatgcgcaaagctcctcgcggagttcccagccgaccgcggctttatacgctgaaccttgagcgcatcgacgcctacaagatcagctgacctcaccaacagcgggtccggtcccccggtcccgctggtcccaaggtccctgatgtcgcttcagcgcttcggcaccatcgctgcgctcgaggtttcagccggaacgagtgtggtccagctgacgccctgctcgaaggtctcatcgcggttaagaaaaagaaacgcgtcccgtaggacgcgcttcgatgtggtgctacttcgagcttgttaacggctcgaccgcgatctctgaactggaagcaaactatgcgaagcgttctgaaggtcaagcgaatcttgatcggggcgtgtcgcgatgtggacgggatgtattgaagggggccaattaggatcgggtttccactaggcttgaccggcaacttttacacgcctagcgtgaggcggttgcttcaattatcttcaggagtgattatgttccttcgtctcggactcgacattggcacgaattccatcggttggtggcttttcgagttgaatgggccagagacgaactctgagatcattcggtctgtagatggtggcgttcgcatcttctcggatgggagagacccgaagtccggtgcttctttggctgttgatcgccgtgcagcacgcgcgatgcgtcggcgtcgtgatcggtatctgcgccgtcgtgccagcttgatgaaggcgctcgctgcatccgggctgatgcctgtgaaacccgtcgaagccaaagcgcttgagcttctggatccttatgaactgcgagccaaaggattggatgaaaagctggagttgaccgcgctcgggcgcgctttgttccacatcaaccagcgtcgaggcttcaaatcgaaccgaaagacggatcggggggacaatgaaagcggaaagatcaaggatgcaagtgcgcgccttgattgggcgatgcgtgaagccgaggctagaacgtatggggaatttttgcacaagcggcgcgcgaaagcaccagatccgcgccacactccgggtgttcgcacccgtttgagtattgccgcacgtggcggccctgacagcaaagcagagcccggctatgatttctacccagaccgccgccatcttgaagcagagtttcacacattgtgggacgcgcaggcggagtattatccagaagtcctgacgcgggcattgcgtgatcttgtcttcgagaagatattctatcagcgtccgctgcgagaacccgaagttgggctgtgcctgttcacctccgagaaacgcattccgaaagcgcatccgctcgcgcagcgcagaaccctttacgagacggtgaaccagttgcgtatcaccgcagatgggcgaagcagtcgtccattgacccgtgatcaacgtgatatcgtgatcctggctttggatacgaaagcccccacaaagtcgctcacctcgatgaatgtcagcctgaccgctttgggcaagttgctcaagttgagtgacggcgagagatttacgcttgaaaccgagatgcgcgatgccatcgcttgcgatccggtgcgtgccagcctttcgcatcccgagcgtttcggcccgaaatgggtttcactcggttgggaggcgcaatgggaggtgattgagcgcatccgagctgttcagagcgacgcggagcatcaggcgctggtcgactggttggtgaaaaatcacaagctggataaagcccatgcggaaagggtcgcgtctgcgccattgcctgaaggctacggtcggcttggactgagcgcgacgcagcgtttgctcgatcatctgcaaagcgacgtaatgacctattccgatgctgttgctgcttgcggatggcatcactcgtccgagcgcacgggcgagtgccttgatcggcttccctattatggcgaggttctagatcgtcatgtcatcccgggcacctatgatgaaaaagacgatgagatcacgcgatacgggcgcatcaccaacccgacggtccacatcggcctcaatcaactgcgtcgactggtgaaccggatcatcgagacctatggcaagccgacacagattgtcgtggaactggcgcgggaactcaaacagtccgaagcgcaaaagcgcgaggtgatcaaacgtatccaagatacgacggcggcggcgaaaaagcgcagcgagaaattgcaggaacaggggtgcccggataacggccacaaccgcatgctccttcggctatgggaggaacttggtccggcgatcggtccgagatgctgtccttacacgggcactcccatcaacgtctcgatggttctgaacggcgagtgcgacgtcgatcacatcttgccattttcgcgcacgctcgatgacagcgttgctaaccgcaccttgtgtttgaaggaagccaatcgtgagaagggcaatcattcgccatgggaagcatggggtgacaccccccgctgggcggtgatcgaaggcaatctcaagaatctccccgaaaacaaaaggtggcgatttgcgcctgatgcgatgcgacggtttgaggacgagggtgattttctcgaccgtgcgcttgtcgacacccaatacctcgcccgtatttcgaggagctatctggacacccttttcaccgaaggcgggcatgtctgggttgtgcccggcaggctgaccgagatgctgcggcgacactggggattgaatgcgctgttgagcgatgcggaacaaggggcagccaaggccaagaaccgcacggatcatcgacatcacgccattgacgctgctgtggttgccgcaacagatcgcagccttctcaaccgcataagcaaagcctccggtcaaggcgaggcggcagggcaaactgccgaactcgtcgcacgcaatacgcccgcgccgtgggaaggttttcgcaaggacatcgaaagccaacttgatcgcattgttgtcagtcaccgtgcggatcacggtcgcatcgatcgagaggggcgcaagaacggacgcgacagcactgctggtcagctgcacaatgacactgcctatggcgtggtcgatgccggaacggtcgtaagtcgcgtgccgctgctgtctctctcggctgccgacatcgtcacgggctcaagaggcaaaaacatccgcgatccacagttgcaaaggatgcttgaggtcgcgacccgtggcaaagaaggaaaagcgctggaagcagcgctacgcgatttcgcggcaaaacccggtccgtatcaaggtatccgtcgcgttcgcttgatcgaagcactccagcaaagcgctcgggtcgaagtcggttcgagacctgatggacgcccattgaaagcctataagggcgacagcaatcattgctacgacctttggcggcttcccgacggcaaagttgtccctcaggtggtcaccacattcgaggcgcacagtcttcccgacaaacgcccgcatcccgccgcaaagcgcatcttgcgagtgttcaagcgcgacatggtcgtcctggagcgcaatgggaagacggaagtcttttatgtgctgcggatgcacgtcaacaatggcttgtatctcgcgccgcaccgtgaagccaatgctgatgcccgcagcaggaacaaggacgaccccttcagactcctgcaaattggggcggggccgatggtgaaggcgggtatccgtcgggtatttgtggacgagatggggcgtttgaaagacccaaccgcttcaaagaagcagctcttggagtaaagagtttcgtcccgggcatcttaattaaaagaggcgcaccgaatggatcgagttgtcgatatcaccactgaaggccgacatctctctaaggaccgcggttttctgaaggtcagcgacgagggctgcgaagttgggcgcatcgcgctcgacgaaatcattgccgtcgtggtccatgcgcacggcacaacctgttcagcctcgctgctcgctgagctggctgatcgtggagcccccgtcgttttctgcggttccaatcatgcgccccggtcggtgctcatgccggttgaggggcactacacgcaaggagcgcggttacgcgcgcaatggcagacgaagctgccatttctcaagcgggcgtggaagcagatcgtggtttgcaaaatcgacatgcaggcctcggttctggaagcgttcgatcagccggctgcacccttgcgcatgatgcagcgcagcgtggcatcgggcgacacgtccaacgtagaggcacaggcagcgaggtattactggccgcggctcatggggctcgcgtttcgtcgcgatcgagatgcgcccgatgtgaatgcactgttgaactacggatataccgtcctgagatccactgccgcgagggccgtgatcgctgcggggctgcacccgaccattggcttgcatcacaccaatcgtgagaatgcctttgcactcgccgatgaccttatggaacccttcaggccgctcgtcgactgcgtcgttcggggactcgcagagcgaaaaggaccggaagtggatacggacgcgaagcaggagttggttcgggttatcgcactcgacttgccacttggtgacggcacgacgcctgtatcggttgccttgagcaaactcgccacctcgttagggcagagctttgagacgaagaagcttgagttggcactgccacgtcccccaggctcgcaaacgttcttggagctcggatcatgatccaagcggccgaatatttgtcagggtatcgcatcatgtggattctcgtcatgttcgacctgccgaccgacacgaagccgcagcgccatgctgcgacagttttcaggaacttcctgcttgacctgccccccggaagttccctcgccgtgatgtagagtctgcccaacctgagaaggagcagacgacatgaggaaaagccgtttcaccgaggcgcagataatcgggatgatcaaggagcaggaggctggtttgcccacctccgagctttgccggaagcacggtctgagcccggccacgttctacaagctgaaggcc

SEQ ID NO: 3697 - DNA, 14292 bp, synthetic construct
  source 1..14292: mol_type = other DNA
  misc_feature 1..14292: note = Synthetic
gatgactggttgcggatcgcgctcacacagctcgaactgatggggctcccgccctttcaaatcccttgggttggggggcggcacatcgacgcgtcatgcgaccacatccaccttgcgtatctcctcatgactttcacgggcatgcccctcaaaccgcgcctgtcacggcgcggaacggaccggaaccatcagcgcctcgccaagctgctgggactgcctgtgccggagtatttcgacccgtccgtgccgacgctcacgccaccgaccccacagcggaacctcaaatcaaagaacgcccggcaactgcacgcggcactctcggagacattcgcgcaaagcccaccgaccaccatcgagatgctcgccgatcgcctgcgcgatcgcgacgatccgatcgaaatcacggtggatcagaacgtgtatggccgcgagagctacctcttcgaaacatcccacggcgcgctctatggcggcaagcttggcgcagcttgggagccccgtcatcttcgcacccgcctcgaccttgcgatggccctgtccgtcgtgggcgtcacactatccctccgcgcaatccgcaaccagctgaaagagctgaccgatgccaaacgaaccgaccacgctgaaacccgcgaccgacccgacggtgatggaaaatctcctgatcgcgatcgacgagaaaacggaaagcctgatggcgctgcgagaacttctgagattgctcgagaccgagcaatcggaattgggcaaagcgcttctggacgccctttcgatgatgacaacggaacttggggcgaacaggagcatccgccacatgcaaatggacgccctcaattcgatcgaggagcaacgcgaggaactcgatcagcggctgagcgcgctggagagacaggacggcaacctcgagaggaaactcgatcggatcctgaggatcttgaacctgccaatgagctgagcttcggcgcctggctcgcgcgggtgctgcacctgctacggtcgaacttccgcaaatggcggtggcagaaactggcggatcggccagctctcggcgtgatgttcgaggcaggcgaccgggccatcgtttcctcgcaaggggtcgctattctcaagaacggccccgatgcggcgcggcttgcatcgcttttcgagccgggccggcctcaggctatcgccgatactgaaaccggaggattccctgcgcctgagccgtcaccctatgatgacgggccggggatctagcgatttagtggagcaaaccctagtgcgtcgtcgattcaattgcggattaagtgggccatgaaagtgccgtgacttgctcttacgctccgtagctgttctgtgccatcgcattttccggtttcggatccagttggaaagttcctgcttttcggtcaggcgcatccttggatctgtttagcgaacggtagcgcagaccatctgcctgacttctcagcaagcaaacctgcgatgctggaaaaaggaaacgcgccccgtgggacgcgcttcaatgtggtgctacttcgagcttgttaacggctcgaccgcgaattctgaacatcccattcctaaggcgcttcaggtctcaagtccagacgcaacttgacagcaagcgatgcagaagccgatcgtgacaaaaatttaagtaataaggatttttcagtcatgcatacccgtctcggcctcgatatcggcaccaattcgatcggctggtggctctatgaaattgatggggccgaaactaacgcccggattgtcggtgttctcgacggcggtgtgcgcatattctccgacgggcgcgatccgaaatccggcgcttcgctcgcagttgatcgtcgcgcggcccgtgcgatgcggcggcggcgcgaccgctatctccggcggcgcgcgaccctcatgaagcttttggcccggagcgcgctcatgcctgcagatcccgccgaggctaaaaagctcgaacgtctcgacccctatgaactgcgcgccaccggactcgacgaaactctgcccctcacgcatttcggacgtgcgctgttccacatcgaccagcggcgaggcttcaaatcgaaccgcaagaccgatcgcggcgacaatgagagtggcaagatcaaggatgctactcagcgccttgactgggccatgcatgacgcaaaggcgcgcacctatggcgagttcctgcacatgcggcggagcaaggccgaggacccgcggcatatcccgacggtgcgcacccggctgagtatcgccgcgcgcggcggtcctgatgcaagagaagaagcgggctacgatttctacccagaccgccgccatctcgaagaggaatttcaccatttgtgggaggcgcaagcgacgcatcacccgacggttctgaccgaggaactgcgcgatctggtcttcgagacaatcttctaccagcgccctttgaaggaaccgaaggtgggcctttgcctgttctccgccgaagagcgccttcccaaggcgcaccccctgacccaacggcgcgtgctctacgaaacggtgaaccacctcagagtcacttcggacggacgcgccttgcgccccctgacgctggaagagcgcgatacgatcatccttgcgctcgacaacaagaagcccacgaagacgctctcatccatgtcgatgacgctcaccgcgctcgccaaggcgattaagctccgcgacgtcgagcgcttcacgcttgaaacgggggtgcgcgactccatcgcctgtgacccggtgcgggctagccttgcccatcctgaccgcttcggtccacgttggtcggtgttcgacggggagacgcaatgggaaatcgtatcgcgcattcgggctgtgcagagcgatgccgacttcgaggcgctggtatcttggctgcaaaaaactcatggcctagacgccgagcatgcgacccacacagccaacgcgtcgctgcccgaggggcatggcaggctcggacttggtatcacgcgcgcgctgctaaaaaagctcgaagccgatgtcgtcacctattccgaagcgatcgaagcctgcgggctcaaacacagcgaccagcggaccggcgaggatctcggcacgctcccctactacggagaggtgcttgatcgccacgtcattccaggaagctttgacgaaaacgacgacgacgtcacccgcttcggccggatcacaaacccgaccgtgcatatcggtctcaaccagttgcgccggctcgtgaacaagatcatcgaaacgcatggcaagccagtgcagatcgtcgtcgaactcgcccgtgatctgaagcaatcagaagcacagaaaaaacttgccatcaaacgcatccgcgacaccaccgcggatgccaaacggcgctcgtcgcagcttgaagagcttggcgtcgctgacaatggccataaccggatgctgttgcggctctgggaggatctaggcccggccgtcggcccgcgcagctgcccctacaccgggcggaccatcagcacgaccatggtcttcgacgggtcctgcgacgtcgatcacatcctgccctattcccgcacgctcgacgacagcttcgcaaaccggacgctttgcgtgaaggaagccaaccgcgataaaggcgacaaaaccccctgggaggcttggggtggcaccgcgcgatgggacgcgatcgacgccaatctcaagaacctgcctgaaaataaacggtggcgtttttctcctgacgcgatggagcggttcgaaggggaaaaaggcttccttgatcgcgccctggtagacacgcaataccttgcccggatcgcgcggagttatctcgacacgctctataccgagggcgggcatgtctgggtcgtgccgggccgaatgaccgagatgctccgccgtcactggggtctgaacgcgcttctgagcgatgcatcaaacggcgcggtgaaggccaagaaccgcacggatcaccgccatcacgcgatcgacgcagccatcgttgcggcaacggatcgcggcctactcaacaagatcagcaaagcggcaggacagggagaacaagctgggcaatctgccgagctgattgcccgcgacaccccatcaccttgggaagggttccgagccgatctggaacatcagctgaacaacatcttagtcagtcaccgcgcagatcacgggcgcatcgaccgcgaaggtcgcaaactgggacgcgacagcactgcgggtaagctacataacgacactgcctacggggtcgtcgatgacgccacggtcgtcagccgcgtgccgctgctctcactgagcttggtcgatatcgagatcacgtcgaaaggcaagaatatccgcgacccgcaactgcaacgcgcgctggcgactgctacccgcggaaaagagggcaaggcgttcgaggccgcgctgcgcgactttgcagccaagcccggcccctatcaaggtatccgacgggtgcgcctgatcgaagccctgcaaaagagtgcccgcgtcgaagtcggcctggatcaggccgaagaaggcccgctgaaagcctacaaaggcgacagcaaccattgctacgagctctggcgcctgcccgacggcaaggtgaaacctcaggtcactacaacatacgaagcacatacaggtgtggaaaagcgcccgcacccggctgcgaaacgcctgctgcgggtcttcaaacgcgacatggtcgcgctggaacgcaacggcgaaaccctgatctgctacgtgcagtccatgcacatcgcgaatggcctgtatctcgcgccccatttcgaggcgaacgccgacgccagaagtcgcgacaaatccgatcccttccgcttcatccagatcggcgcaggccctctggtcaaggcaggtatccgtcgtgtcctcgtcgatgagatggggcgcctgcgcgatcccggcccgccgcgctgagcggcgcgattcgccaaaaccccagaaatatgccatccttttttcttgggggctctggagggaatggtggatcgtattgtcgatatcgccacggatgggcgtcatctgtcacgtgaccgaggatttttgaaagtcagtgaaaagggggccgaagtcgggcgcataccgctcgacgagatcgcggctgtcatcgttcacgcgcatggcacgagctggtccaattcgttgctcgccgagcttgccgatcgcggcgcgccggtcgtcatctgcggcaccaatcacgcgccgagatccgtcctgatgcctcttgaagggcatcacgcgcaaggcgcgcgcctccgtgcgcagtggggggcaaaacttccgctcatcaaacaggcgtggaagcaggtggtttgcgcaaagataacgatgcaaagcgctgcgcttgcttccaccggacagagcgcggcacctctgcacatgatgatccgcaaggtttccagcggcgatagcggcaatctggaagcgcaggctgcccgctattactggccgcgcatgatgggtgatacatttcgccgcgatcgcgaagcgcaggatgcgaacgcgctcctgaactacggctacacggtgctgcgcgccgcgacagcccgcgctgtcgtcgcggctgggctgcatcccggcattgggctacaccatgcgcacagggcgaacggtttcgcccttgccgatgatctgatggagcccttccggcctctggtggattgcacggtgcgcgcgctcgtcgcgcgcaatggcgatcaggtcgacagcgaggcaaagcagagccttgcccgccttatttcactcgatctgccgctcggcgacgccacgacgcccgtttcggtcgcgctcggaaaactggcaacctcgctcggacagagtttcgagaccggccagcttgcgctcgccctgccctcgccgcccgatgccagtgagttgtcggagttgggcgcatgagcaaccaaagtcatttcctttcaggatatcggatcatgtggatacttgtgatgttcgacctgcccaccgacaccaaaccgcaacgcaaggcggcaacggattttcggaacttcctactcgacgagggcttcgagcgcagtcagttctccgtctatgcccgcttcgtcaacggcaaggaagcattccagacccggatcaatcgaatcgagcgccatttgcccgacaaaggtgacatccagatcctgaacttcaccgatcgccagtatcgtgatatcgtgcatttctcggatcaggggcgccgcgctgcccgaaaaaacccggaacaactggccttattttgacgaagattctgcgaatccaacagactgaaaacctctcaaactcctttaacttcaggagcttgagcggtgatccaggctagcagttcagaattcgaggtccagccgcaactctcggagcttcgccctcgcgccggtgttgaggctagcagttcagaattcgaggtccagccgcaactcagaggatgacctgatagcgcgttgtgcaaggctagcagttcagaattcgaggtccagccgcaacgtaaagaacaggtaagcgcggaaggtgcgaaggctagcagttcagaattcgaggtccagccgcaacacctatgcagctgcctacgctgaggcgggaaggctagcagttcagaattcgaggtccagccgcaactcacgatcccttacacaccttggaaccccaggctagcagttcagaattcgaggtccagccgcaactgtgcttgctgagagtgcgggaccgccgggaggctagcagttcagaattcgaggtccagccgcaaccctccggagcgcatcacgatcaccgtgaagaggctagcagttcagaattcgaggtccagccgcaactggacgctcgctgacaagatcggcgggataaggctagcagttcagaattcgaggtccagccgcaacacagtcaatctgcggatcgacgagattatcaggctagcagttcagaattcgaggtccagccgcaactatcgggccagccgtcgccgacattcgttaggctagcagttcagaattcgaggtccagccgcaactccgtgcttgaccggttcgccagcgcagacaggctagcagttcagaattcgaggtccagccgcaaccgggcattgggcccaatgagccgctgccgcaggctagcagttcagaattcgaggtccagccgcaactgcattgcatcgctccagtggacagggaagaggctagcagttcagaattcgaggtccagccgcaactaccggataccgcacgaaacttggccgcataggctagcagttcagaattcgaggtccagccgcaactgcggagctgctcagcagcagaaaacgcaaaggctagcagttcagaattcgaggtccagccgcaactggcgccgatgtatgaccgcagcctgaaaaggctagcagttcagaattcgaggtccagccgcaacaggaatatgagcgatgctcaagaccgttgtaggctagcagttcagaattcgaggtccagccgcaactcctccgtcgttgcgttctcgtcgacccagaggctagcagttcagaactcgaggtccagccgcaacaccggaagcccggtgctggcaacggcggtgaggctagcagttcagaattcgagatccagccgcaacgaccggaggtgacaagccagcttgtcccgcaggctagcagttcagaattcgaggtccagccgcaatggccagatcatcgacgcgatgcccgagactgatcaaactcaccaaaaactaaacgagaaggcaggcaggtgggcatccaaagatagcgctcccaaaaaccatctcgtcaaaacacttgccgcccactcccgaaacatcaaaaacgccgagcgatcgaaaaaccgacagaactgtcaccgaagacatcggcggaactctgtgttcgggaataagaaacctcggcgctccagcgtgcagggatccacaatcacgacagccgtatcgttcgatgttgaccggcgactgtctcagccctctggctcagcaagagctttagaaagtagacgccggatcatctcaggtcgagacggcaggtcgtcttccagctttcttcgatcatcgagtgcctggagcatttctcgcggcaggcggagagtcacagcctcggtatcgacgcgcgggcgtcccatcttctttttttccatttcaacgcttctttttgttgacttaataacgtttcaatgtcatatttgacgagcgaaggcaagggctcctaccccctcgccccgctctgaccacagccatctcagcacaggagacaaccatggctatcatctcgaatatcatccagctcatccggaatgaagacgcatcagaggaaaccatcgcgcccatcctcactcgcttcccgcattttctggaagcgctcgcagatttcctcgactacgagcactaccttgcggaaacacaaagctgggagccggccttcagccactgggagaacgcctccgcgcgggcccaagaagacatgttccggcttcaacgcgagattctgaacgaagagccccgtctcccggtcgaaaaacctttgaaattgatcgtgtttggcctgagcctggcgatgcgtgacgagaccggcgcacaccgcgatcgctttcgcgatctcgtccgctgtcgcggaaacgagcttctcatcaaggaaaagcgcccgggtgatcggcatgtgaacgacctgctcaagcggacgctcattttgttcgatcagtttctcgacctctactcggttgatcagaccgcgcccgatacggcgacggcttctcactgatcgactgaagtagcagcgctctttgatctcgaccgagaaactcggtcgagactgggcctgcataccctccaaaacattacaaaccacgtgcgcagttcactgcgcccgcttctccctacgcattcaaaggagggtctcatatgacccaaacgaacaaaaccgttctgcaaatccggggcgagaaccacgtcgtccagcccggccaaatccataagcgctggagtgatgccgcagaaagcaagggctaccgcgtggtggcccgcgtcaaagacaagaatagcctcgctctggaatgcaaaacttgcggaggccttcacgtcagccgttactatgtcttgctcaacttccagcccggctgtccacattgcattgaggcgcgctggcgtgagaccgcgaaagacgcgggcgtagagtttctgcgccgcgatccaaagcaccggcactacgctttctatcggacggaatgtggtcacgaaatccgacgtcagttcaccttcattgaacgtatggcgcgcggcgaaacagacgcgcgctgcgagatctgccaccacgcacgtgaacaagaggaagccattcagaaaggctgggaactcgtcggtcgcgatcctaagggtgatgcccaatgccgaatttaccgccacgccgaggggtgcggagccgaggcacggatcgtccgcaacaatatgcagaccgggcgtttcacttgtcccgggtgcggcgagaactggtcgacggggccgagctatctctatgcgatgaaatttgcgctcgaaaccgggaccgaagcggtgaaagtcggcttctcgcgcaaccccgaatctcgattgaaataccagctccaccgcaatcccgacttgccgcgcgagttactgctcaaggtgccgatgcgcagcggacgccacgcgcaacgcgttgaaaaacggctgcataaatggctggcggcggagttccccgacgatttggtgccgccggaggagttcactgatctactcaaggtcaaatccgagctttatcgggcgggccttgaagcaacgatcctgcgccagatgcatcgcctccaacgtaaggaaagacgcgcagccgaacgaagccggattcgcagccgatcgcgctccaaacggatgcggcgcgcgcgtcgctaagccccatcgctccttcaaatgacccaaacggtcccgcgcctcgcgggaccgccctgcccctacatgcccacaggaccctgccatgacccaaacatctctcgcaccgtctctgaccaacctgccctggagcggcctcctcctctgcgctctggcccggacacaatcgcctgacagcgccgctccgatctcgccccctgacctcaccgggctcgatccccaggatcagctcgcactgatcggcgaccatctcgacgctctcgacgctctcgacgctgatgaacgcacgaggacggcacttgcaccacaagacgccgatgcgctctcactctggatcgcccccagagtcacgggcctgcgcccgaccgagctcgcgctgatcctgcggctggccgcgaccttcgaaacgcaagatcgcatcgatgccctgttcgaacccggcgcggtcacgctgatgaccggcgcgtcgcggtcggaactggccgatgccgccaccgtcctcaaagaccatttcctacccgccgatcgagagatcgcgctgcgcccgttgcaacgactgaagcaacacaaagatttgtcgatccacaccctcggcgagatgctgcggtccgacatcatgcccgagatcgaagaactgtttgagggcaccgaaccgctgctcattctgatgcctgacgaaaccgcgttgcccgacgcgcttgcggaggcgctgcctgcccctctcaagctcgcgccgctgtcgcgccagatcatcctagcgctgctccatctgacctacgcgcccttggaccttgccaatctccctgccttgctgccgagcgaggccgatttcgaaacgatcagtgccgccgcgctgagcttcgcgctgcgcgcatcgagcgccgaggaagccgcgcgtcggatcacgcgagcgcttccgaaacccgcgcccacgccgcaggggccgacccttgaagatctgaccggcgccggtgaggcgctgcttaccgcccggcgcatcgtcgcggatctggcgctctggcagagcggcgaagtcgactggtcagatgtcacccgatcgctcctgcttttcggccctcccggcacgggcaagacctacctcgcgcgcgcgatgggcgcctcggccgatgtgaacttcgtctccgcaagcttcggcgaatggcaagctgagggccatctgggcaagatgctcgctgcgatgcgcgcgagcttcgaggaggcgcgcaacgccgccccttcagtcctgttcgtcgacgagatcgacgccgccggctcccgctgggcgcccgaccgccacaaccgcgagtatcgccgccaagtcatcaacaccttcctggccgagatcgacgccaccgcgcgcgcagaaggcgtcgtctttgtcggcgctacgaatgaccgcagcgcacttgaccctgcgatcctgcggccgggtcggctcgatctgcacgtcgctgtgcctctgcctgatgccgccacgctcatcggtgttctgcagaagcatatcaatctgcccgacgaccagctgcgccaccttgcccaggcagccgtggggatgagcgcagccgatctcgatgccgcgatccgagcggcaaagagctcggtgcgggcgaaaaagcggccgctcgaactccacgatctgcatcgtcagatcggcggccttcagcaaacagatccagaggtgatctggcgctccgcggtccatgagatcgggcatgcgattgcttttgcagagctctgccttggcaccatcagccgcgtcctgatccgtcgggatggcggaggtgaagcgcacccgaagccgagccgagcgatccaaaccttggccgacatcgaggacgaattgaccttcctgctcgctggtcgggccgccgaacggctggtgctgggcgaggtatcggccggggctggcgggtcggcggactcggacctcgcgttggcgacccgccgttgcgtcgatatcgagacacgctacggcctcggtcaccacggtcgcatttggctcgatggcatcgacgaagtgactctccgcaatccgcacgtttacgcgaaagtccgcaagcggctggaaacagccgagcggcgtgcagacgcgttgctggaagcacaacgagaccgtctcgaggctgcggcgcgcgagctgtgcgagcgccaggaactgggcgaacaagagcttgcacggctcttgagccccaattcggatcggcgttcgcagtcctcgcgcgcggaacggaggacgaacgagattgcgccgtttgcgtgatcgcttcttcccgctcgccgcacctacccgccatgttcgaccaagattacgcaatcttggtcgatatcagcgcttccaagcccccaaacaggcccacgatgctgatttctgtggattacgaagcgcttacccatgaatgagacccgcgcatgacttattatgttcctatcacccgcatgggcctcccagcccagatcagaccccatcgagatcgtcaccgcaaagcgcgctggcgtaaggagcaactcggcctatggcgcgagatcagagacgtcatgcccaatgccatcaggcgccttcggcgccggatggcgctggcatgcaatcgtctcaagcccacggcgatcaaacgtgtcacccctctttcaaggaacttgcgaagcttctcgcacgacaggcggcacgcgaatatcaacgttccgaacgcgaggagtgaatgatgagcacattccagccgcttcgagctgcgatctacgcccgttactcgaccgatcttcaatcggcagcctcgatcaccgaccaagtgcgcctgtgccgcaagctctgcgaagagcggggttggcaggtcgtgaacgtctttcatgacgaggcgatcagcggcgccacgcacctgcgccccggctttcaggagatgcagagcgcagctgcaagaggcgagttcgacctgctcgtcgcggaaagtctcgatcgcctgtcgcgcgaccaggagcatatcgccgggctacacaagcgcatgctttttctcggcgtggcaattcacacgaaagccgagggcgagatcaacgagatgcacatcggcctcggcggaacgatgtcagccttgtttctgcgccagctcgcccagaagacccatcgcggcctcgagggacgcgtcaggcaaggcaaatcagcgggcggcctcagcttcggctatcgccttgatcgaagcgctctgcccgatggctctctcagcacgggcgatctagctatcgagccaaccgaggccgccatcgtgcgccacatcttcgaacgctttgctgctggtaaaagcgcgcgggcgatcgcattcgaattgaatgagcgcaacgtccctgccccgcgtgccgcgaagggcaagagcgctgggacttggtcgttttcgacgatctcggggaaccgcaaacggggcaccgggatcctcaataacgaactctatataggtcgacgtgtctggaaccggcaacggttcatcaaggatccttcgacagggaagcggcaggctcgacttaatcctcccgaacaatgggttatcgatgatgttccagatctgcggatcatcgatgacgatctatgggggcgcgtgaaagagatccaggagggcgtccgagccgccatcaatgccgatgatcgcccgaacgcgttcggtgccgcgaggcgccccacgcatcttttctcgggcctactcaaatgcgcctgctgcggcgcgaactatattctcgtcaacaaggtcaaatacggctgctccgctgcccgcaaccgggggacctgcgccaatcatgcgctgatccgtcgggaggatgtcgaaacgcgcgttctcgaagggctcaaggcacatcttctgcacccggacctgatcgcggaatttgtcgacgagttccaacgggaagtccgcgaagaacgacgctcagcagagcttgcgcgcaacacttcggaacagcgcctcgcaaagattgacgacgagatcgcaaatctcgtgaaagcgatcatggccggtatgttccacgcgagcatcaaggaacgtctggatgagttggaggccgagcaacgcgcgctccaggacaggatttccacgatgccagcgcctgatcccgtcatcatccatccggctgttgcggagatctaccgcagcaaggtggaagatctgacggtagcgctcaatgacagtgatagccgcagcgaggcgacggcgatccttcgtagcctcatcgaccagatcgtcctgcacccggacccgaacgcttcgagcggccatgtgattgagctctatggggaactaggcgcgatcctgggattgggggatggcacaaatgacaaaccccgccttggtgtgggcggggtgtcgacttcgttggttgcgggagtaggatttgaacctacgaccttcaggttatgagcctgacgagctaccgggctgctccatcccgcgtccgttgagcgtt

SEQ ID NO: 3698 - DNA, 13793 bp, synthetic construct
  misc_feature 1..13793: note = Synthetic
  source 1..13793: mol_type = other DNA
aaggatctctacttcgggtctgtatctatggtcggacatagcgccagatctacgccccgagcctcaaaccaaaaagacggccctccccgtaggcttacgatgatctgggtagacgacggcaccgaggaggggatcaagactttcacagatcgtggcatcgaatgcctccaagaacttctcgcagacatacggacctggaaaggcggcatccgtgagttcttgcgcgacgaacagtgtgatcccaaagtcatcgagagcatcatggccggcgagaagagctgctgaggcaagacggccctcggcgaaaccttacgccgcttgccccgccgccgaggctcaaagacctcgcaccgaccaacaaatccatcgccaccatctgccatgccaaacctccatctgctcacgcagaccttctcgcaggctcgacacgcgtcaggaacaggtcaaaccaatggggtgtggccgccgcttaccgatcaccgaaggaactttccacgaacatctatccatttccgtgtcgcatgggtgttgcacggaggaaatcggaacggctgcaagcctttggaatcgcgaagaaacgtgttgttctgtgttgcaaacgcaaaaagcgcaagccattgatatgttgttagaaagactggttgcgggagctggattttctctttggcgaataaatctgggtgtgccgtgggtggaaggagctcggacctgagcgtcctccctgcccaagcggcgtcgcctcgtcattcgtcggatttcgcctcggaggcggcgttaccgccaccggcctcgaacttctgcttcaagcgctcgaactcctcgcgctccttccgctggcgttgagcttcacgctcggccttggcggcctccgcgtccttcgcccgcttggcatcgaccttctcaatgatctcgtccacgccttccgggcgcagcgggtgggttgctatcagcttacgctgggacgcggtcgcaagcccctcgaggccggcaaagaaatcgcgcagcgtctcgccctcgagcacgccgagcgcgttggacaggttggcggcgatcgccttgtcgcgctcgcgggtcagcttctgctccttgagcaactgcttgcccgtcgccttcttgatcgaggcgaggatccggagatccggatcgggctgcgcctccgtggcggccggatcagctggcgtggcgtgcgccgcgccggacagaagcttggcagtgatggatgtatcggtcattttaatatcctatttacgaggttggtttagggtttgcgccgatcgcccggacgggctgtcgtgaccggcttctcgacagattgcgtcgacacttccggtgccatagccgtcccttgaaaaaaccagcgccaaaaacctcaacacactgaaaacacgtgaaactttccttcatccgagatttcatgtgaaattttcgtcggcaccgcggtccttggttgacccgcggcttcccttgtccagcgccatgatccttgccgagagcttgcggcgaatttcgccaacgcgtttccgcagcccagccggcagctgtcctgcgatctcgacgatgacggcatcggccgcctgtatatcggccagatcggacgccacccgcgcttccgccgcggcctccgcgtgctggcgttcctttccacgcagccgcgtgaacgcgcgcgcaaatgccttgcgcgcccgcgcgaagccggtgctgctcttgcgcgggggcgtgaaggcttttactgcctccggcggcctttccgggtcgtcagcctctcgcccggtctcgtcgagctgtcctccagcaaccgcgtctgcaaaggcgatcacatcgtccgcctcgcgctcacggtcttccaccgcacggcgtttgtgctcgatctcggcctccttctgggccagacgcagctcttccatctgccgccacttggtcggccggacatggcggcgcatttgcggtggcgccttgccgttcgccagcgcctcgcggatcgcctgcttgcggcgctcgccgcgcgtcaggccaagctgcgcgaaatgctggccgacgctgtcctgcgccgcctcgtaatccttgatcaacggatggatcgacggctgcagcatccggcagttgaccccatacttttgaactgtcgtgcgcggcatgatgaccgcgtggacgtggaaggcctgctcgtcccggtccgcccgcgcgtggatcacatcatcaccgaaattgtcctccaaccaggtcttggcgcattccatgaagcgcgcctcgcgttcgaggtctgacatctcgttcgaatccccatccgcatcgaaccagtccttgttgacggtcaggatgagttcgcgcagtggcccgtgccgcgaggcgcgccagggatcccgcgggccttcggcgatccgtttctccagcgccttccggtccttgcgccgctcgtgataggccagctcggccgcgtacatctcctgcgtcatggcccggatatcggcctgcgcttccgtcgcccaggtctccgcgcctatgaaccgctcgttgaggtcggacagcgcccggttgatgtgccccagatcgccgcccttgcgcaggcgatgcgcctcatagccggcgagatcgcggggcgacatgccttcgaagcgcagcacgatgggatgtttcttggcgggcatttcggaacctccggacagtgaggctccggagatgggatcatccttgccgatcgcagaacgcttttttgccctgcgttgcccgacgtcagcacatccccttgattactcactaaacaggacgaattccggcacctgcggtgcctgccattcgtcctgctcgttcgcccggggcgctgccccgggaccccgcgctttcagcgggaccagagggatgcgccgccccctctggacaccccagggcagggtcatcgttcgccactccccctgcaccccctggcgcctcccggcgggctcggggaccgttccgcacatccccaaggccccaggctcccgagggacgccgttccgcacgcatcccccaagcccccaccggctcgcgctccccgcgcggggtcgagaagggacaccccctctcgacgctctccccggcggacagtccgtgcagggccgcgcgcgccgaatgacgcgcggccctgcaccgcctgcccgaatagggcgtgggccccgtgtcggttcaatcgccaaggagttcatcaatgcaacccaaccagatccccgacactgacacaccctgctggaaggcgacgatttcgccaggcgatgtcgtccggttccgctttcccgctgccgactgcagcgacaccaacgcagcgacaggcccgaagctaaggccctgcctcgtcctcgaggtcttccacttttcaggccagcgcttcgtcaagctcgcatatgggacatccgctttcaccaaggccaacaaaggctgcgaagtgctggtaaagcactccggcagctgtgcaacagccggactcaatcggcccacgcgcttcgtcggcgcccggtcgatcattgtcagcctcgaccattccgggtttgaaccttacggcaagactgaatcgcctctcatgggcagactggacgggaccttgctgaaacggctgaccgctattcgccgacgccttcggtagagtatcgctgctgcaagccagcgggcgctccggaaaaagggcgaggggcgcgacggtccacggtgcggttttccggaatggaaccgcgcctgggcccgtttaccacaagttaaacgagccgataaggcgtttcagaaaaagggcagaacgactatgctgtcgtactgatcagcgtgctggcgctggcgtttccggtccactccagaccctcgtgaggcctcctgatgctgcactgcaacccgcgaaatctgccgtttgttttatccatgaaagagggaagggcagaatgaagcagtagccttatggcctgagaagactgatcgggagccttcaacaaaaaaggaaacgcgccccgtggggcgcgtttcaatgtggtgctacttcgagcttgttaacggctcgaccgcgaattctgaacattgttcttttggcatacggtgaccacgatttcaagttgcatcccattctaaaacgcagaaacctgttggaaattacaatttagggtggcgaatatgcgtttgggtctcgacataggaacaaactccatcggctggtggctttacgaaaccgacgggtcggaggccgatgccccgatcgtgagcgtcatagacggcggggtacgcatcttctccgatggccgcgacccgaaatccggggcgtcgctggctgttgatcggcgggccgcccgagccatgcgccgccgtcgcgatcgttacctgcgcaggcgcgctaccttgatgaaggttctcgcgaatgcgggattgatgcccgccgatccggctgaggcaaagacgttggaggcgctggacccctacgagttgcgggcaaccggtctcgacgcggccttgccgttggcgcatctggggcgggcgctgtttcatatcaaccagcgacgcggcttcaaatccaaccgcaagacggatcgcggcgataatgatagcggcaagatcaaggatgcgaccgcgcggctggaacaggcgatgatggccagcggtgcccgcacctatggcgcgttcctgcacatgcggcgccagcgggcgaccgacccgcgcaatgtgccaaccgtgcggacgcgcctctccatcgccaagcgggacggcgcagacggcaaggaggaagtcggctatgatttccaccccgaccgcaagcacctcgaggaggaatttcacaaactctggacggcgcaggccagctatcaccctgagttgaccaacgaactgcgcgacctcgtgtttgaaaaaatcttctttcagcgcccgctgaaggaaccgaaggtcgggctttgtctgttcacggccgaagagcgtctgccaaaggcccatcccctgacccagcgacgcgtgctctatgaaaccgtcaatcaattgcgggtgacggcggatgggcgggaaaagcgccccctgaccgtcgaggagcgcgaccaggtcatccacgcgctggacaacaagaagcacgcgaagaaagccccaatgtcggctacgaatggtccgacgctgacgctcaaacatcttgccgagaaagtgctgcgccttccggacggtcaacgtttcaccttggaaaccggcgtgcgagacgccatcgcctgcgacccagtccgcgccagtctatcgcatcccgaccggttcggcccgcgctggtcaacgctggacgccgacgcgcaatgggcggtgatctcgcgcatccgaagagtgcaaagcgatgcggaccacgccgacctgatcgactggctgacgcaaacccacgggctcgaccgcgaccacgcggagatgacggccaaggccccgctgcctgaaggctatggacgattgggcctgacggctaccaccctacttctggatgtgctgacagcgggggtcgtcacctactcggatgcggtcgccgcctgtggctggcaccattcgaaccagcggacaggcgaatgcctcgaccgcctgccatactacggtgaggtactggaccggcatgtcatcccgggcacttataatgaagccgacgacgacatcacgcgctacggccgcattaccaacccaaccgtgcatatcggcctcaaccagctcaagcgggtggtgaacaagatcatcgaggtctatggcaaacccgatcagatcgttgtcgaactggcgagggagttgaagcagtccgagcaacagaagcaagaggcgatgaagcgcatccgcgacacgacagtagctgcgaaaaagcggagcaagaagttggaagagcttggctacgaggacaatggtcgcaatcggatgcttctgcgcctttgggaggacctgaatccagatgattgtatgcggcggttctgcccctacacgggcaagcgcatctccgccgccatgatctttgacggcagctgtgatgttgatcacatactgccctattctcgcacgctcgacgacagtttcgccaaccggacgctgtgcctcaaggaagccaaccgcgaaaagcgcaaccagaccccatgggaagcctggggcgggaccccgaaatgggacgccatcgaagccaacttgaagaacctgccagacaacaagcgctggcgctttgcgcccgacgccatagcgcggttcgaaggtgagaacgattttctcgcccgcgctctggtcgatactcaatacctcgcctcgatatcgcggacctacctggacacactgttcaccgagggcggccatgtccgggtggtccccggtcggctgacggagatgctacggcggcactgggggctcaattccctgctgagcgacgccaagcgcggcgcggtcaaggccaagaaccgcaccgatcaccgccaccacgccatcgacgccgccgtggtcgccgccacagatcgcagtttgctcaaccgtatcagccgcgccgccggccagggcgaagaggccgggcagtccgccgaactaatcgctcgtgatacgctagcaccttgggacggctttcgcagtgacctcgaagttcagcttggcaggatcatcgtcagccatcgcgccgatcacggccggatcgacaaggaggcacgcaagcagggcaaggacagcacagccggtcaactacatcaggagacggcctattccatcgtcgatgacatgcacgttgccagccggaccgatttattgagcgtgaaacccgctcaactgctggatgagccgggccgaagtggccaggtgcgtgacccgcagctgcgcaaggcgctgcgtgtggcgaccggtgacaaaaccggaaaggattttgagaacgccctgcgcgatttcgccgccaagcccggcccctatcagggcatccgccgggtgcgcattatcaagcctttgcaggagcaggcgcgcgtttcagtgcccgcgcaggttccgatcaaagcctatcagggcggcagcaaccacgtgttcgagatctggcggctgcccgacggcagaatcgaggcccaggtgatcacgaccttcgaggcccattccatggagggcgaaaaacgtccgcacccggcggccaagcgtctgttgcgtgtgcacaagggcgacatggtggcgctggaacgggatgggcgaacggttatcggccacgtccagcaaatgcatatcaagaatggattatttatcgttccccacaacgaagctaatgccgacgctcgcaacagcgacaacaccgatccattcaagtggattcagatagctgcgcggcccgcgatcgcggctggaattcgtcgcgtcgcggtagatgaaattggtcggctccgggacggtgccgtacggcccggctgaccagattcgcccgaatcgacaaaacatgccaagcttccaatggtttggaggatgaaggcatggaccagatcgtggatatatcgaccgacggtcggcacctttcacgtgaccggggctttttaagggtcactgagggcggaactgaactcggtcgcattccgctcgaccagatcgccggagtgatcgtgcatgcgcacggcacgacctgctcggtgtcgcttcttgccgagctggccgaccggggcgcgcccgtggttctttgtgccgccaaccacgcgcctcgcgcggttctgatgccgcttgagggccaccatgcacaaggcgggcgattacgcgcgcaatggcaggcaggcaccccgctcatgaaacaagcctggaagcaggtcatcattgccaagatcgacatgcaggccgccgcgcttgaggcgatgggcgaggtcaatgcgccggtggcaatgctccggcgcaaggtgacaagcggcgataccacaaatgtcgaggcccaggccgctcgcctttactggccgcgcatgatgggtgacgcgtttcgccgcgatcgcacagcggccgacaccaacgccctgctcaactacggctacaccgtcctgcgcgccgccaccgctcgtgccgtcgtcgcagccggactgcatccatccatcggtctgcatcacgcgaaccgtggcaatgcatttgcgctggcagacgacctgatggagcctttccgccccctcgtcgattgcaccgtacgtagccttgtcgcccgaaacggcccccaggttgacaccgaggccaaacaggtgcttgcgcgcctgatggcgctcgatctgccactcggcgacggcctcacgccggtctctgtcgcgctctgcaagctggccacctctctcggccagagcttcgagacaggaaagctctcactcgcactgcccgcgcctcccgatccgttgacccttgcggggttagggacatgaccgtcgtggcgccctttctctcgggataccgaatcatgtggatactcgtgatgttcgacctgccaaccgacaccaggcctcagcgcaaggcggcggcagattttcgtaattttctgttggacgaaggttttgagcgcagccagttttcggtctatgcccgtttcgtcaacggaaaggaggctttccagacacgggtgagtcgcatcgagagaaacctgcccgagacgggcgatatccaggtgctgaacttcactgatcgacaatatcgtgatatcgttcacttctcggatcagggtcggcgcgcggcccggacgaatccacaacaactggtgttgttttgaaagtgagtcaccgttttttaacactcgaatctccctcgaaaccctgtcttttcaagggcttgagggagaatcaagtatagccgttcagaattcgaggtccagccgcaaccggcgtgatgctctcgacgatgctgagttaagtatagccgttcagaattcgaggtccagccgcaactcgtcggtccaccgggtcggcggcggctcagtatagccgttcagaattcgaggtccagccgcaacgtgatgcgaaaggtccgcctcggctctcccagtatagccgttcagaattcgaggtccagccgcaacgtgcaggccaacctgcaggcgtggttcgtagtatagccgttcagaattcgaggtccagccgcaacacgatcgcgccggggttcaggggggcatcgagtatagccgttcagaattcgaggtccagccgcaactatcaggttggattccagatcggcttcaaaagtatagccgttcagaattcgaggtccagccgcaacaagcggcggctcgataccgcgctcgcgaaaagtatagccgttcagaattcgaggtccagccgcaactgtagcaaaggacggcttcaccagccatgtagtatagccgttcagaattcgaggtccagccgcaacaagcgcccggccacacaaaagggctaccgagtatagccgttcagaattcgaggtccagccgcaacctttccgcgcccaggctgcggtggcctccagtatagccgttcagaattcgaggtccagccgcaacgcgcaggcctgatgcccccgctgacctgcacagtatagccgttcagaattcgaggtccagccgcaacaggcataccgggcatttccgtgacaggataagtatagccgttcagaattcgaggtccagccgcaacgtgcggcagtatttcgtcgatgtcgcgccgagtatagccgttcagaattcgaggtccagccgcaactggtcggatgcgatccgcgaccgcgtggaagtatagccgttcagaattcgaggtccagccgcaacaaggcggtgctctggcgtccatcgccgataagtatagccgttcagaattcgaggtccagccgcaacagacaagttggggagatggtgtcggacgatagtatagccgttcagaattcgaggtccagccgcaacctattccgaccgcgtgcaaaggctcttcgaagtatagccgttcagaattcgaggtccagccgcaacagcgaggcggcgctatgacttctcactttgagtatagccgttcagaattcaaggtccagccgcaacccaatatcaacgcggctgactgggggaactagtatagccgttcagaattcgaggtccagccgcaacgcagaggctcagggtaagtcgctttcccgtagtatagccgttcagaattcgaggtccagccgcaaccaaaacccggagcgggtggactggccggggagtatagccgttcagaattcgaggtccagccgcaactctatcccgaacgtctgcatgcggcagatcagtatagccgttcagaattcgaggtccagccgcaacgcgggcgtatggcgcgcttgccccgccccaagtatagccgttcagaattcgaggtccagccgcaacctacgaactatcattgctacactcgcgctgagtatagccgttcagaattcgaggtccagccgcaacacggcaaacgataaagaatacacgctatggagtatagccgttcagaattcgaggtccagccgcaactcacagcttcattgactgggaccaggccctagtatagccgttcagaattcgaggtccagccgcaacccaatatcgacgcggctgactgggggaacagtatagccgttcagaattcgaggtccagccgcaactgatgaaggccgggttctctaaagttgctgagtatagccgttcagaattcgaggtccagccgcaaccagaaagccgcttacgacccaagcggcgaaagtatagccgttcagaattcgaggtccagccgcaaccggcggctttaccgcttctggcggaacgctagtatagccgttcagaattcgaggtccagccgcaacctgctcgtttaccttcggcggcttggcgaagtatagccgttcagaattcgaggtccagccgcaacgaaaacggtttcctcgcgcagaccgggggtagtatagccgttcagaattcgaggtccagccgcggtacgtctccatgtgcatgccgccattcgaacggaccgccgcaaatttccggttccccccttgtgttgcaggtgccttgcccgcggaaggcctgctgtacacccttccctttaatccgtcctgtcctcgatacgcgttcttgtctgccgggtttggtcgtcaggagacagaggcgttgcgccacgcggtccgcggtttcctttgtggaaccgcggctcgcgcggcgccgccacctcaaactcagtgaaggagaccccatgaccggtttcaacctcaaggattacgaagacatcgaaggcatcgcgattgatgcctttgctttatccagggactgcgtgacgggcctgcgtgtcgatgtcctgcccaacctgccgcctcgcgaacgcccgcgggtggagcgcctgctggctgacatcgaggcgcggcagatcttcgagcagaagaccaccaacctgttggagggcgtcatcgagacgatctcgcagcggatcctcgatggcaccgacgaggtcgcggtgttcgtcgcggatgaatgccatgtcgacggtggagccgtggatagcaagcgcctgcgcaccgacgcggccaacgacctggcacgcgccctacccctcctgctgggcctgcgcgacagcgtctacgcggtgcacgacgccatgcacgcgatccacgccgtagacaagctgcgcgcggcgcacaatcgatccggatcgtagccctcgggctatgacaggtgggcgcgtcgcttttcacgctcctgttgctgtcaccaacagcgcgcccatcgaaggacgcccgcgcggattccgcgcgggcgtctcaagtcgccgatcttgcccgaggcaccggtctgtcgcgcggtggttgttcaatgcccactaccgaaggagacgcggatgcacctcacgaacctgatcgacctcatcgccgaagttgccgccaagcaggttgcccgggagggcaagacgaaggcggacactccggacgctgcaaaagtcttttggcctacgattcgggcagcacgatggagccgatgtcatattttcgtctggatttatcggtttaggcggagactcgacaagccggttagcgccgtcgcaccctgatctgcccaccatgaccaccaatgaggttccaaatgacacacggcaccccgcccaagcgcgtcgcgatctacgcgcggttctcatccgacatgcaaagcccgaagtcgatcgaggaccaggtgcgcgaatgccggatgcacgcgcagcgtgaaggctggacagtggtgcaggtgttttccgatgtggcgatcagcggcgccaccaagggccgcccggatttcgacgccctgcaagcagcggtgcgggcgggacagttcgacatcgtgctcttcgagcacctcgaccggctcggtcgcgacctcgagttcctgatggcgttctacaagcttgcccactatgaagacacggagcttcaccagctccggcgcggcaagctgggcattttcgacatcggcatcctcggcaccttcgcgcagatcttcctcgaagagctcggacacaagacgcgccgtggcctcgccggcaggatcgaggccggcaagagcgcgggcgggctatcctacggctacaaggtcaggcgcatcgagaatggcgagccggtaaaaggcgagatcgacatcgatcccgaggaagcggccatcgtcacgcggattttcgaggaatacgccgcgggcaagtcgccgctggccatcgcccgtgatctcaacgccgaaggtatccccgccccggccaaggataccaaacgcctgacatcgggacactggaagcagaacaccatctatggccaccgtggccgcggcacgggcatcctgaacaacgaactctacatcgggcgccggatctggaaccggctgcgctactcaaagcaccccgagaccggcaagcgcgtctcacggctgaacccgcccgatgagtggacgatcatcgagaagccggatctgcgcatcctgcccgatgaactctgggagcgcgccaaggcgcgccaggagagcgtggatgccgcccgggccaaggcagagcgcggcggacggagcggcgccggtgccgcgcaaggcgcgcggcgccgcaaataccttctgtctggcctgctgacctgcgggcagtgcggcggcaacctcaccgtcgcgggcaagggcgacaagcgccgctactactgcgcaaacgccaaggagaagggagacgcggtctgcagcgggatgcccggcctcaaggaaacagctgccgcagatatcctgctgtccggcttgcgcgcaggtctgatgcaggacgacgcctacgcgcgttttgcagcacaattcgaggcgaagatgaaggcaggccagaaaggcgctgccgaactcctgaaagctcacgacctcaagacccgcgagctcgagcagcggcaccgcgggttcctggatgcggtagcgaagggcgaccactcgcccccgatcatcaaggcgctgaacgccgtcgatgccgagctcgaggctctgcgcgctgagcgggacaccctggtccctgccccggtcgagctgccgcccgacttgcctgagctctaccgagagtatgtcgccaacctcgccgcgaccctgcaggacgaggcggtatcggccgccgcctcggacgaactgcacgggctgatcgacacggtggttgtcgtctgggacgccgaggcaaacggccaccgactggatgttcagggtaagctgttggagatgcttgcaaaagcaaagcccgccgaggaggcgggccttgttgcgaatggtcattcgctaaaactggttgcgggagtaggatttgaacctacgaccttcaggttatgagcctgacgagctacctggctgctccatcccgcggtgtatgatttgaggtatcgtt

SEQ ID NO: 3699 - DNA, 13589 bp, synthetic construct
  source 1..13589: mol_type = other DNA
  misc_feature 1..13589: note = Synthetic
atagatcagacatgttcaccgctcgtttttcgaaccgtgaatcacgcctctgcacggaaatcaatgggtcctgaccctagaacggactttcaatcgactaacttttggtgaattggtttcaaggttcttgatatcacggccttgttcaaaacgaggaagcgcaggccgtggcctgcgcttcaatgtggtgcaatcgaatgcttgttaacggctcgaccgcgaattttgaacatctccaatattccgggaatctcccaagccgtcaagcacgcttttagattgagtgtctctcctacaggtgtaatatttcctttgtattttgaggggattttctatgcgtctgggtcttgatatcggcacgaattctattggctggtggctctatggcaccgaaggggggcggatcaccgaggtggtcgacggtggcgtgcgcatcttttcggacgggcgggacccccaatccaaggcgtcactggcggtggacaggcgtgcggcacggtcacaacggcggcggcgagacagatacctgcggcgtaaggcggcgttgatgaaacggatggcgcaagtggggctgatgcccgctgacccggctgaggccaaggtgcttgaggtgttgaacccatacgaattgcgggcaagcgggttggatgggccgctgccactcactcatttcgggcgggcgctgtttcacctcaaccaacgacgcgggttcaaatccaaccgcaagaccgatcggggcgacaatgaaagtggcaagatcaaggatgctacggcgcggctggatcaggcgatgatggccaaaggcgcgcgcacctacggtgagttcctgcacatgcgccgagccgcggcattagaccccaaaagcgttcccagcgtgcgcacgcgtttgaccgtagcgcgacgggacgacgcggaaaaagaggaggcggggtatgatttctatcccgaccgcaagcatctgtccgaagagttcgacaaattatgggcggcgcaggcacgtcacgcgccggatgtcctgacggaagatctgcgcgacgagatcgcaacgatcatctttcaccaacgccctttgaagacgccggaagtcgggctgtgtctgtttaccgggcagcatggcgttccagagcgcgacaagcgcattcccagtgcccacccgctgaaccagcgacggatcctgatggaaacggtgaataatctgaaggttgcagcacagggagagccgtcgcgcccgctaacgcgtgaggagcgggaccagatcgtgcatgccttggacaacaagaaacacacgaaatccctctctggtatgacgatgaagttgaaggcgctcggtaaggtgatcaagctgcggcctgagcaaggtttcacgctggaaacggccaaccgcgatgcgattgcctgcgatccggtacgcgccagcctatcccatccagacaggttcggcgcacggtggtcgacgctggaaagcgcaggtcagtgggatgtggtgcagcgcattcgcgccgtgcagagtgatgccgagcacgctgatctggttggctggctcatggatgtgcatgggctggaccgagaccacgcagaggaaaccgcaaatgcgcctttgcccgagggatacgggcggttgggcttgacggcgaccactcggattcttgcggcgctggaggcggatgtcttgaactacagtgccgcggtggccgcttgcgggtggcatcattccgatggccgcacgggggaggtgttggagagccttccttactacggagaaattcttgaacgccacgtgatccctggaacaggcgatccaaatgatgatgacgtgaagcgttatggccggatcaccaacccaacggtacatatcgggttgaaccagctgcgccgtttggtgaaccggatcatcacggtttatggcaggccggacgagatcgtcgtggaactggcccgtgatctgaagctgtctgaggatcagaagaaagacgtgcagcgcgacatcaagaagaacaccgaggcggcgatccgacggggcaaaaagttggaagagatgggcgttcccaacacaggtgctaaccggatggtgctgcgcctttgggaggaccttggcgatgacgtcatgacccgcaactgcccctacactggcaagcggatcagtgcaggcatgctgtttgatggctcttgcgacgtggaccatatcctcccctattcacgcacgctggatgacagctttgccaaccgcacactctgtttgaaagaagcgaaccgccagaaaaccgacaagaccccgtgggaggcatggggtgagactgaacagtgggaggccatcgccgccaacctcaagaacctgcccgctaacaaggcctggcgctttgcgcccgacgcgatggaacggttcgaaggagagaaagatttttccgctcgcgcgctggcggacacccagtacctgtctcggattgcgcgggcctatctggatgcgctgtatgacggggatgacggcaagagccacgtctgggtcgttccggggaggctgacagagatgttgcggcggcattgggggctcaatggggtggccgcgctgacagacagcgacaagcaaaccgtcaaggccaagaaccgcaccgatcaccgccaccacgcgattgacgccgccgtggtagccgccacggaccgcgggctgataaaacggattgccgacatggcgaagcgggatgagtttaacggtgccgaagaggtcgcccgctcgattccgcccccgtgggaggggtttcgcgacgatgtcagcgcgcaagtcacgcggatcatcgtcagccaccgcgccgatcacgggcgcatcgacccggccgcgcgcaaatccgggcgtgacagcacatctggccaactgcacaacgacaccgcctatggaattggacgggacggcaccgtcgttagccgcaagcccctagcgtcgcttagcccgaacgatattgtcgttaccaaacggggggcaaatatccgtgatgttgacctgcaaaagcacctcgcgcgcgtgacccatgggctggacggcaaggcgttcgaggccgcactgctggcctttgccgcctcgccaattttgccggacaacaccgataacccctatttcggcctgcgccgtgtcaggcttgaagaaaccttgcaggaaagcgcgcgtgtcgaagtcgcggaccaagagggacggccctacaaggcatacaagggcgacagcaatcattgctatgaaatctggtgcttgcccgatggcaagatcaagccgcaggtcgtgacgacctacgaggcacaccagtcgggcgctgaaaagaaacctcatccggcggcgaagcggctaatgcgcatcttcaagcgggacatggtgatgctggagcgggatggtgagaccattattggctatgtgcagaaaatgaagcagaacgggagcattttcgttgcgcctcataccgaagcaaacgccgatgcgagggacagagaccccaaagatgattttaaactcattcagttgggagcgggctccctcgtcaaagccaaagcacgccgagtcatcgtggatgaaatgggccgcctgcgcgatcctggaccgcctttatagacgcctgaatttggcgaaatggaagggcggcaatataatcaatgcgttaacgattcgcgtgggggcgtgaggggtaacgtgtggaccagatcattgatattgcgactgacgggcggcacctgtcgcgcgaccgtggatttctgaaggtttccgagaacgggacagagatcggccgcacgcctttggatcagatcgcggccgtgatcgtgcacgcacacggaacaacttggtcgacgtcgctattgacggaattggccgagcgtggggcgccagtcgtcttgtgtgccgccaaccatgctccgaaatccgttttgctgccgctggcagggcatcatgcccagggcgcccggatgcgcgcgcagtggcaggcgaaagcgccacttgtcaaacaggcctggaagcaggtcgttaccaccaaggtcgccatgcaggccgccgcgctggatgcagttggcgaaccgtctgcgccgttgtcgatgatgatccgtaagatcacgtcgggcgacagcaccaacattgaagcccaggccgcgcgctattactggccgcgtattatggggccggactttcgccgcgatgcagggcacggggacgagaacgcgcttctgaactacggctacacggtcttgcgagcggccacggcgcgagctgttgttgccgctggtctgcatccaacgatcgggttgtttcatgccaaccgtggcaacgccttcgcgctggctgacgacctgatggagccgttccgcccgctcgtcgattgctccgtcagaacgctcgtcgcccgctccggtgttcaggtcgacaccaacgccaagcaaacccttgcacgcctgatcgcgaccgacctgcccttaggggatggcgtgacaccggtatcggtggctctaatcaaactggccacgtcgctggggcagagtttcgaggccggcaaacttgcccttgccctgccgcgcccgcccgatgcgttgacgctcgcggggctaggcgcatgacccataccgttacctatttgtcaggatacagattgatgtggatacttgtgatgttcgatttgccgactgataccaagccccaacgcaaggcagcgacggcattccgcaacttcttgctggacgagggttttgagcggagccagttttccgtctatgcgcggttcgttaatggcaaggaagcctttgcaacacgggtcaaccggatcgaacggcatttgcccgatgctggggacgtccagatcctgaacttcaccgaccgccaatatcgtgatatcattcacttctcggaccagggccgcaaacgcgcccgtaagaatcccgagcaactggtgatgttctgatgcgattcgctgtggaaatgacgaataggggcccgttaagcttcatgtataacaaaggcttaacgggcgatctattgtagctgttcaaaattcgcggtccagccgcaacgggttcggggtgttccacggcccggccggtattgtagctgttcaaaattcgcggtccagccgcaacaccgtccaccgtaatggagagtgatgcggtattgtagctgttcaaaattcgcggtccagccgcaactgaaaccgtgctgcgaaccttacgcgaaatattgtagctgttcaaaattcgcggtccagccgcaacggtcgccgcggtggtgacggcgtcctccacattgtagctgttcaaaattcgcggtccagccgcaactggaccgatgacgcggcctatgccgaggtcattgtagctgttcaaaattcgcggtccagccgcaacctcgatcacagcgcccaacaaggcacacctattgtagctgttcaaaattcgcggtccagccgcaactcgcccacgaccatggtgtcggaccgcgtgattgtagctgttcaaaattcgcggtccagccgcaacgaccgggcgcggcgcgtcgaagcgctattattgtagctgttcaaaattcgcggtccagccgcaacgatgctgactacgcggtaaggctcaaggcattgtagctgttcaaaattcgcggtccagccgcaacacggggggctgtcaagaccggcggaatagcattgtagctgttcaaaattcgcggtccagccgcaacacccgatagcccgctgacacccgattgcaattgtagctgttcaaaattcgcggtccagccgcaactcagtgatgggcgtcctcacctggttctcgattgtagctgttcaaaattcgcggtccagccgcaacgatcgttgtgcccggttgcgaagaacggatattgtagctgttcaaaattcgcggtccagccgcaactccagggaacgctcattcgccatcctccttattgtagctgttcaaaattcgcggtccagccgcaacgagacaggccagcgcgttgcgtggcgtgatattgtagctgttcaaaattcgcggtccagccgcaacggtcacgctccccccgcgacagaaagcccaattgtagctgttcaaaattcgcggtccagccgcaacggccgcgtcgaccgccgcgtcggcagcttattgtagctgttcaaaattcgcggtccagccgcaactcggggttggtcacaccgcttcgggtgattattgtagctgttcaaaattcgcggtccagccgcaacggcgacgacgcggtgcagcgcatagcgggcattgtagctgttcaaaattcgcggtccagccgcaaccgcggcgcggacccagcgttcgccgatatcattgtagctgttcaaaattcgcggtccagccgcaactggcgcgatcatcgcgccgcaaatctgaaattgtagctgttcaaaattcgcggtccagccgcaacgtccgaaatgatcgaccgcaacaacgcccattgtagctgttcaaaattcgcggtccagccgcaactcacgccggcacaaggtcatcgcccagttattgcagctgttcaaaattcgcggtccagccgcaacgggtcggctttgccagttaccgctttcgaattgtagctgttcaaaattcgcggtccagccgcaacttgcatcccgtcgccgatttcgcgcatgcgattgtagctgttcaaaattcgcggtccagccgcaactgcctgcatcgtctctttcacccgtgcgccattgtagctgttcaaaattcgcggtccagccgcaacaggcgcgcccgctgaaccccgatttcggctattgtagctgttcaaaattcgcggtccagccgcaacggcggggcacaccaggccatgaccctatcgattgtagctgttcaaaattcgcggtccagccgcaactgacatgcgcgccggtctggccgaccgggcattgtagctgttcaaaattcgcggtccagccgcaaccgggaatggtgacgccaccggcaccgccgattgtagctgttcaaagttcgcggtccagccgcaacggcggatcgcgatgcacggcgccgcgacacattgtagctgttcaaaattcgcggtccagccgcaaccgtcccgcgcgacgcgatcaggtcgaactcattgtggctgttcaaaattcgcggtccagccgcaactatgtcgcatatcgtttcatgcgacgagcattgtagctgttcaaaattcgcggtccagccgcaacgaaatgaagcgcccgcttgttttcgcaaacaaccgtaggcaccaatgtccgcaatgaggactgcgcctgcagaattccgaggtcgcggagcggcttagtccaagggccgtcaccgtcgcccaagccgtcccagtctcgccagctgctccagcatttttgaccctgagtctgcgggccctgtgccgcctgcggaacccgtctgtcccatgccttgcctcacaggcatctgctgcacaccgaagaactgccgcgccctgagggctgcgtattccgcgccacttgcgccgccaatcaagtagcggttgtaggcttgctggctgcccatggcggcgcgggcgaaactgtaaccgccgcctaggccaccggagagggcgggcatcatgatattgcccgagatcgcgcgaacgatgaagggggtggcgatgatgaagcccttggccatgaggaccatcatgaagaaggggatgagcgcgccgatgttggaggccccttccgggtcaccgagttcaccaatgagggcggatgatacacctgtgattgttgcgaacacgcctgccacgacgattgggtagagcgcgaaggagaccagcgccgacagccagcgggcgaaataatccttggtgacctcgaacagggtcaggaaaatcatcaccggggcgatcccgatcagaagcgcgatcatcagtcgggaggccactaggatgaaggcggccagtccgccgaggatcgagagcagaagcacaccgacgatgtcgagcatggcgccagccatccagttcagctcggaccctgcagcgttcagataggcgcccagttccgcgatcagccggtcgaattcttcagcgaaagtgccagagggtcccggactgccgccgccgaccgaggccaccagcgcgcccgcgatactgtcgatcccatagagaatggcagacgagaacgcgttgaactgcatccaattggtcgcgaatatcccgatgagcccaatcttgaccgcgagccagaaggcggtgtgcccatccatggcccgatattgatagatcatgttgatgccgacgaggatcaccaccagagttgtccccaaaaccaggagcgtgccgaccgttgccgcaaccgcaccaaactgggtctcagcggcggtgtcgagataggcttgggaggtttcaacgaaataggtaacaacgctcatcgcggccccgccttaccaattgcctgcggcgtcgcaaatggccttggcggcagttcgggcggcgttggcgcggcggttgtagccatccgaggcttcgagcatctcccatcgttcgtcgctcgcgtagctctcccgaaacacggcctcggccgcgtcccaggacgggaactggatttcgcaatcgcagctgctggtctcgacaatccgctcgaggttctgggcgcggtagatgtcctggaccagcacgcgctgataggcttggcgcagggggatctcctgcatccacacgggttcaacgggccgctccggacagacgtcgaaactgcgatcgagggtcggcacgagattgcgctcagcgaagccgggtgccgacgtcagtcccaggaccagcgcagtcagtaagagggtacagcccgcctgcctcatgccgtggctccggctggtgtgccctcacgcttcaggaagaccgtgtgtcccacattggcgaactccgaggagctgatcgacaccacctcccacccgtctgcgcccttctcgttcaggctggcctgcatgtcggagaggctggtcttgcgggtcatgggaaaggacaggatattgtattcaagggtcttcatggggaagttccaatctcggttgcgccgggcaggtagaattcggtgatgccgcgacggccatcgtggcgcccggcctggatgatcacgtcgatggagttctcgatgtactggatcatgtcggcataggtcatcgggatctcggtcttgagggctgcgatcgcgagccgctgcacggccagctgcggggtttcggcatggagcgtggtcatggagccgccatggccggtgttgatcgcctcgaggaaggtcatggcctccttgccgcgcacctcaccgaggatgatccggtcggggcgcatgcgcagcgtggcggtgaggagcacatcggcggattggaattccgcgtcacgattggcgatgagggtcacggcattgggctgggtcggcagaagctcggcggcttcctcgatggtgacgatgcgttcctcggcggggacatgggcgaggatctttcgcgcggccacggtcttgccggtggaggtgccgccggagacgatcatgttgagcttgttctcgacacagaaggccagcgcgtcattgatcgcgcccgcgcccgcggccacgaccgcgcgcaaggcgcgcttcttttcgacgcgcaggtcttcgagcttgcgttccttgccgtagagaaagtcgagcgcgatgccctcgagaggaaggcttgagaaaaaccgcaagctgatcgacatggccgagagcacggcgggcggggtgatgacctgtgcccggatcgggcggcccttgtaggtgatcgagaccgagacgatggggcggtccttgctcatcgtcgtgttggcggaggaggcgatctggttgccgaggtccctgacctgcacggccgtgagcctctggtcgagcgcgcgcatgaaatggtcgccctggaattcgccccaacaggacccgtcggggttgatgcagatctcgatgacgtcgtcgcgggcggcggcgtcgatccggtcgagcgaggtttcgagatagctgagcgacatcgggctaaaagatctccaagtcgcggtcgaccatgacggtgacgcgggcgccctggtcgacatagatgacgggcccgatcgagaggtaatcgccgatgacgctgtcggtagcgtcggccagatcatcgcccacatcctcgagcgcgttggcggccgtctcattcggtacctcggaggcggcggcaccaggtgccgcggaaatcagcgagatcagggcggcagacccgaaacgctcggcaaagcgcgtgtcaacgaagccggtgacaccggagcggccgagttcatcgcctccgaaggagctgatctggatggtctggttgtcgggcaggatgatccggtcccaagcgatggtgacgcggcgctgcgcgatatcgacgccggcgcggtagcgcccgatgagacgggatccgcgcgggattaggaggcgcgcgccatcgacgctgtagacatcctcggacaccacggcacgggtctggccgggcagcgaactgtcaagcgcagtttccatgacggcttggatcatggtgccctggatgatggtgttggagggattggcgatcacctctgcctgcgtcacggtggagggcaacgcaccgttcagcacgaaatcggtcacctcgccaaaggtgcgttcggtgagagccgtttcattcgccccggaggcaccgccaaacgcgattgtgggcgaggcgatgcgccgctcctggaaggcgcgttcctccgcagcgcggcgctccagctcggccatgcgccgggcttcttcctcgcggcgcagtcgctcttgctcgcgtgcgcgcagctcatcttccgtggggcccgttggggcgggttgcggtcggctggcctcgagttgggccagttccagatccatgcggagttgctcaaggctgcgatcccgagccgtcagttcgtcctggaaacgttgctgtgcggcttccgaggcggcttgcagcgccgcgatttgagcggtcagcgcgtcgattgcctctgcggcggcggtgtcttcctcgacgaccggttcaggggcgttgcgcatttcctcgatctgagcctgcagggcggtgatctgagccagaagctccgcggtgggctcgactggatccggttcgacgaacacaacctcgggctcgggcgggggcaaggtctcgatggcaccaaagccgtccccctcgttttgaaacacgtctggcgtagctgtggggagggcttcttcttcctcgggctgagagaggagataaagcagggcaccacccgcgccgatgacaaggaccacgaccaaagcgagtaggggagagcgccgtggggcggggggtgagcccgcacctttaccttgttcaagggcggcgaggcgtttttcgaggtctgcgtttccggtttcgctcatgagcctacccccgcaggcggcgttgcttcaatgcagaccacctcttcgccaagtcgcaggacccattggcggtttacgccgctgacgcggatcacgccgtcttcaggggtttgcgtgttgaccgtgcgctcgcggccgcccgcgtagcggaagatcgctggaacaggtgcgtttcttggaaaggcgaaatacgtgaaggtcccgtcatcccagatgcgggtcggggtgaattcggtccgcgcgctggcaccgtagttgtaattcggcgcttgtgccgcgatggcccgggtcgggcgcgcagcgtcctccggatagcggaactgcaccacgtagaaggtcgggctgcggacctcctggacgttgaaatagtagctgcgcctgttcgtatagacggtcacattggtatggacgccgcgcgcgacgggcttgattgcaaatgcctgaccaccgggcacgccatcgatctcaaacccttccgtatctccagcgataatcgagcggatgctttcaccgatcccaaactcgaccgtggtgacatgggtgagcgagacgctgaggcggtagacctggccctcctggtaggtggccagccgcacacggctgtcattagggccgccgcgcgggatggcttcggcgaaggcaaagactggcagcagggcaaagaggccagcaacaaagaacttactgatcaaactagttctccaatctgtcggagcggatggaatattcgagcacggtgaagccgaaggggttcgtccagacctcatcgatggagcggcgggtctccgggcggaactcgaagagcagcgttgcggtgaagagcccggtctgaacgccatttagcgaggtcaggcgcttgcgcaggcgcaccgtggcgcggttggtaccaatccggttgatgctgaggatttccacatcgagccgggcattggggccatagaccgtcggcgggtaattctcgttggcgctattccatatctggcgcagcccgctctcggcggccccgtccgagcggcgcaggacgctgcggatgcgcagatcgttatcgagctggttgtagacttcgcggtcagtcacatagcggaagacttctgcctcgatgatcgcctggttggcagtcaccgaagtcgcacccaccgaggcctcggggagagcaaagccggtggcgggatcatagggcacgacaacgggtggcgggtcgacatcgaggatcgcgacggctgcagcactcaggcagccgatgatgccgaagacgaggcccgtcagtccaaggcgctgccagagccgttcgcggcgcagcgcgccatagaccagttcttcctcgatgatttcctgttcactcgccacccgtcatgcccccgctcggcgtttcgaaataagctgaatcggttcttcgctgcctctcgctgcgctcgaacgcgaaaaccgatattttgtattgtgggtcaatttcgaaacgccttagtctgcccggaggtctggcaaggtgaaatccatgaagcgctgctcttcggcgatggtggcggcatcgatcacgccgcccgtgccatcacccacggtctgcacggcttcgagctgccacatggcgaccagcgcaatggcgagctccgcggtcacgcgcgtgttgagatcgacgctttgcttgagctcttccatgtcgtcaatgagcccgacaaggcggtctacccgctcgagcgactggccggcatcttcatagctgttctgggcggcggctgagacgagtgcgccggttgttgcctgcgtcgccacgcggttggctccgggatttccgctggtggccatttccgagagcgtgtcctcgtcaaagccgaggtcggccagcacccggtccatctgggtttcgatctcgcctgcgccggagcccgagaggcccgagaaatccccagtcttgatcgcctcaatcgtggcgaggatgtccccgaactcctggtcgagcagaccgttcaattcttcttccatttccgtgcggatgatctccggcagttcggcaaggcgggtgagcgcttcataggttctttgcagctccgcgagttgatccgtaagcgtagccagctgttcgcggagctgcgtcagctgttcgttttgcaggatctcgtcttcgatcatctgccggagctgctggatgttttgcgcgatgttctgggtgtcgacgaccggtacaccttgtgctgcggcagggggtagggcgctgaa

SEQ ID NO: 3700 - DNA, 13542 bp, synthetic construct
  misc_feature 1..13542: note = Synthetic
  source 1..13542: mol_type = other DNA
cgctatgaggatgtttacgcccgctcataaaccgggcgtttgcgcccctcacccctgatgctcggcgccgatcccctgaaacatggcgcgcagatcgacagtgcttttgttgccgatcgcgtcatagtttgtcttgagccaggccttggcggtgtcgcgcccgatgtcgcgcaggcgggtcagaaaggcccattccacgttcatcttcgacgaggcgcccatcggcttgagcgcgtcctcgttttccatgatatgcacccgcacggggcgatagtgatcggtgctaagcttgccgtcgcggatcagccgatccacgaaatcaatcgcgcgcaattccttgagaaggctggaattaaagctgatttcattgaggcgattgtcgatttcctgcggcgtgcgcggcgcgcccttgcgttcgatcgggttgatctggacaaccacgatatcgtcggtttcagtctcgccatatagtgggaacagcgaaggattgcccatatagccgccatcccaatacggtacgccgtcgatctcgaccgcctgataaaggcttggcaaacaggccgaggccatgaccatatccgaggtcagcttgtcacgtggaaagaccttgaccttgccggtctcgacattggtcgccgagatgaaaagtttgaacgcggtgcatttgcgcaccatctcgaaatcaatgctctcctcgaccagatcacgcagcggattgatgttcatcgggttgagctgatagggcgaggcaaccccggaaagcgcattcatgaagtggtaaaacgggttgttctcaagcccccagttgccggtcagacggtccatcggggtgcgttgcagcgggctttgctgcgcgctcttgctcatgcagcgccagaaataatcaagcgccgcgcgcgcgccgtccggcccgtcgcgggtatagccgtcggccagggccacggcgttcatcgcccctgccgaagtacccgagaccccggcgatactcaggcgcccgtcttccagaatgtgatcgagcaccccccaagtgaacgcgccatgcgcgcccccgccctgcaaggccagattgatcgctttggtggttttgctcatcggtactttatcctgcatccaaagggggaagggctattctgcatttatagcgatatcaggccaggtagccatgcaccacccggctataggcccgagaggtgatccggttcgcttgaacagtatcgagccgtttttttgagcatgtcattcaaaagcgggaaccggttttgagcgtctcgaacatgcgacatccacccgttcatgccgcgaccgggattgggtgcagcaaggcccaaatgcccgaatacgattctacgcaaaagaaaaacgcaggccgtggcctgcgcttcaatgtggtgcaatcgaatgcttgttaacggctcgaccgcgaattttgaacgctttcagcgtcgcatgagccattctgcctcgcaagagctattttgagttaagttggctatgatgaatgcacccctgtcgaggggattgtggagttttagatgcggcttggtcttgttcgcgaaggctacgggcggcttggtctgaccgcgacaacccggatatttgccgcacttgaggatcatgtctgcacctataatgaggctgttgcgtcctgcggctggcgtcattcagacgggcctacaggggaagggttggaaaacctgccgtactacggcgaaattctggatcgccatgtcatttcgggcaccgggataaagaccgacgatgacatcacccgctatggccgtatcaccaatccgaccgtccatatcggtctgaaccagctgcgtcgtctggtgaacaagatcatttgcacctatggtcgccccgacgagatcgtcgttgaacttgcgcgtgatctgaaacagtccgaggaccagaaacgcgaggtgcaaaaaatcatcaagcgtaacaccgatgcggcaattgcgcggggcaagaagctggtcgaggatctgggtcagaaagataccggtgccaaccggatgatcctgcgcctgtgggaagaccttggccatgatgtaatgacccggaattgcccctataccggcaagcggatcagcgcgacaatgctgtttgacggctcctgcgatattgatcacatcctgccctattcgcgcacattggacgacagctttgccaaccgtacgttgtgcctgaaagaagccaatcggcaaaaggcaaacaaaacaccgtgggaggtttggggcgataccccgcaatgggaggtcattgccgccaatctcaaaaacctgcccgacaacaaatcctggcgctttgccccggatgcgatacagcgattcgagggtgagaatgacttcaccgcccgggcgctcaaagacacgcaatatctgtcacgcatcgcgcgcagctaccttgatgcgctctataatggcggcgatggcaaaagccatgtctgggttgtccccggtcgtctgaccgaaatgctgcgccgtcattggggcctgaacggccttggagccctgacagactgcgatgctcagactgtcaaagccaaaaaccgtaccgaccaccggcaccatgccattgatgccgccgttatcgccgccaccgaccgcagcctgatcaaacgcatcagcgacatggcaaagcgcgacgaaaaggccggggccgaagagattgcccgctctgtgccacccccgtgggagggttttcgcggcgatatcgcggcccggatccggcgcatcattgtcagccaccgcgccgaccatgggcgcatcgacccggctgcgcgcaagttaggcaaagacagcaccagcgggcagttacacaatgacaccgcctatgggctgacggatgcgggcacggtggttagccgcaaaccgctcatgtctctgaaaccaaatgatatcggggttacgacacgcggtgctaatatccgtgatccacagctgcaaaagcatctgctgcgtgtcacccgcaggctggagggaaaagcgttcgaaaacgctctgctggatttcgcaaacacgcgcaaattgcccgacaacagcgacaacccgtatttcgggctcagacgtgtacggctcgaagagaccttacaggaaagcgcccggatcgaagtgcaggatcagaatggcacgtcattcaaagcctacaaagctggaagcaatcagtgctacgaaatctggcgctgccctgacgggaagatcaagccacaggctatttcaacatatgaagcccatcaaacgacggtcgagcgcaaaccccatcctgctgcaaaacgacttttgcgcgtttacaagcgtgatatggtggcgatcgagcgcaatgagcaaatcatcatttgctatgtccagaaactggacgttgccaatggcctgtttctggtccctcatacagaagcaaacgccgatgctcgcaactccgacaaaacggatagtttccgtttcatccagatgagtgccggccccctcatcaaagccaaagcgcgtcgaattcacgtcgatgaaatgggccgcattcgcgaccccggcccacccaggtagcaacttgattcggtgttttgacgaataacatatatactccaatgtgttagcgattcgcatgggggcgtgaaaggctaaccagtggatcagatcatcgacattgcgaccgatgggcgccacctgtcgcgcgaccggggattcatgaaagtctccgaaggcggaacagagattgggcgcacgccccttgaccagatcgcgggtgtcatcgtgcatgcccatggcacaacctggtccacatcccttctgtgcgaactggcaggccgcggcgcgccggttgtgctctgctcctcaattcacgcgccaaaatctgttttgttaccgattgagggccaccacgcgcaaggcgcacgtatgcgcgcacaatggcaggccaagacaccgctgatcaaacaggcctggaagcagattgtgactgcaaaggtgctgatgcaggccgcagcacttgcggcaattggtgagcccccctgagccgctgacactggccggattgggcacatgagccagcccgcaaccttcctttcaggataccgtctcatgtgggtacttgtgatgtttgacctccccactgataccaaaccgcagcgcaaagcggccggtgatttccgaaatttcttgcgtgatgaaggcttcgaacgcagccagttctcggtttatgcgcgcttcgtcaatggcaaagaggcctttgccacacgcgtgaagcgaatctcacgtcatctacccgatactggtgatgttctgatgcgattcgcgccaaaacccttgaatagccttcggataagaacctgtattatcagggccttacccgaagaactattgtagccgttcaaaattcacagtccagccgcaacgtgcgggctgggttaaaggcccagtttctgcgtgatgatctggttcacggccttggggtttgccttgccgccggtggccttcatcacctgcccgacgaaccagcccgcaagcttgggattggccttggccttttcgacctgcgcggggttgtcggcgatgatctgatccaccgcggcctcgatcgcgccggtatcggtgacctgtttcatgccttcggtttcgacaatctcggccggatcgcgacccgtggtataggcgatctcgaacacgtccttggcaatcttgccgctgatcgcatccgagccgataagatcaacgattccgcccagttgcgccggggttaccgggctctgggtgatgtccagatcgtcctttttcaaccggccaaacagctcgttgatcacccagttcgcggtctgcttgccatcgcgcccctgcgccgccgcgtcgaaaaaggcggcgttggccacatcggcggtcagcacagaggcgtcatattcgctcaggccgaactctttgacaaagcgcgcctttttctcatccggcagctctggcaggcgcgcggcgatctcgtcgacccaggcctgatcaatctccagaggaagcaggtcgggatcggggaaatagcggtaatcatgcgcctcttcctttgagcgcatcgagcgggtttcgttcttgtcgggatcgtaaagccgggtttcctgcaccacctcgccaccaccctcgacaatcgcgatttggcggcgggcctcgacctcgatcgcggcctgaataaagcgcatcgagttcatgttcttgatttcacagcgcgtgccgagatgcgcgaaatcctgggtttccatgtatttctcgtattgaccgggccgacagatcgatacgttcacatcggcgcgcaggttgccgttttgcatattgccatcgcaggtgcccagatagcgcaggatctggcgcatcttggtgacataggcggcggcctcttcggggccgcgaatatcggggcggctgacgatctccatcaggcagacaccggtgcggttgagatcgacaaacgacatcgtcgggtccatgtcgtggatggatttgccggcgtcctgctccatgtgaatacgctcgatccgcacaagccgcgcgatccccggcgccatatcgacgagaatttcaccctcaccgacaagcgggtgataaagctgtgaaatctgatagccctgcggcagatcggggtaaaagtaattcttgcggtcaaacgccgaccagaggttgattttcgccttgaggccaaggccggtgcgcaccgcctgttcgacgcagaattcgttgattaccggcaacatgcccggcatcgccgcatccacaaaggccacgttcgaattcggctcggcgccaaattgcgtcgaggcgccggagaaaagcttggccttcgaggcgacctgggcatgcacctccatgccgatcaccagctcccaatcatgtttcgcgcctgcgatcacgcgcggtttgggcgcttcataggtcaggtccagcatcatctcgctccgggtttgtcaacgcccgcgttttaggacagcccgcgcaagggggcaagccggaaagggatttgccaattgccgggatcagctgttccggtatgcgtagggtgggtgaaacccacgcgtgtgcggtaagatttcaaacgtcggttaacctttcgggattcatagacctttttcgcagcttcgtttgtcgttccatcctgaaacttggcgaatacaccataggtgagaataaacctgaaggttgaaaagtacccaaattctaaccaaccttggtcttcagaaatagcctcaccaagtttaaggcagttccgtagttgccagaaaaacaccaatcttctcacagcgtgcacattctgcgtctcaatccaccggaccagtgtattctctacattcgtcgccaaactcatatctccgccactttggaccgttaaggcttagttgatcatgcgtgatcccaccttgaccaacccccaattcccatacatatcccaatccatgacagacctcgcacatatccgcaatttttcgatcgtggcgcatatcgaccacgggaaatccacgctggctgaccggttgatccaatcgaccggaacggtacaggaccgcgatatgaaagagcagatgcttgatgcgatggatatcgagcgcgagcgcgggattaccatcaaggccaataccgttcgcatcgactataaggcgcagaacggcgagacctatgttctcaacctgatcgacacccccggccacgtcgatttcgcctatgaggtcagccggagcatgcgcgccgtagagggcagccttctggttgtcgacagcacgcaaggcgtcgaggcccagactcttgccaatgtctatcaggcgattgacgcgggtcacgagcttatcccggtgctcaacaagatcgacctgcccgcctctgagtgtgatcgcgttgccgagcagatcgaggatgtgatcggcattgatgccagcggcgcgatccgggtctcggccaagaccggcgtcggcattcccgaaacgcttgaggcgattgtcgcccatctgcccgcccccaccggtgacgcaaatgcgccactcaaggcgatgctggtcgatagctggtacgattcatacctcggcgtggtcgtgctggtgcggatcatggacggtatcctgaaaaagggcgaccgggtgcgcatgatgcaaaacggctcggtgcatggggtcgaacggatcggcgtgtttcgccccaagatggaaaaggtcgagagcctcggccccggcgaaatcggctttatcaccgcctcgatcaaacaggtgcgcgataccaaggtcggcgataccatcacccatgacaaggcgccctgcgacacgcccctgcccggcttcaaaccctcggtgccggtggtgttctgtggcctgttcccggtcgacagttccgaattcgaggatctgcgcgaagcgattgaaaagctggcgctgaacgatgcgagcttcagctacgagatggaaacctcggccgcgcttggctttggctttcgctgcgggttcctcggcctgctgcaccttgaggtgatccgcgaccggatcgagcgcgaatatgatatcgagctgatcaccaccgcgccctcggtgatctatcacgtcttcatgaaagacggcacgatggaaccgctgcacaaccccgccgacatgcccgacctgacctatgtcgatcacattgaagagccgcgcatcaaggcgaccatcctggtgccggatgaatatctcggcgatgtgctgaaactttgccaggatcgccgcggtattcagcttgacctgacctatgcgggcagccgcgcgatggtggtttatgacctgccgctcaacgaggtggtgtttgatttctatgaccggctgaaatcggtgaccaagggctatgcctcgtttgattaccagatggagggctaccgcgaggaccttcttgtcaagatgtccattctggtcaatgacgagccggttgatgcgctgtcgatgatggtccaccgcgaccgggccgatatgcggggccgcgcaatggtggaaaagctcaaagagctgatcccgcgccacatgttcaagatcccgatccaggcggccatcggcggcaaggtcatcgcccgcgagacattgtcagccatgcgcaaggacgtgaccgccaaatgctatggcggcgacgcaacccgcaagaaaaagctgctggaaaagcagaaggccgggaagaagaaaatgcgccagttcgggaaagtggatatcccgcaagaggcgtttatttcggcgttgaagatggatagttaagctatttcgcagcaaattatggggatttatgtttactggttatgtatttggctgagctttgaagatcaggaaacatcgtcattcgattgactcccatgcggtcaagctcctcgcgaaaaagaggtttcagcttctttgggacaacaaatttcttcatagaaaactttgaagacttagctaagtgtgagaggacaccggaaacaataaacgcccccgattgagctgtgatccttttgttgttccgcatcggcaaagccagatagttactatataaatctataggctgaattttattttcaaagtacggtttttcttgccgaacaaattgtacaagtcgtcgcacggcttccaactcattgaactcatccacattaattttcttaacaagatccttccttttccgctcaagcattatgaaactacgaatctcctccttttctgcgtggttcagtttggctaaattgcagatgcaactgagggtatcactctcaaaacccttaatacgagtactatcaacatcgaatcggattaccgctccatctaccgtgtctgtgccatcgtcgtttgcttctgtagcgaagaaaagacccgcgatcgaacttaaagaaacatctaaaaggcgagttggcagcccatggtgttgcgcctgaacaaggctttcaaatgcgcttcggtgtcccacaaactcctctgggtgaaacgacatcaactcacggaggattatgttttctgacttctttaccattaagtcttttctgaagacagatggctgaattcgatatctttcatctttgtggcccctgaagtaaatattcacacccatcgagccaatggttgaaagcttctcgatatagtcggacacagatcgtacttcttggctaattgtcttcctcattaggttgcctttgccaatctcgattcaacagaagagtgtcgcattgagtggttgctgtctacacgttaaacaatcggctcataatttcttgttgcaacatagcaagcgtagggtgggtgcaacccacgcgtcctccatatcaacccgctccgccttgatatccgtcacaacgcgtgggttgcacccaccctacgccacataacggccctcgcgcatgtcgcgatgcacggtggagtatggccaatcctcggggcgttcggccaactcgtgtttcaccggattgaaatgacaatacgccacatgggtctggaaatcggcgctatcgcggatcgcatgctcccaaaaccggcgttgccagatgcctttctcgccccggcgggccttgcttgggctgacctgcccttgcgccctgcaatgttgcgaaaacacgcccttgatctttttccaccggattgaaaaatcggcgtcacctgctggcaatgtccataccgcatgaatgtgatcaggcagaacaaccatcgcctcgcagatcactggatggtgcgcgacaacggccccataaacagagcggagcaggtcgatctcatccacaagcgtgctggccccgcgattggcaagggcaacagtaaagaaatacgttccacccggaacaaggagacgtcgataccgagacatgccggtatcgttccgcacattggttaatttaacgtgtagggtgggtgaaacccacgctctttcttaaaaaatcccgtcaccgccctttttatcctcgctcgccttatccacggccacgaccgtgccagcgcccatgccggcaaggacgacgggggcacagcccgaaagggccagagtgccaatggcaagggtcgcaatgaccaaagggggtagtttcatgtctgctctcctgagggtatcaaaatcaatccctcacatctctagcacagccgtgatctgtctgacatcacctatgcgggcgccacgccgtttttgacatctgttcagagcgtgggttccacccaccctacaatcggcctataccgcaaccaaacaacaacttttggatatgccgccatgccttgcgccctttgctctgccgatgcccccttgtcttcttttgccgtcaccggcggccccgacggggccagcgtcgagatttgcggcatttgcgaggcgcagatcaatggcacgcccgagcccgatcactggcgcgcgctggcctcgaccatgtggtccgaaaaccccgcgacccaggtcatggccgcgcgcatgctggcgcgcctcgccgatcaggactgggcccgtgatctggccgatcaactctggcttgacgatgacacccgtgcctgggccgagaacctgccgcaggccagcgatcacaaggacagcaacggcgtgccccttgcccagggtgacaccgttgttctgatcaaggatctgccggtcaagggcggcggctttaccgccaagcgcggcaccgccgtgcaccgcatctcgcttgtcgccgacaaccctgcgcatatcgagggtcgggtcgaaggccagcggatcgtgatcctgaccgagttcgtcaaaaagcgctaagcgggttttggccgtgcgcgcccggttgcctcgggatagaatgaacgcagggccaatgcatggtagattatcgcatctgtcatccagaaggagagatgtgatgaaacaccttacacttgccaccgccctgtgcctgatgtcagccccggcttttgcttttcactgcccgatggacatgggcgagattgatgccgcccttgccgagggaacaaccctgtccgaggcacagctttcagaggttcagagcctgagggccgagggagaaacgctgcataacagcggcgatcatcagggcgccgtcgatacgctggccaaagccaaggccattctgggcatcaactgatccgtcaggttaccgtggcgcgggcttcgtcggtattttaccctcgcgacccgcgcccttgatgatttcgcgggctgacatggatcaaggtgcggtaggcaaagttttgcaatacccctctggcgacgcaggtttagtcttaggaggatcccatgctccggcttggtttgattttgcatctgttcatcgggtctacccttgccgggtcggccatcattgtggcgcttgtgatggggcaggataccatgaccccgattctgatcgcggcgctgcttgggtttttgatcgccattccagcgacctgggtggtgacgaaaatgatctacgaaaaccagtgatcagcccagccaggtgcgcacagcagcctcgaactcgcgcggcttttcggcatgaagccaatgccccgcgccgggaatcttggcgaattgagccgccgggaacagggccttgatccgagggcggtcgtcgcgtttgacatagtccgacatcgcccccgacaggaacagcgtcttgccctcgtaagccgttgaaaggtcgggaaagccaaggatatgcggcatgtcccgttccagcacatcaaggttcaaaagccaacgcttgttcttgacgtcaagcgcctgaagaaagaacggcaccagatcggggttatccaccagccccagcaattgctcgcccgcgtcagagcgtttggtcaccacgctcagatcgaccgccttcatcgccttgatatagtggatttgcgtgtgctcataggccaccggcgcgatatcggccacgacaaggcggttcacaagatcgggccgcgtcagtgcaagcaccatcgccgccttgccgcccatcgagtggccaagcacatcataaggcccctcaagctgttccagaacctcggccagatcaccggccatatcggtataggattgggtgtcctgccaggcacttgcgccgtggttgcgcatgtccaccgcgaccacgtggcgggtgtcggacagccgcttggcgatcacaccccaattgcgccccgacccatatagcccgtgcgcgataagcaatccgggggcgtcggtgcgcgccccatgttcgatcatattcaacatgacccctgaatatcgccccgatccgccaaggaccagccctattgagcggcacgccccgaacggctagactattctcaggagaccaccaatgtgatcgacaccgatgatttcaataccaggcttgagcggctgcaaaccgccctgcgcgagcggatgcgcctgcgcgggcgcacacttgaggcgcaattgcgccgtgccgggcgccgcctcccgaaacggcaacgccgcgccggtgcgatcgtgcttggcgcgcaggactggatggcccaccccaaacttgcgcgggtactggatatctcacaggtcaacgccgcctttgccgacctgcatgcccatcttgacaccatcgaccccaaggaagaccgcaagaccgccattctgcggctctttgggggcgtggttctgaaccttgcccttctggtgatcctgctggttctggtaataaagtggcaaggcgccatgtaagcccttgtaagcgcgcattttgctttgaaaacagaagagagacggggccataagacgttcagacagcagcaggagatgcggctttcactctcccgactgcgccgaaacaggggctttcttggtccatgcctcgcccagatacggcatctgggccttgccgtcttcctgcggcaacccatagctcaacccgcgcccgatccggtggacaagcgccgaccaggcctgtgccaatggcggtggcaactcttgctccagcaccgcgtcaaacagcgacagccaaaccggaaaatgctgggtcttgacgttccccgccgccatatgggcctgcatcgggttgccatcataacagcgttgcagcagcagggcgttgcgccagaaccgcccgatcttttcttcatgcgcgggccagtcttctatatgtgcggcaaagattggcccaagcgccgggtgcgcccgaacgcgcgcataaaactgcgacacgacccggtcgatctgcgcctctgtgacggggatgcgcgggggcatcatcacaccacgacgaaccagacgacaagcaggctcagcacaagataaacgagcgtgttcaccatccagcggatcagacccgcctcgccttccgggtcaacccccagacgttcgcaagctttggttccgggccatagaaatgcttcggacagggtcatttggcagactccttaacaggtattcatgatgcgcattatataccgcttttaattgcgcattgtaaatgctaaattaacggcatgcgactggacaaattcaccgattacgccctgcgcgtccttatgacactagcggtacgtgcgcccgcacgggtgcccacctcagagatcgcggccttgcatgggctgtccgaacaccacttatcgaaggtcgcgacccagcttgccaatgaggggtttgccgcctcggaaagaggccgcaa

SEQ ID NO: 3701 - DNA, 13425 bp, synthetic construct
  source 1..13425: mol_type = other DNA
  misc_feature 1..13425: note = Synthetic
cgaaccggcacctggcgattcagaagacgcgggccaggaattgcgggccgcatcccttcgacgaaggcctgccggaccggcgccaggcccttcgcgcgaattcgagcagggatccaggcatcggggtcgacggctccgggggcttcggctggacgttcgtcgacaatgcggctctccggacaaggatcttcgagacgttcggcgctcggcccctcgacatggagtgcgccgccgtggcacgcatcgactgcaccaacgacgcttcgttcgtcgcagcacgcggtctcgccgacctcgcagacggcgaggcaggcgcgttccagatggagacatccctcgaagaggcgtggcggcgcccacgcctccaggtcgtcgcgccggtaccggatacgcgagcagaacctgtgaaagaccggcccgcccctggagacccggtagcgcgacagcgtcttcgccgacagccccggacgccgggccgcccgctgcgtgtccaggtagatcgtctgttccgtctttcccctctcctcgtgttccatgggtcgtgccggcgccgggacggcgcggacgcaggtcccgccacgagagccggaatcccggctgccggtgagggtcgttcttcgattccaaaaacgaccgtgcaggcggggtctcgggaggacaggagaggacgggtcgcggcggcggtcgccggggcgactcccttgaagagccgaaatcgccgcgaatcggactacggttcagggcgattcggccgtccggaccgggcctgcgcttcaacgaccatccgttgcggacgggaccgggaagcccggacgccgcgcgaggttcgcgaatccgtcacggatgcgcaggccagcagacgcgagggcgggcaccttcgccccggaaggcccagctccgtccgttcgcgcttgcgcaggacggcgaatttcgggacacgtccctgcacgtctcaggaacgcaaggaagcgccatgaacatcagcctcgagctcttcgaagactccgcccgcttccggtatccgccggaacacgaggcatgcatggaggctctcgaccggcttctggacgagcgcgaagccggcaagatcggcgggaagcgctacatggacgggcttcaggacctcgccggaaggcatccctggttcatcgacgcgcatgcgcatgtcggcaacgccctgctcaacaggggcaggacgagacccgcgctcgacgcgtacctcaagggcctcgctctcggcgaggcggccattcccgaaggatacgcggacctgatcgagtggagctggatcgagaaccggcccttcttccgtgccgcgcatggcgccgtcctgtgccatctgcaccttcgccagtgggacgaggcgatcgaccggatgaacgcgatgctcgcattgaacccgggcgacaaccaggggatccgctacattctcggcccggccttcctgcgtgccggacggccggacgaggcgcgcgcgctcctggtggagttccgcgacggggacccatcgctccagtacgagctcgggcttctgaggctggtcgagggaaagttcgccgccgccgcgacaagcctgcggcacggcttcagcgggaacggctacatcgcggagatgatctgcgggaccccggacccgatgcccatgacgatctggcacggatcgggcttctccgatccggactccgcgaaggactacatgcgtctcttcggcgacctctggaacgactcgccaggagcgacggagttcgtgcgctggctccacacccacccgaaggtcatggctgagcgcacggccgttctcgaatgcagggaggcgctgctctggacgcgggacgtcgagaaccggaggaccatcctggaccggctcggcttcctcgcggactcaatcgacgacagcctgtcggacagcatcgtggcgcagcgcacggaccgcgccggcaacagggtgtggccctggctgcacgccgcgtcgtgccggagaccggactgaggcaggggcggtcccgaaaacggaccgtcgcacagcttcgcccccgccgacgcgccgaagcccgcattccgcaacccggaacgatcattcggcaagacaggcaccggcacggctgacggccggccggctcagtccgcagcggcgtgatccggacctgtggctcccgggtcctgcgcttcgcagacgaccggttccgcaggggtcacgccgcagaccccttccaggcgcccgaagcccctggcgcggcggccttgtggcggacatgcacggcgcccccctccttgcggatctcgaacccgcccgccttctcggcaagagtgctcaggttcgcgcaaccgtagctgcgcgggtcgaagtcgggatgcgcgccctggatgcgctgcccgacgctgcccaggctctcccatccgtcggcgtcaggttccgcgatcgcgccggcgatgatcctgcgcgccttgcccggagacttcttctttcgcgccgcacccgcgggagtcccggcctcgtccttcgtccgctccggctcggtctcaagcaggttctccacgtagatgaaccggttgcaggcgttccgaaacgcctcgaccgacttccgttcgccgaatccgtacaccacgaggccctcctcgcggaggcgctgggccagacgcgtgaagtcgctgtcagagctgacgagcacgaccccgtcgagggtccgcttgtacatgagatcgacagcgtctatgaccagcgcgatgtcggacgcgttcttcccccgcgagttgctgcgctgctggtgctgcaggatcgcaagcgacttgatcgccccgtcccagccggacagcctgccatgggagaagtcgccgtagatgcgccgcacggtggcctccccgagcttcacgatctcgtcgaagatggcctgcgcgtgcctcgcgctggtgttgtcgccgtcgatcaggacggcgagtctcgtcgtttcccgcgcttctggcatgctcgctcctttcgggcgtcggcttgccggcgccattccagacgtgtcgtcgtcgttgacggagtcccttacggcctttcagcctgccgcgccatgaaggaacgcctgcctctcctcccgcctccctcggtacggaagtccgtcatgggtcattgcccttggcgggcagcgcggcttgcgttcgcagcccgtcaacggacgtatccctcttgcacaaggaccaattcgtgcgtcatgcccggctcggtctccgccatgccgcgaaagacgccttctcatgcctcggcctgcgcgagccgctcggcgcagggctcgcaccctcagcccacggtcgcgatcgtgtccgcaagatacgcgcacatctgggaaatcgcctcgctggcctgccggagaagctcgaccctgaccgtgtcgaggccttcgtcttccaccaacctcatcgcacctggcgcgcgatccttcatcttggcctccgttcgccattctgcgctgcctgactgcacggtccgggcctggaatccgtcggttccccacctccaggtccgtaccggacggtcagctcgcaccattgccctgagtcgccctgccgggcaagccgcgccgtcctgaccggcatcgaaaactctccatcgcgctgcgggtgcagatcggtggcaaggcgcgggccatccaggcacgagacggggtccggttcccgcccatccgttccagcttccctcagtccagccagcgaacctcggcaatgcgttgcgtgccgcaaacgccgcatcgcatcgaggcgacggcgtcacgaacgcgggcctcctcgccgtgccgcgcgacgagggcggcgaccggaacgtcgccggcatggccgcagacgcacacgatccggaggctcccgccacggagacgatccagccgccgcccgtccaggcgcagggcagcgtcctccccggaagcggccccgggccgaccggtcccggctggaatgtcttcgagagatctcgctcgggcgggtttcgcggcctgtttcgcggactggcgcgacgggcggaacctgcccgacgcgatcttgcttgacgagtggattcgcctggaccgacctgagaatgccgtcattcgactcccgtcccccgcacgttgccgatcattgccgccttccgttctcgaagaccttctcctgtgcaccaacgaaggcctgcgctgcgagccagcggtcgcgtgttgccacgtcgccgaaacgagactcgccgccccatgtcgcagccttcgcgcaggctcgccgcaatccacgcaaagaaggccgtagccgcccggcccggcgtgacgaagccggcccgcagcgcggcggcccgtgccagcccgtcgatgtccatggcgcgcaggctgcacagaacatagcccgaggcgggcacgacttccagctatggatcatcagccttgaattgtcgacatagatgccgttgcgcgggctcccagcgctgtccggtcccccgcccctgcgtcccgaatcgttcaggaagggaccgtccgctccgatccggccagcccgcgcagctgtccggtcacgtcgcggcgagcctttcccgctccagccaagtcgctttcgtgaccgtcagcgaccgtcggagcgcgtcgaaaaccccgccgaacttcagcgtcgcggaaacggcaccacgttgtcggcctctccctccgggccagttcgcaaggtcaggaatgccggctcgccctctcccgaggccgtccgcgtacggacctgcacctcgtactcggtgtcgggcctgagatcgacgaacgtgaagctcgtcaatggcgtctcgaacccgaagctccagtcctcgcgcccggcctccctgattcgcacgacgtgcgtcacgcccggccgccacgtcgcctcgaccacctgccgcccctcgtccaccggcagcctgaccgaccacgcgccttcgttccatgcgactttcgggctttcgctccccggccgtgtcatgcctgccccccgcaattccgcgaacacgcgaaaggcgcacgttcgtgcatcggcgtcaagtcaagggcctccctccgggcgcaaacacgttcgccacgccaatgcgcggcttgccgtcccgaggcggacgatggccggcaccggcgcaaggggcgcgacacggacaaggggacgtaagggaatcagtcgccggttcggtccaggtcccgcgcctgcctcaagccgtggaccatgagccgcctgcgatgaaattgggcgaaggccgaggcttcatgcctgccggcgccgtcacgcacgcgcggtttccgggcagtccacaagtaggtcgtcagcgatcccgcccgacacccggacagtcgaatccggcgccggatcctgtgacgggtgcgggtatctcgcggtggaaacggctgctcatcctgcatttcgcgcagctctgccgttcgacgaggaaacctgcacccgcagaaagtcattgaagtgttgcttcccgtgttcgagaccgtgtcacccgcacaacgcaatgcagcctttccgcaccatgcacttgctgaaaccgtcagcccccacggctcagttccggggcgttggtcgccgcgccgtttgggcaaggaaaacgacatgcgcatttgcgaccttcgtcattccctcgcctcaagggcccttgcgctcggcgagagactcacgatgatcggaaagcttcttcgtcacacgcaggttcagacaaccgccagacacgctcagcttgcccgggattcggtccagacggccgccgcgaaggtcacgggcagcatcggccgcgacttgctgggtgagcggaagcctcacggatccgcggcgccgcgatgaaccgggccagctcccccgcccgaccggcactctgccagcacgcgttggcagcagcgcacgaaccgcacaagcgctgcgcaatttcaggcgctgcgacacgcggcaaagaccggggaaaagcgcgcttgtgcttcgaccggatcatgagaccattggacgcacttcgcgtggaatctcggatcccgcacgcagtgcagtttccggtttcgctgcgggatcgcgggctcgcgagaccgcccggcaggaacggccgcggggctggcggacttgcccgatcagcgaagaaggcgagacaacgaacgggacttgtcctgcacgacctgcaatcgcctgtcctgtcgccggtctagaatctcttgcccagccccgtggaattcaggatcgcgtttgcggggtgcctgctcttgatcttcgcccgcacggagacacttcgccgcgtgccgttcacgttgccctgccaggtctcgtgactggccttgcttcccgatctggcccgcgaccacccggctgacttcaagagtctccagaattcgcgcccgcattccttcaaggccaatgcgcctatgccaccagcggaatttcgacgctcattgaccgtgacaccgcaggcgtcaccgccgaaacataccccacgctgattgcgtacacgtcatcggactccaagccgagattgtcctcgatcaggcgcggcgcacgctccttgatcgtgtccatgacgccgccaaccgtctccgccttgaccaccaggcccgggatgtccgggcttgttgccacgaaggcgttcgtttcctcacacctgcgaagttcaacgcgaaacgtgcgtggcatgacacttccttccgcattgggcatgaagtgcccgtaattcgccgcgcagccttctgcaatgcctgaccgttgatgcgttgcttgcgcgacagcgtcgacgtgcctggcctgaacaaggcgctgtcgacagaaggaaacccgacgctcgccaccgtcctgaaggttgccaaggctcttagcctgaaggtctctttcgaaccggatgcagccaatgggactggcggagcatgaccgttgaactgacggtccctgagccggcggaccgcctgaacctggatcaggccatcgcaggcaccatgcgacgctggcggagttgcaggctgtcggcagccagcttccgcgcattgcgtcgggagcctggcgaacctcttgcaagacaattgagccgaacagcctgcaaattgggcaaggttccgggcgtggtcaagagcgcatgccgggagcccaagattcacgggctttccacgtcccatcccgcaggcgcgctcaggtgacgaacaatccgaaacgccggtcgaacttcgcccctcgccagcctcttcacccgcaagtttcccttgggctttccgatcgtcgttccttcgcgggagcgcatcctgacgagatcgcctttgaactcggcgacggcggcgacgagtttgaagaagaacctgcctgttcggtcggaggggtcgtgggacgcctgcggccgctcccgcgcaagtgctgcccaccgagaggccgcgactctcagcccctgccgatgtgccgctccgtcttctacaaacgcttcgctccgctcgccggccggctctatagcgaagatctgaaggaatcgaagaatgaagggcgatctgatgacaggacaccgttcctttgccagattgacggaaaggttgcctcccgcgagtcggtcacggatcgtggccaggaaagggaagctacgcgctactatgctgcttcatgaggtcaggcaggcccgggccatgacccagagggccattgtgaggccctgaaagtgcagcagcctgcagtcgccaggctggaaaggcgcacggacatttacgtgtcaagtcttcgctcctacatcgaggcgatgggcggcaacttggacttcgatgcgcggttcccccacggcagcgtaatcatcacgaatttcaccgatgccgacgagggtcgcatcgaggctggtccgctctcggaggctgcaagactgtagcggtggcgcgacgctagaccgcttcctgatgctcaaacttagaagcccaaaggggcgaagaaaaacgcgggccgtagcccgcgcttcaatgtggtgcaatcgagtgcttgttaacggctcgaccacgaattctgaacgtggaggtgaataaccgatccatcagttgcggtccagaccaaatgcacgtttggcagacgccgtccagctgcagccaaatcagccgttcgaggcccttcgagtgcggcgcgggcatggacgcgcgccttgtcctggtgatacggaatatcgtgacgcgagacataggcgcgccttcatcccagtttggacccagaaggcgttgcctgcagcacgagctagccacggcttgactcaagcgcttttcgtgccaaaggaagtctccgaagcaactttgggagagtgcaatgcccacgcgtctcggtctcgacatcggcacgaattccatcggttggtggctctacgaaacagatggcaagaccattgtcggcatcgtggacggcggcgttcggatcttctcagatggtcgagacgcgaaatccggtgcctcccttgcggtggaccgaagggcggcgcgctcgatgcgccggaggcgggacaggtacctgcgccgccgcgccgccctgatgcgcaagctcgccgaggccggcttgatgcccaaggatcccgcagaggccaaggcgttggaagggcaagatccttacgagttgcgggccaaagggctggaccggtccctgccgctacaccatctcgggcgggccctgtttcatctcaaccagcggcgcgggttcaagtcgaaccgcaagaccgaccggggcgacaacgatcccggcaagatcaaggacgcgacggcaaggctcgaccaggccatgatggccatcagggcgcggacctacggcgagttcctacatttgcgccgtcggcaggtgcctgacaagcacgaggactgcagggacaacaacgatggttcgcgaacggaccaccgcaagactccctccgtgcgcacccggctcaccgtggtccgtcgcgaaggatcggaaagggaggaggcgggctaccagttctatcccgaccgaaggcatcttgaaggggagtttcacaggctttgggatgcacaggccgtccatcacccaagcttgctgaccgatgacctcaaggaggcgctatttgagacgatcttctatcagcgcccgctgaaggcgccagccatcggactgtgcctgttcgcgggcattggcgacgtgcctggagacgaacgacggctgcccaaggcccacccgttgacgcaacggcgcacgctctacgagacggtgaacaacctgcgcgtcaccgctgacgggcgggaacggcgtcccctgacgctcgaggaacgcgatcaggtgatcgggcttctggacaacaagaaacctgcgaagtcgctcaaatcgatgaagatgaaattcgatgcccttgcgaaggcgttgaagcttccgcccggtaaccgcttcaccttggagaccgcaagtcgtgacacgattgaatgcgatcctgtccgtgccagcctctgtcaccctgatcggttcgggccgagttggtcaacgcttgatccggatcagcaatgggaggtggtgcgccgcatcaacggagtcgaaagcgatgcggaccatgacgccctcgtcgactggttggcttcgacccatgggctcccccgagaacgcgcggagacgacggcgcaggctcccttgcctgaaggtttcggtcgccttggggaaagggcaactctccgcatccttgcggccttgcagaaagacgtgcggagctacagcgatgccgtggctgcttgcggctggcaccactctgatcagcgcaccggcgagatcctggacgaactgccgtactacggcgccgttctggaacgtcacgtcattcccggcacggggaacaggaaacatgatgacattacacgttatggtcgcatcaccaaccctacggtgcatatcggactgaaccagctgcggaggcttgtgaacaagatcatcgccgtccacggaaaacccgatgagattgtcttggagctggcccgtgagctgaagatgtcaagggagcagaagaagagaatcagcgagacgaacagcgctaatcgcaacgcggtcgagaagcgcggcgaaaagctggcggaacttcggcagcctgacacgggaaggaatcgaatgatcctgcggttgtgggaggatctgggccatgacgtcatgacgcggaactgcccctacaccggcgagcggattggcgcgggcatgctctttgacggctcctgcgacgtggatcacatcctgccctattcccgcacgctggacgacagtttcgccaaccgcacactgtgcctgcgaaaggccaaccgggagaaagggaacaagacgccgtgggaggcatggggcgagacggatcgctggccggacatcgccgccaacctgaagaacctgcccgacaacaagaaatggcgctttgcaccggacgcgatggaacgcttcgagggagagagggacttcctcgaccgcgcgttggtggacacccaatacctgtcacggatcgccagaagctatctcgaagcgctttatcccatgggcgggcatgtctgggtcgtgccggggcggttgaccgaaatgctgcgccgccattggggcctgaactgccttctgcctgatcgcggcaagggcgcgggcaaggcgaagaatcgcacggaccaccgccatcatgccattgatgcggcggtcgtggccgcaacagaccgaggcctgctcaaccggatcagcaagtcggcagggcaagacgagcgtgaagggaagggcgccgaagatgtcgcgcgcagcacgccagagccttgggaacacttccgttcggacatcggccgccagctcgagacaatcatcgtaagccatcgtgccgatcatggacgcatcgaccccgaggcccgcaggcggggggtcgacagcaccacgggacggctccacaacgacactgcctacggcatagtcgatgaccagaccgtggtcagccgtgtgccgcttctgtccttgacgatcaaggacatcgggttgacatcccgcggcaagaatgtccgcgatcctttcctgcaagggcacctggcccgtgtgactcgcggcaagacaaccccgaaagaggtggaggcggccttggccgaattcgccgcagccgaaaggctacctgacgggagccgaaatccctacaaggacctgcgcagagtgcgtgtggacgaaagcctgcaacgagcggcacgagtggaagtcaacggtccggatggtcggccgcacaaggcctacaagggcgacagcaaccattgcttcgagatctggatgctgccagacggcaagattcgatctcttgtcaccgccacgttcgatgcccatcgcaacgaggtgcacaagccgcatcccgcggcgaagcgcctccttcggctgttcaagcgggacatggttgccattgaacgtgaaggtgcaacactggtttgctacgtgcagaaatttgacccggccaacggcatcttccttgcgcctcatgtcgaagcgaacgctgatgcgagaaatcgtgatcgcaatgatgactttcgacttctccagatgggggcgatgccggccttgaaggccaagctccggcgcgtccatgtagacgagatgggccgccttcgggatccaggcccgatacaataaggcgtcgacgcgatcggctcgggcaattgcggcttgcgtgcaagctgttaggatgcatccgtggaccagatcatcgatattgctactgacggacggcatctctcgcgggaccgcgggttcctgaaggtgtcagaggatgggcgggaaatcggtcgcaccccgcttgaccaggtcgccggcgtcatcgtgcacgcccacggtacgacttggtcgacgtcgttgctggtcgaactggcagaacgtggtgcgcccgtggtgctctgcggacccaatcacgcgccacgttccgtgctgatgccgatcgagggccaccatgcccagggcggtcgactccgtgcacagtggcaggccaaggcgcctctgatgaaacaggcctggaagaagatcgtcaccgccaaggtcaccatgcaggctgccgctctcgaagcggtcggccagccgtccgcgccgctgcagatgatgatccgcaagatcacttccggagatggcacgaatgtcgaagcccaggcggcccgctactactggccgcgcatgatgggcgacgcgtttcgccgcgatgcaaaggcctcggatgtcaacgcactgctcaactacggctacacggtgctgcgcgcagcaaccgcccgtgcggtcgtcgccgccggacttcacccctcggtcgggttgcaccacgccaaccggatgaacgcctttgctctcgcagacgacctcatggaaccgttccgcccgctggtcgactgcgcagcccgccgttgcaccgccgaccacggagcacaggtcgacacgccgaacaagcaggccctcgcgcgtctgattgcaatcgacttgcccctcggcggcgcgctgagccctgtctccgtggccgtgaccaggttggcaacttctcttggacagagcttcgagatcggcaagctctctctcgtcctgccgaagccgcccgatgccctcacgctcgcgagtctcggcgcatgacattgcagccagacgttctgtcaggataccgcctcatgtggatgcttgtcatgttcgacctgccgaccgataccaagctgcagcggaaggccgccacggacttccggaacttcctgctcgatcagggtttcgagcgcagccaattctcggtctatgcccgcttcgtgaatggaaaggaggcattcaggacgcgggtgaaccaaatcgagaggaacatccctgcaatgggagacatccagattctgaacttcacggatcgtcagtaccgtgacatcatccatttctcggaccaaggccgccgggctccccgcaggaatccggaacagctggtgatgttttgaccggaagctgccgaaatgatgcaaggagatgccggagatccccctgcaaaaacaggggcatctccgacgatcgagcttagccgttcagaattcggggtccagccgcaacaccgggcagggcgtgttcgacgacctgctgtcagcttagccgttcagaattcggggtccagccgcaacgttcagcgtcatcgagacggccatgggcgcagcttagccgttcagaattcggggtccagccgcaactgagggcgccctgcgcggcgctgagcgcgcagcttagccgttcagaattcggggtccagccgcaactcgacgcgcggacgacctcgttggtcttctagcttagccgttcagaattcggggtccagccgcaacatccgccgcagtgacctggacagcgagctgagcttagccgttcagaattcggggtccagccgcaacgaacagccacgacatcaacgcctgccggcaagcttagccgttcagaattcggggtccagccgcaacttccgaccggacctacatcggcgtgaacctagcttagccgttcagaattcggggctgtatcaaaaaaacatct

SEQ ID NO: 3702 - DNA, 10852 bp, synthetic construct
  misc_feature 1..10852: note = Synthetic
  source 1..10852: mol_type = other DNA
gaaaacctgtgcgagctcatcgaaatggaccgtcaacacgcacgttgacctcgctgtggcctacgccggatgcttacggaacaaccaccgtcgcctactaagttaatcctgtttcgtttgccaagtgccaccaacaaaaaacgcaggccgtagcctgcgtttcaatgtggtgcaatcgaatgcttgttaacggctcgaccgcgaattttgaacagcttcaccataaccgcccatcggtgccggtcaagcagtttcagttctttgcgtccgaagttcgcggtccagccgcaaccaataaacttcatcgtcgtcgcgcaacggcggaagtagattgattggtggcgcgaggtgtggacccccgcttgtcccggtgctaagcttctcttgcgacagacgattgccgaccgacttgcggcgccttggtgtggacccaagcagcaatctcacccaaaccggcgagccatgcttgaccttggctcgctttcgggcgaagatcaacccacaataaacttcgttatgggttatggcattatgagagacttcaattcggaacatggattgcggctgggtctcgatatcggaacgaactcgatcggctggtggctctacaggacgcacgagggcgagataaccgaagttgccgacggcggtgtgcgcatcttctcggacgggcgcgacccgaaatccggagcctcccttgccgtcgatcgccgcgcagcacgcgcccagcgccggcgccgcgatcgctacctgcgccgcaaggccgcgctgatgaagcggatggccgaagctggattgatgccgtccgaccccgccgaggccagggcgctggaggcgctcgatccctacgccctgcgagcgaccgggctggatgagaaactgccgctgacgcatctgggacgcgcgcttttccacctcaaccagcggcgcgggttcaaatctaaccgcaagacggatcgtggcgacaacgaaagcggcaagatcaaggacgccaccaagcgtctggacgagggaatggcgatcaggaaggctcggacttatggcgagttcctgcacatgcgtcgtgctgcggcgcccgatccccgccgcacgccccccgtgcgcacccgcctgaccgtcgcccgtcgcgatcacgccgaaaaggaagaggcgggttatgatttctatcccgaccggaagcatctggcggacgaattcgcggcactctgggcggcgcaggcggcgcattacccggaactcctgacggacgaattgcgtgacgaaatcggcaccatcatctttcaccaacggccgctcaagacgcccgaggtgggcctgtgccttttcacggaggagcgccgtattccggcggcgcacccgctgaatcagcgccgcatcctgatcgagaccgtgaacagcctgaaagtcgctgcgcgcggcgaggcggcgcgcgggctgtcgcgggaggaacgcgaccggatcgtacatgcgctggacaacaagaagcataccaggaccctctcgggcatgacgatgaagctcaaggcgctcggcagggtcatcgggctgcgcccggaacagtccttcacgctggaaaccgcaaaccgcgacgccatcgcctgcgatccggtgcgcgccagcctgtcgcatccggaccgtttcgggccgcgctggtcgacgctggacagggcggcgcaatgggacatcatcgcgcgtatccgcgcggtgcagagcgatgcggaatttgcctcgctggtggactggctgatggcgcagcacgatctcgacaaggcccatgccgaagccaccgccaacgcaccactgcccgaaggttacggccggttggggccgactgccacgcagcggatcgtggaggcactggactcggatgtcatgacctacagcgacgccgtcgctgcctgcggttggcatcattcggacgggcgcaccggcgaggttctggcggaactgccctattacgggcggatcctcgaccggcacgtcattccgggcacctatgacgagaacgacgacgagatcacccgctatggtcggatcaccaacccgaccgtgcacatcggcctcaaccagctgcgccgcctgatcaaccggatcatctgcgttcatggcaagccggacgagatcgtcgtcgaactggcgcgcgacctcaagctgtcggaagatcggaagaaggaggtcgagcgcgacatcaagaagaacaccgaggcggccatcggccgtggcaagaagcttgtagaggaacttaaccagcgggatactggagctaacaggatgttgttgcgcctatgggaggatctcaacccgaacgactgtctgaaacggttttgcccctacaccggcaagcgtatcagcgcagccatgctcttcgacggctcctgcgacgtcgatcacatcctgccctattcgcgcaccctggatgacgggttcgcaaatcgcacgatctgcctcaaggaagccaaccgcgccaagacgaacaagaccccgtgggaggcgtggggtggcaccccgcaatgggaggccatcgaggccaacctcaagaacctgccgaaaaacaaggcgtggcgctttgcccccgacgcgatggaacggttcgagggcgagaaggacttctccgcccgcgccctcaaggacacgcagtatcttgcgcggatcgcgcggagctatctcgaagcgctatatcacggtggcgacggcaagagccacgtctgggtcgtgccgggccgcctgacggaaatgctgcgccgccactgggggctgaacgggatcgagacgctgaccgacagcgacgatcacaccgtcaaggccaagaaccgcacggatcaccgacaccatgccatcgacgccgctatcgttgccgccaccgatcgcagcctgatcaaacggatctccgacatggccagacgggatgaactgcaaggtgccgaagaggtcgcgcgatccgtgacgccgccctgggacgactttcgtgccgacattgccgcgcaggtgcagcggatcgtcgtcagccaccgcgccgatcatggccggatcgaccccgcagcgcgcaaacgtggcaaggacagcaccgcgggccagcttcacaatgaaacggcatacggtctggccggcgagtcaaccgtcgtcagccgcaagccgctgacatcgctcaaaccgaacgacatcgccatcaccacgcgcggcgcgaatatccgcgatggcgacctgcagcgccatctcgcgcgcgtgacacacgggctggaaagcaaggccttcgaacaggtactgcaggacttcgcacgcacccggaagctgccggacaattcctgcaacccctatttcggcctacgccgggtccggctcgaagagacgcttcaacaaagcgcgcgcatcgaggtgaaggatcgggcaggcataccgttcaaggcctacaagggcgatagcaaccactgctatgaagtctggcgcctgcccgacggcaggatcaaggcgcaggtggtgaccacctttgcagcgcatcagacccagacggttcaaaaaccccacccggcggcaaagcgaatcctgcgggtcttcaagcgggatatggtcaagctggaacgggacggtgaatggctcatcggatatgtccagaaactcgacgttgccaacggcctcttcatcgcaccgcacaccgaggcgaatgccgatgcccgcagccgggacaaagcggatccattccgtctcatccagatgggagcaggccccctgatcaaggcgaaggctcgtcgcatccatgtcgatgaaatgggccgagtgcgcgaccccggcccgcccggatagcgccggatttcgggaaattcaagtttcggcatataatcatcaagttaacgattcgcggatgtgcgtgaaggggaacttgtggaccagatcatcgatatcgcgaccgatggccgccacctgtcgcgcgatcgcggcttcctgaaggtttccgaagacggcaccgagatcggccgcaccccgctggaccggatcgccgccgtggtcgtgcatggtcacggcacatcctggtccacgtcgctactggtcgaactcggcgcgcgtggcgtccccgtcgtgctgtgcgccgcgaaccatgccccgatatccgtcctgatgccgctcgagggtcaccacgcacaaggcgcccgcctgcgcgcccagtggaccgcccggacaccactgctgaagcaggcgtggaaacggatcgtcagcgccaaggttgctatgcaggccgcagccctcgaggcgatcggcgcggcgcccgctccgctgcacataatgcagcgcaagatcacgtccggcgacaccagcaatgtcgaggcccgggctgcccgatactactggcccctgatgatgggcgacgactttcgccgcgacctgaacggaagcggtgaaaacgcccttctgaactatggctacaccgtcatgcgtgcagccgccgcgcgcgccgttgtggccgcaggtctccatccgacgatcggcctgttccattccaaccgtgggaacgcgtttgccctcgcggacgatctgatggagcccttccgcccgctggtcgactgtgctgtccgctctatcgcaaaggaccgggggcccggggtcgataccgacgccaaacaggcgcttgcccgcctgatcgcaacggatttgccgctcggcgacgggatatccccggtctcggtcgcgctgtcgaagttggcaacgtcgcttggtcagagctttgaagccggaaagctcgacctcgcgcttcccgctccgcccgatcccctggccctggcgggattgggacgatgagcgcggttgtcacctacttgtcgggatacagactgatgtggatactagtgatgttcgatctgccgaccgagacgaagttgcaacgcaaggccgcgacggccttccgcaatttcctcctcgatgagggcttcgagcgcagccagttttcggtctacgcgcgtttcgtcaacggcaaggaggcgtttgcgacccgcgtcaaccgaatcgagcggcatcttcccgacgccggcgacgtccagatcctcaacttcacggaccggcaataccgtgatattgttcatttctcggaccaggcccgccgaaaggcgcgcgaaaacccacagcaactggtgatgttctgatgcgattcgcttggatacccgacaacatgccccggacaaatgcctttgtcatcaagtcgttgtccggcgcactattgtagctgttcaaaattcgcggtccagccgcaacacagatgcccaaataatcatcagcgccgtcattgtagctgttcaaaattcgcggtccagccgcaactgtcgagggtacggttcggaatcgcctcgaattgtagctgttcaaaattcgcggtccagccgcaacgccggggataccatggtcctcatcgccgaaattgtagctgttcaaaattcgcggtccagccgcaactgacgcgcgcaccattcctccgcctgatccattgtagctgttcaaaattcgcggtccagccgcaaccccggtaacctccaaaactgcatcgtcccaattgtagctgttcaaaattcgcggtccagccgcaacgcgcgcaaaggacaaagcaatcagcggtgcattgtagctgttcaaaattcgcggtccagccgcaaccgcatccagattaaccacgttggacgtgttattgtagctgttcaaaattcgcggtccagccgcaacagaccgggatcagctccatcgccttgagcgattgtagctgttcaaaattcgcggtccagccgcaactttgctgaaaaacggcgtgtcggagtggtcattgtagctgttcaaaattcgcggtccagccgcaacaagttttcggagcattcccagatcattggattgtagctgttcaaaattcgcggtccagccgcaactccttgaagtcacggaagccggacagcgcgattgtagctgttcaaaattcgcggtccagccgcaactccactggatgggaacctattcgcaatgcattgtagctgttcaaaattcgcggtccagccgcaactagcgatcatgcgtcaagcggttgaggaaaattgtagctgttcaaaattcgcggtccagccgcaacggtcccctgcaaacgctgctggcaatgccgattgtagctgttcaaaattcgcggtccagccgcaactgccagcgtatccggcagatgcggcacgaattgtagctgttcaaaattcgcggtccagccgcaacggctggtcacgcgtgggcttgctaatcagcattgtagctgttcaaaattcgcggtccagccgcaacactcatcaaggggttcaagaacatcgaccgattgtagctgttcaaaattcgcggtccagccgcaacaaagacgactggcatccgccaacagccgggattgtagctgttcaaaattcgcggtccagccgcaacacgtctcagccccgacctgcgccaaagccattgtagctgttcaaaattcgcggtccagccgcaaccaacccgatgttgaggtggctaagccgccgattgtagctgttcaaaattcgcggtccagccgcaaccaaaagcgcgtcgccatgctgcgcgcggtcattgtagctgttcaaaattcgcggtccagccgcaactggtgccaacatgcggtgggcgaccgatggattgtagctgttcaaaattcgcggtccagccgcaacctaggaggccaccatggctgagacaccccgattgtagctgttcaaaattcgcggtccagccgcaactcattcatactcctgcactgtgcgcgcgacattgtagctgttcaaaattcgcggtccagccgcaaccccacgcgaccgcctgcgcggtgtattccgattgtagctgttcaaaattcgcggtccagccgcaacaagggcgaccaggataaacccaaggcccaattgtagctgttcaaaattcgcggtccagccgcaaccgatggatgcgcgccgcaatctcgtttgccaattgtagctgttcaaaattcgcggtccagccgcaacttccgatggagtatttcatgttcaggatcgattgtagctgttcaaaattcgcggtccagccgcaacatgcatgagcatggccaaaccggacacgcgattgtagctgttcaaaattcgcggtccagccgcaacatcattaggacgtggatacagtctgacgtgattgtagctgttcaaaattcgcggtccagccgcaaccctcttggtgaaccagacaacctcgcccttattgtagctgttcaaaattcgcggtccagccgcaactcgagcgatcctgcggctgccagcatctccattgtagctgttcaaaattcgcggtccagccgcaactcggcgtccgtctttttgaacaccacggcaattgtagctgttcaaaattcgcggtccagccgcaacttggcgcctgacaagggcgctgcgttgatcattgtagctgttcaaaattcgcggtccagccgcaacacccgcagtgaggttaccgccatacccgctattgtagctgttcaaaattcgcggtccagccgcaacgaaacacgcaagcgcacgcttaatcaggaaattgtagctgttcaaaattcgcggtccagccgcaacgacgcgacccaaagcgttaccgtgaatgtcattgtagctgttcaaaattcgcggtccagccgcaacacatatcggctttggtgcggcccggtgagctactccccattccttggacaagatctgagataaattaagctactctttgcacctgctgatcggggttgtttgtttcatttgtctgccaatagaccgcggcaggtggcatgccgccaagtgcagaatgtgggcgtttgtgattgtagaactcgatccattttttgacgccagccttggcttctgatccagtttcccaggcgtgcaaatagacgcattcgtattttagggatcgccatagtcgttcgacaaagatgttgtcgagaaagcggcctttgccgtccatcgagatgcgcacgccagatcgccgtaaccgatctgtccacgcaaacgatgtgaactggctgccctgatccgtattcatgatctccggcaagccgtatttgtggatcgcttcgttgtgggcgtcgacacagaacccggcttccagcgtgtttgagatgcgccacgccagcaccttgcgtgtatgccagtccatgatcgcgaccaaataaaggaagccgcgtcgcatgggcagatatgtgatgtctgggcaccaaacctggttgggtcggtccacccgcaggccacgcagcagataggggtaaatcttgtggcctttcgcagccttgctggtgttgggcttctggtagatcggcataaggcccatcaatcgcatcaagcgtctgatccgcttctcattcacgaggtgctcctcattgcgcagatgccatgtcatctgacgcacgccgtaaaacggtgtttccaagaactgcttatcgatcagccgcatcagatcgaggttcatctcggtctcacccttcggctcatagtaaaacgacgaccgcgagatcgacagcaaggcacattgcttgccgacagacagaccaggcaaattaggttcaatcatcttgcgcctcacttgccggtccaaggcttgagctttctggccaaaaaatcgttggcgacagccaactccccgatcttggcgtgcaagtctttgacctgctcttcatcgacttccgctgctttccggccaccgcgctcaaatactccagacgcgccttccaacaaagcccgtttccattgatggatcatcgtgggatgcacgccgaaccgactggccaactcgctgaccgtctcttcgcctttcagcgcctccaacgccaccttggctttgaattctggatgatgttgcttccgtttcgacattcctgatctccttcgtgttgaagatcagcagactacaaatcgcagcttacgtcagtgtccgattttcggggggtagctcagatccgtgaggaccagtctgaacgcctgttcggtatgcctcaacgtgagggcgcgccgatcttcagggtgaagcgtctcaggcaggcgcaaggccgaccagaccaggacggcaaagctgaacgcggcgacgacgatggaaatttcctgccacgagccgaacagcatgattatctgcccgatattgggcgcaatcaccgggatcgctatgaaaatcatcatcactgcgatttccggcggaaccgcgaggccccgggccttgatgtcgaccaacaactcacgccagctctgcgcgctctcgcgcacgccgacctggaagccgacgagttccttctttccttcgggcgttgccccgagaatgaccagcatgcactcggcctgcggctccatccgagcctggagatagacgccgtccgcccagatgtagacatagcgccgggccgacagatcgcggcgttgccagcagtcatatttctgcttccactccccggtcaggcgcgagatcacattcggcgacaggttcggcgcatccttccccaggatcgcagccagcgcctcctggaaatcccccgtcgagatgccgcgcaaatagagcacgggcagcagggcatcgaggctgcgcgagcgccgcgcccatttcggcaggatcgcagaggtgaagcggaccctcttttcggccggggcatcggtggcgcggtcgcgcaccttcgggcgctacacgtcgagcgcgccgatcccggtctggatgctgcgctccggcccgtaaccgtgtcgcacaatccgctggcggccgtccggcagggtctcttcggcatgctgcgcgacgaaggcgtcggcctctgccctaagcgcggccgccagcatccgtcgcgccccgtcgcgcgcgatctcggtcagcgggtcatccacagattccggctgacgcagggcgatgatgtctgtatcgttcttcatggcgtatcgttccttctggaagttctggcaggcttgatcacccgccacgatacgccgcctactcaaaccccgtcacccatttcccagcatagctcaccaatgcagatggggagactcaggggcggcagatttttgtgccgtatgcgagacgctgcgcacggcgcagcccgcatgcgccgcgtgccagcttgccgcgcgccactcagacgcgagggccgtcgggatcacgctgctgcggcgcgacgacgaccatcggcatgactattggtatcgcctgccgtgcaaccatgaaaagcgcctgcaatggacgcgggtccagcggctggcgcgcgaagggttcgtccccaatcactccggcttccattgcgagccgtgctacaaagcggagctgcagaacaccgcctctcagtggggttggagtctcgtcggcgcagaccccgacggcgacgccaactaccggctgctgtcccatgatgcgtgcggacatcagcagcgtgtcgcgacggctaacatcgaaacgggcaactgcgggtcctgtggtgagtgctggactgccgcagaaagcatcatctacctgatgcggtttcgggtgcccgagtttggcaccttcgtgaaagccggtttcagcaaaaacccggactcccgtatgcggcatcagcttggtttgcgcgaagacgtggaagccgagatcctcgatgaggtgccgacgccgagcggtcaggtcgcaatccggcttgagaagaatctgcacgctcagctgcgagcagcgcatccggacaaggttgtcccgcgcgaaatgctccggccttggatcaaggtaacgtccgaaatttataccgccgatgcggtgccgatcatccggcggatgctcgacgagatcgagagccccaggtggccgcgcaagaccaagatcaagcctccgtccg

SEQ ID NO: 3703 - DNA, 10057 bp, synthetic construct
  misc_feature 1..10057: note = Synthetic
  source 1..10057: mol_type = other DNA
aaagccggcccggctcgcgaccgtcgccatggcgaacaagacggggcggatcatgtgggcggtgctgaccaggagcgaaccctaccgcccgcacacagcctgagacgtagagaaacagcgagagagcaagaccgacgatgtgatggtgtacccttcagccgcaatgatcaggacgctccgctgaatgtcccgggcgcaaatgcccgcgaagcagataggaacctgatctgcggatcccatcagggccagcggtgtgagccgcgcaaacaggccggacacaagaccgcttctgaaaaggtacatgagatcatttacgacttgctatgcgggagccatccacacaaggtacagtcgacgatagccgaagcgccgccgttcgctggaaagcgccttaagcctctctcgcagtccggtgtctgcgggtctggttgatccacgccgatacacacgcggatcgatcccggccagggcgcaagcccgccgctggttgtagcttttttctgtcatggcccagtccacagcgcgtcgccttgcaccgggcttcagaagcgtccgcaggctcactcgaacgcatggcgttcgcctgctcccattccctgcatctccttgagcgtggcaacgtcgagcatgtgttccgccagcatcttcttgagcttcgcgttctcggcttcgagcgccttcagccgcttggcctcggacacttccatgccgtcatacttcgagcgccatttgtagaacgtgccatcactgatgccatgcttccggcagagctccttggcgcctatcccggcttggtgctccttcaggatgccccctctcgggacattgctgcgcaatgccctgccgggcagtgaatgatctgctcttcgctgaaacggctttttcgcatcgtctgtctcctcgtttggagaacaggctaacttcaaactgcggacaccagggggaacaggtcacttagtgtcgcaacaagggctccggcgtgtcttcctgcctcccgtgacgcggggcaggggccggaaaacgaccgctggatgggggtctcttcggtcaaaccggcgcggcgcgagccagcatgccgaagagatcgcggggatcatccgggtcggccagcaggtcgagcggctggtacaggtcggtgccggcgatccggtcgcggatgtagcgcagggcgctaaaatcctcgatggcgaagccgacactgtcgaagagggtgatctgatcggtcgaggtccgcccgggcgcctgaccggtgatcacctgccacagttcggtgatggggaaatccgcgggcatctgttgcagctctccctccacccgcgtctgcggcggatattcgacgaagaccgtcgcccgggtcaggatgcccggcgccagttcggtcttgccggggcagtcgccgccgatggcgttgatatggacgccgggcccgatcatgttgtcgccgaggatggtggcggcgcgcttgtcggcagtacaggtggtgatgatctgggcgccttcgatcgcctcttccgcgctggtgcagcgggtgatgcgcagcccctgaccggcaagattggtggcacatttggcggtggcggcggggtcgctgtcataaagccgcaccgccgcgatgccgcagatcgcccgcatggccaggctctggaattccgactgtgcgccgttgccgatcatcgccatggtgtgcgcgcctttcggcgccagatgacgtgccaccatggccgaggtcgcggcggttctgagtgcggtcagcagggtcatctccgacaggagcacggggtagccggtcgccacatcggccagcaaaccgaaggcggtgacggtctgcaaccccgctgcggtgttcctggggtggccgttgacgtatttgaagccataggcttctccgtccgaggtgggcatcagttcgatcaccccgacatcggagtggctggcgatgcgcggcgtcttgtcgaaccgctcccagcggcgaaagtcgtcttcgatatagctggccagccccttcaacatcgggtccaggccgatccgatgcaccagtcgcatcatgtgatcgaccgagacgaaggggacgagggccttgtccgagggctgggtcatccgtaggccctcgtcgggcggtcgaagacgcggcgacccagcgccgaggcgcagagatcgaccagcagatgagcggtgcggccacgttcgtcgaggaaagggttgagttcgaccaggtcgagcgaactgagcaggccgctatcacagatcatctccatcgccagatgtgcctcgcgcacagtggcgccgccggggacggtggtgccgaccgccggggcgaccgagggatcgaggaaatcgacgtcgagcgagacatgcaaaagcccgtttgccgcggtcacccggtcgaggaagcgggccaggccacgggcaatgccgttctcgtcgatatcacgcatgtcgtggcgggcgatggggctggtctcaagggcctcgcgctcggctgggtcgaccgaccgcaacccgatcaggcagacatgttccggggccaccggggcgatcaccgggggaaagccgtcaaaccccgcgcgccctgtgacataggcgatcggcgtgccgtgcagatggccggagacgctggactgcggtgtatggatgtcgctatgtgcatcgagccagagcacgaattgcggccttccgatctgcgctgcgtgttccgccactccggcgaccgagcccagcgagagcgcgtgatctccccccagaaagatcggcagcccctgggccatcgcctcgcgcgcggcggtgcgcagggtcctggtccacgcgatcgtctcgttcaggcgatagaggtgggcggtatcctcgtccgggcgatacgggcgggggatgaggttgccgcgatcctcgacctgatggccgaggtcccgcagcgctgcgccaaggccggcggtgcgcagcgcatccgggcccatcaggcaaccggggcgacgtttgccgcaatcgagcggcgccccgatcagaatgcaggtgttttcaggcatgtgcgtatccccatcgtgtcgacataaggatcgcgccgaaatgcgttgaggtatacggagcaatttgcgcaatatggcaaatgcattgtcgaaatggattattgaattggacaaaacggatgaacgtttgttggcggcactcaggcatgacgcgcgcgcgtcgctgtccgatctggcgctgcgattggggctgtcgcgcagcacggtgcgcacgcggatcgacaggttgcagcggtcgggtgagattctgggattcaccgtggtactgaagcaggatgcgctgcgcgacccggtgcgcgcgctgatgatggtggggatcgaagggcgtggtgccgcgcggatcacccgtcagctcaccggcatggccgaggtgcgggcggtgcattcgacgaacgggcgctgggatctgattgtcgaactcggcaccgagacgctggaggagctggaccgggcgctggcgcggatccgcatgctcgacggcgtcgccaccagcgagaccagcctgttgttgtcgaccagcaaatcatcctgagccgccgcggctcaggccttggtgcgggcggcggcgatccagatcagcgccaggatcagcgcaccgatggcgttccagctggccatcgacaggttaaggaactcccaggcaacctcgtcacagcggatcagcggggcggccatgatcttgtcgaacagctgatcggccgaaagattgctgacgggggaggaggtgcaggtggtcggaccttcccaccaggcacgttcgacgccggtgtgatagaggccgagccccgaggtggtcagcgccgccagggcgccgagccagggaaggaaccggccgcggatcagcagcgccagcgcgccgatgatcactgccgccagatgtggccagcgctgttcgatgcatagatcgcagggcggcagcccgccgatatactggaaccccagcgccgcgagcagcatcgcggccgagccaccggcggcgatcaggatcaggaagctacgcatcacaaatatctcagcaggaagaagccgccagccagcagcaggacgagaagggtgaagaccaggcccagccggcgttcgatgaaatcgcggatcggcgcgccgaagacgcgcaaaagcccggctagaacgaagaagcggatggcgcgggccaggaccgaggtggcgacaaaggtgcccagcggcatgccggtccagcccgacatgatggtgatcaccttgtaggggaagggggtgatccccgccgccagcaccgcccaaaagccgaagtcgttgaatttctcgttgaactgggccatggcgtcggcctttcccatcgcctgcaggatcggctggccgatgctgtcgaagaagaaggcgccgatggcatagcccaacagcccgcccaaaaccgaggccagcagcgcgacccccgcgatcagccaggcacgacgcggccgggccaggatcatcggaatcatcagcacatccggcggaatcggaaagacagagctttcgacgaaggacactgccgcgagtgcccagagcgcgtggcgatgttcggcgagcacgatggtgcgcccgtagaggcgtctgagcataggcggttcctgcaacgggcgccgtctttggcgccacggatggcaaaccacggtgctgccctgcggtcaagctttggccgttcacctcaacgcgagggcttggggttttccctctggacgctgtgctcgccttgcggtatcggaggggcgtggcccaagtggcggaatggtagacgcaggggattcaaaatcccccgccttcgggcgtgccggttcgagtccggccttgggtaccaaggacttagcggggtcctgccacactcaccctctggcctgtctcctgagccaattcatccttttcggttctgtcctggtctggaagacgggctatccgcgctttgtctgggcggcgcggctcatcagtttatgcgaggctctgaaccgataataagcggccatttcggagctctggttggtctctgattggatttctgcatcgctgcacccggctctgccagatcgataaccgcgagatcgcgcaagccatgcgggctgaatctggtggctcgctcgcccaggctttcctgtacgccggcggcgaggttggtcacgcggatgaagatcttcgtctctgcggtgtcgcgggtcattcgggcgtccttttgttggggtcatatcccggcgcctccttgtgcatttcaagcgccgcctcttcttcaggaatgtcgtccttgtcgcgctcgtgatcggcaatatcggcagccatgcggtggcggtgtgaccccgtatcacgacatcgaggggcggctcatctggtgcagcggagaggccgagggtgtgccgaaggcgcgccataactctaaggaatgcgacgatctgttgggccggcgtttggccgatttcctatccgcagtcttgccctgacggcccgcggacacaccgcatcggacgcgtgttgccttcgtctccgccgctgacaatctcagggcccgggtcttctgtggcttctgcatgtcgcgcagggcgttggcgggcgatctgccgggaggcgttgctgatgtgggacatgggcgcgtcaatgggggctgcaacgtatccatccgtggcttgaccgtccggcggcagcaagagcttgcgctgtgcctcagtggtctgggcgatgcggggcgaagagccccggagtgactgccgcccgcctgtttctttgcctttcaccccgcaatcggctggtgggctcgggcctgagccattgatcgcgcgtagttgcgcgaggctgcggagcgtgcagcgctggtggcgcggatcgcgacgatctctgcacgcgcgcgtgcagcagcacaggcgttggaagcggcgcgggcagtccgcgagggcagggggggaggcgctggaagatgaagcccccaatgatcccactgctgatggtcgtctgcccagctctgacagcctgcgtcgtctcaaggcccgctgggcgtggactgagccgccggcggtctcggccctgcgcttctgccgccacccggcagatttcttgcttgcggtgggagagggcgattgggaattgatcgtcgaccggatcggggatggacgatccggcgcgaagaggacaagtcgctgttggggaagtggacgaaggcgctggcggcggtcttcgaaaaatgaaagcgcgccccgtaggacgcgctttaatgtggtgctacttcgagcttgttaacggctcgaccgcgaattctgaacttcaacatgatttcaccacacacctgagaattcaagttgcaattgacagggcctcgttcgattttgttccagattgacttttattctggatgatccgatgcgccttggtttggatattggaacgaattccattggctggtggctatatgagaccgatggccagggggcatctgcacgtatcgtcggcgttattgacggtggggttcgcatcttttcggatggccgtgatccaaaatccaaagcgtccctcgcggttgatcgtcgtgctgcacgggcaacgcggcgccgtcgtgatcgttatttgcgtcgtcgcgctgcgttgatgaaagtgctggcgaaatcgggcctgatgcctgcttcgcctgcggaggccaaacaactggaactgctggacccttatgagctccgggccaacggcttggatgatgttttgccacttacacatttcgggcgggcactgtttcatcttaaccagcgccgcggcttcaaatcgaaccgcaagacggatcgtggcgacaacgaaagcggaatgatcaaagacgcgacagcgcggcttgatctcgaaatgatgaccaacggcgcgcggacttatggcgagtttcttcatatgcggcggctgcgagccagcgacccgcggcatgtgccaacggtgcgcactcgcctctcggtcgcctcgcgtggcgggccggatgccaaggaggaagcaggctatgatttttatcctgaccggcgtcatcttgaagatgaatttcaggagctctggagggctcaagcgacctgtcatcctgaggtcctgacggatgctctgcgcgatctggtattcgagaagatcttttaccagcgccctcttaaggagccaagggtcgggctatgtctgtttacagccgaggagcgccttgccaaggcccatcctctggcccagcgacgtgtgctttacgagacggtgaaccagttgcgcgttacggcggacggcaaggaaacgcgttcgctcacgttggtagaacgcgatcaggtcattcatgcgctcgacaacaagaagcctgcgaaatcgctgtcttccatgaacttgacgctgaaggctctgggtaaggtgctgaaactgcgggataacgagcgcttcacgctggagactggcgtgcgcgatgccattgcctgcgatcccgtgcgcgcggtgatgatccatccagacgcctttggaccgcgctggtccgagcttgactggaaagcgcaatgggagctcatctctcgcctccgaaaggtgcagagcgaggcggagtttgacgctcttgtcgactggcttatggcaacgcatgagctagacagagatcatgcgcagaaggtcgcaaacgtacatcttcccgaaggttatggccgccttggatttaccgcaacgcaacgtatcttggagcagctcaaagccgatgtcgcgacatattccgaagcggtctctgcctgcggttggcaccactcggatcagcgcacgggtgaatgcctcgacaggttgccctactacggtgaagttctcgaccggcatgtcattccgggcagctatgacgagaacgatgacgagatcacccgctatggccgtatcaccaaccccacggtgcatattgggctgaaccagttgcgtcgattggtgaacaaggtcatcgaagtgcacggtaagccagatcaaatcgtcgtggaactggcgcgggagcttaagcaatcggagcagcagaaaaaggatgcgatgcggaccatccgcgaaacaaccgaggccgcgaagaagcgaagcgagcaactggaacaattaggacaacccgacacggggcacaatcggatgctcttgcggctttgggaagagcttggccctgccgtcggtccacgctgctgtccatacacaggcgaaacgatcagcgtcaccatgctcttcgacgggtcctgcgatgtagatcacatcctgccctattcacgtacgctcgacgacagttttgctaatcgtactttgtgtctgaaagaggctaatcgcgaaaagcgcgatcagacgcctcatgaggcctggggcggcgatccggtgcgttggacaaagattgagaccaatctcaagaacctcgcagataacaaaaaatggcgattcagcccggatgccatggaacgcttcgaaggtgaaaacgacttcctcgatcgcgcactcgtggatacccaatatctctcgcgtatctcccgaacctatctcgacacgctcttcaccgaaggcgggcatgtctgggttgtgccgggacggatgaccgagatgctgcggcgacattggggattgaacgcgctgctgagcgacaaggatcatggggcggccaaggccaagaaccgcaccgaccatcgtcaccacgccatcgacgccgccgtggtcggcggcaccgatcgcagcctggtcaaccggatcagcaaagccgcggggcagggtgagaaggccgcgcaatcggccgagttgatcgctcgggacacgcccgccccgtgggagcatttccgatcggacattgcggctcagctcgacaagatcgtggtcagccaccgcgctgaccatggccggattgatgtcgaaggccggaaatcgggccatgacagtacggcgggaaagcttcacaacgatactgcctatgggatcatcgacgatatgaccgtcgtcagccgtacgcctcttttgtcgctcaaactctctgacatcgagtggacgaccaagggcaagaacatccgtgatccgcaattgcaaaaggcgctagccgcagcaaccaaaggcaaggatggaaaggcgtttgaggatgctttgcgccaatttgcggccaaggatggcccctaccagggtctgcgccgcgtgcgccttgtcgagaccttgcaacgtgcggcccgggtcgaagttggaacgaccgacaaggggcggcctcttaaagcatacaagggcgacagcaaccattgttatgaaatctggcggctgcctgatggggcaatccagcacagtgtcgtcacgactttcgacgcgcaccaaggcaaagagaataggcaccccgcggcgaaacgtcttttgcggctgcataaaggcgacatggtgcgcgtggagaacagcaaattcggggcagtgaccgcaaccgtcgcaaagttcaatggcaacggggttatcgaacttgtgcctcatgctgaagcaaacgcctccgatcggtatagaaaaaacaaagaggatctctatattcgcttaagcgccaagtcggccatgaaatctggtctgcgccgcattatcgttgatgaaatcgggcgcgtccgtgatcccggtccgccgaaaacctgagcggagtcgcgcgaatcagggatttatgccatgcttccagtagtttggagtatgcgcattggaccgagtcattgatatcgccaacgatggtcggcacctgtcgcgggagcgtggttttttagcaggctgctgaagaagtcggccttgaaggacgttattcctgccgccacgatttgaagtcggttttcttcggcatcggcatcggcatcggcggtggtcgcgggtcagagttgccttctccgtcaggccgtcaggagtttcggtagcctcgcgaggttgcaggccgccatcgtcatcgtgaactgggcgcagaccctatcgagcccgcggtgaacggtctgggacatgccgccgacggtcttggcccagccgaacggttcctctatcttcttgcggcgccgctgggacagggcgtagccgaggtgccgggttgtccgtccgtcgatggcggaatgccgggc

SEQ ID NO: 3704 - DNA, 9224 bp, synthetic construct
  source 1..9224: mol_type = other DNA
  misc_feature 1..9224: note = Synthetic
tgtccatgatccccgcacccacaagcggcaggccacacgctacatcctggggttcgaggatggatttccacaagagccaactccggaaaccggagacggctttgacggaacggacgaggaacaagacggcgacccaactccggattccggacatggagccatctccggatttccggcaaagccatctccggattttgcccaaagccatctccagaatctggacactaaccttgtaagggaacctttaagagaaccagtaaaggaggaggagggcgcgcaggcgcgcgacgcggtttccgaggaattcttcggggctttgctgaacgtgctgggctttaccccccgccaagagctgcccgtttggtggcaaggttggccgccaagagagcatgtcaggcgctggcgcgatgagctgggcctgagcgaggaccggatcatcgaagcggcaaaggtcagccgcaatgcccaccccaagccgcccgatggccccaaggcgctcgaccgggtgatggaacgcgcaacccagcgcggcgagttggcggcggcacaatccggttgccagaagcccgggcgggcgcgcaagcgtgatgatgccccacggcccagccccgatgaactggccgccttctacgccgacctcgtcaactccgaccggttcctgcccggaagcatgatctcgaacaccatgcgcgacgcgatgctggcgcggggtctggtcacccccgaacgcctgcgtcagcgaggggtgcggtgaatggcgtggtgtcacgtccccagcacgggctttccctctgcgcaggcggcggaggccttgatctgggcgtcatgctggccgagcccggctatcacacccgcgcctttgtcgaatgggaagagtggccccgcgccgtgctcatcgcggcccagcgcgctgggtatttcgcacccgctccgatctgggacgatctgcgcagcttcgatgcccggcccttccgcggcgccttcgacacggtgctggccgggtatccctgccaacccttcagcgccgctggcaagcgcgctggcgccgatgatccccggcacctctggcccgaggtcgcccgcgtcatcggggaatgtgccccagaatgggtgttcctcgaaaacgtcgccgggcacgtcaccctcgggctcgaggccgtgctgcgagagctttggcgcatgggttacacgcctgcggcgggtctgttcagcgcggcagaagtcggtgcgccgcaccagcggctgcgcatcttcatcctggcccacaccgatgagcctgcatccgggcaccaccagctacaacgcggcgggcaacagcgacttcacccgcaaggcggaagcgctggcgctgggcatcgccaactggtcgacacccaaggcgacagacggcgcgaagggtgggccggggcagagctatggttcgggcgggatgccacccctgcccgcgcaggcggcgcaatggccaagcccgcaagcgcgggatttccgctcaggcgacacgccgggatgcaagcggcagttgcgcaaacgggcgcagggctggtcgcagaacctgaacgatacggtggcgcaatggccgaccccggcggcgcagaactggaagggcagcagcgaggccagcattacgcgcgccgatggcaagagccggatggacatcctgcattaccgggccgagcagggcttcacccgcccggacccggcgatcacgccggatgggcagcggttcttgccgcacgccccgatctcgcgcccgctttgggcttcgatgattgcctcgcatgggcgcgtcgtctcgcggcggatcctgaagggccgcgcaaagcggcggctgaacccgctcttcgtcggatggctgatgggctggcccatcggtcacgcgctctgcgcctgctcggcaacggagttcaccctctggcagtggcacatgcgtggcgctctctcggcgctgcccacggcctcgggtccgtggatctggcggccgaccgatgcggcccagcgcggcgctggaatgggcattccgcgtggagcaagcgcaactggaactgccgctgccgaaagacgtttcggaggaaggtttcggtttcggcctcgaatacgtcctgctacagcgcgccgctctgggctgcaaggtcgatggtggccagcacaagatgggcagctatacccacccagatgccgaggtcatcgccgccaccgtcgcgggtatgcccgacagcctcggcggcatccgcatggcaatccaagtggccgaactggctcgcgccggcataaccccggactggatgcccggcgtcgtgccgcgctgcgtgccggtcgagaccaagcgcaatcagcatggcgagcggtccacaaccatcgtcgtcggcaccgagcgcgtcctgacccgcggcaagtggcgcaccgtcgaggtgcttgcctgcccggtctcattttcaccgcacccgcagcatatcgaggcggcgcatcatgcctatgacaactggtggcaagcgcttgattgggcgcgcggagggctgatggcgggcgggatgcttcgggaggtggacgtggcagcggcgatgcctcaggtgcggccgtggctggcacgcgggggcagataaccaatctgggcaggaaaacccgttcctcgcctcgttgcggtccgccccggcgcgacgagcggactgctgacttatgcagatgcggcggggcaaacgcggcatatgatcaaatggcgaccattcgactagtcgccgtcattggtcagctacgacactttggcaggaagcgcacaggaagtaacccgcgaggcaaacggctgtcaagtctatcagcccgccgtggggcaccactgtgagaaggcattgatagcgagctatcaggtcacctcgcccaccgaccaaagccgacagccaaggcccagaagtggaaacacgggccgcagcccgtgcttcgatatggtgctctgtcgagcttgttagccgctcgaccgcgatttctgaatacacccacagaaccgcagagcatcagttgcgtcaagcggttttttggtcgggcgggttttgatcgcagcgtttgatccgcttgaaacctgtgcgggcctgtcgcacattcaatcggaatccgttaatgcataaaatctcaagaggcccttatgctcacccgccttgccctcgacatcggcacgacatcaatcggctggattctgtatgagctggtgcacaaccaaccagccaccattctggacggcgggacacggattttcagcgatgggcgcgaggcaaaaaccgggcagtcactggcagtcgggcggcgcaccgctcgagggatgcggcggcggcgggacagatacttgcgacgacgggcagcgctgatgaagcggctggccgcaattggactaatgcccgccagcccggaagctgcggcgcaactcgcggcgcttgacccctacgagttgcgcgcgcgcggcctcgatcatcctttgccgcccgaacatctgggccgggcgctgtttcatcttaaccagcggcgcggcttcaaatcgaaccgccgcaccgacaaagacagcaatgagggcgggctgatcgccgatggatcggcccggctggaacaagcgatgatggcggcgagcgcgcggacctatggcgagtttctgcacaaacgccgcgccgcggcgaccgatccgcgtgccacctttgcggtgcgtactcggatcaacccgcatctgatcgacggggatggtaaggaacagcctggctatgacttttacgccgaccgtcatcatctggagaaggagttccacacactgtgggcggcgcaggtgcgtcacaaccccgatctcacgccagcaatggaggatctgctgttccagacgattttccatcagcgcccgctgaaggcccctgccgtcgggcgttgcctgtttctggaagagccacgcctcgcaaaggcgcatccgctgacgcagagccgcacgctgtatgaaaccgtcaacatgctgcgcattgcaacccccggccaacccaagcgccgcctgagccgcgatcaacgcgaccaaatcgtaattgcactgaacaaccgcaagatccttgctgcaccgggcaagaatgtgctgacgctcgcggccattggcaagttgttgaagcttcgccccggcgaggcgttttcgctggagaccgcgaaccgggatgccatcgcgtgcgatccggtgcggatgagcttggcctatgacggtcgttttgggccgcaatggtcggccctgagcgtggcgagccaatgggagttgatccagcgattgcgcgacgatcaggatggcacggctttggtcgactggatcatggagcgctacggcgttgaccgggatcgcgcccgcgccattgccgatgcgcctttgcccgaaggctttggccgccttggcgaaaccgcgactcgggccgttctggcggtgctgatcgacggcacggcagagcaggaggtgcctacctataacgaggccgtggcggcctgcgggtgggatcattcgcgccttggcaccggggaggtgctggaccgtctgccctattatggccaggtgcttgatcgccatgttctgcccggcaccggccgaccagaagatgacgaaatcacacgctttggacgcattaccaacccgaccgtgcatatcggtctgggtcaggtgaggcggttggtgaacaaggtgatcgaggtctggggccgcccgcatgagatagtggtggagctggcccgcgatctgaagatgagcgaggatcagaagcgagatctggccaaggcgaacgcgcagaaccagcgggcggcggaaagccgcagcgccaagctgatcgaggatctgaagatcgaagataatggacgtaaccgtgccatcctgcgggtatgggaggaaagtgcggcggatgtgctgcaccgtttctgtccttatacaggcgcacagattagcgccacgatgctatttgacggcagttgcgacatcgaccacatcctgccctattcgcgcacgctggatgacagtttcaacaaccgcgtgatctgcctgaaatccgctaatcgcgaaaagcgcaacctcacgccatgggaggcctggggcaatacgccgaaatggcaggccatcgacgccattctgaaaaatctgcccgccgccaaggcctggcgttttgcccccgatgccatgctgcgctttgagggagagcgcgatttcaccgcgcgtgcgctggtcgatacgcaatacttgtctcggctggcgcgggaatatctggaaagcctctatgccgatgccctgcaagcggggcgccgcccgatctgggtggtggcgggcaagttgaccgagcttttacggcggcattggggcctcaacagcttgctgccagatgcgcataagggcaccgccaaggccaagaatcggctcgatcaccgccatcatatgatcgacgcagctgtcgtgggcgccaccgatcacgccacggtcaaacgcattgccgacatggccaaggcaaatgtcgagaacgggttggaagatctcgccggcaccattcccccgccctggcccggcctgcgcgatgacctcaaggcacggctggagcgcaccacggtcagccatcgaggcaatcatggcaccatcgaccactccgcgcgcaagcaaggccgagacaccacctcggggcagttgcacaacgataccgcctatggtctgacagaagagacgctcgacaaggtgccgctggtcgtaaaccgcaagcccatcgacacgctgacccccgcgatgatcgacaagatccgtgatccgcatctggcacgctggctggccgtggtgaccaagggcaaagaaggcaaggagttcaagggcgccgtcgaggccttccgcgctcagcccggcccctatcgcggcatccgccgggtgcggctgatcgagccggtggaagtgatccgcatcaaggatcgcaacgggcgcccctacaagggctacaagggcgacagcaaccagtgctacgaggtctggcgcctgccggatggtacgctgacccatcatgtcgtttctacattcgcggcgcatcagggccagagagtcaagccccatgctgcggccaaacggcttatgcggttatacaaggatgacatggtcaggctggatagccgcaaattcgggcccgtgatcgcggtcgtcgccaagtttgacaccaatggcggaatcacgttggtgtctcacaacgaaggcaatgccgatcagcgctaccgcaaggataaagaagatgtcttcatcagactgagcgccaagacgctcatcaactccagtgcccgccgggtaatcgtggatgaaatgggccggatccgcgaccccggccccggtaaacactgaatccctttggaccgaatcgcccggcgcgttaacaatttcggatagctgtgccgggtaactccagtggatcagattgtcgatatcagccaagacggccgccatctttcgcgcgaccggggatttctgaaagtcgaagccgagggcagagtcctgggtcgcatcgcgtttgaccaggtcgccgccgtcatcgtacattcccatggcgtgacttggagcaattcacttttggtcgaactggctgaccgaggcgtgccagtagtgctttgcgccgccaaccaccagccacgggcgatcttgtgttcgttgcaaggtcatcaccagcaaaacgcccggatgcgcgcgcaatgggatgcaccgcagccgttgatcaaacaggcatggaagcaggtggttaccgccaagattcgcatgcaggccgccgcgcttgccgccatcgggcagccccccgccccgctagaccatattgcgcgcggtgtgcaatcgggcgacagcggcaatgctgaggcgcaagcggcaaggcattactggccaatgatgatgggcaaggccttccgccgcaattcagacctgcacgacattaacgctctgctgaattacggctataccgtgctgcgcgcggcgaccgcccgcgccgtggccgccgccgggctgcacccgaccatcggcctgttccattcgaaccgagccaatgccttcgcactagccgatgacttgatggaaccgttccgcccgttagtcgatctgaccgcccgtgccattgctgccagggtcggagcggaggtcactccggaggccaagcgccgcatggccgacctgatcgcgctggacctgccgctgaccggcgagacgagccccgtttcggtcgcactttcacgcctcgccacctcgcttgcgcaaagcttcgaggtccagcgtttgtcgctagctttgcccaaaccgcccgctcctctcaccctcgcaggtcttggttcatgagcggcccggcaacctatctcagcgggtatcgtataatgtggattcttgtcatgttcgacctgccgaccgataccaagccgcagcgcaaggcagcaggcgatttccgccattttctgctggatgaagggttcgagcgcagccagttctcgatctatgcccgtttcatcaacggcaaagaggcctttgagactcgaatccgccgcatcgaacgtgccctgcccgcccatggcgatgtgcaggtcctgtccattactgaccgccaataccgtgacatcgtccatttttcggatcaaggtcgaagacccaattcacaaaatccgtcgcaactggtgctattctgatgcgattcgaggattttcaccacactcgacccgccacttttccctgctattgcaaggccttgcggcgggtcaagtgtagccattcagaaatcgcggtccagcggcaactcggcgcaaccgcttccactttgggcgcgtagtgtagccattcagaaatcgcggtccagcggcaactacctgtgggcggaccagctagatgatgcgagtgtagccattcagaaatcgcggtccagcggcaactgcggatgctgggtgcgcggccatgattcgagtgtagccattcagaaatcgcggtccagcggcaacttgtcgttggcgcgctcgtcgtagagcgccagtgtagccattcagaaatcgcggtccagcggcaactagtttctgccgtggatgagccggtccccgagtgtagccattcagaaatcgcggtccagcggcaacaactcgggctccgctgttgcttggtcctgtagtgtagccattcagaaatcgcggtccagcggcaacaccggcgaacgatggcgttgtagtgggtctagtgtagccattcagaaatcgcggtccagcggcaaccaccggtgccattggccgcgcgagctgggtagtgtagccattcagaaatcgcggtccagcggcaacgcatggggccgagaagcgcggtcctgcggcagtgtagccattcagaaatcgcggtccagcggcaacctttgagccggtgcggcaacagggctggaaagtgtagccattcagaaatcgcggtccagcggcaacgggcctgccaaagacatcgtgcctgtcacgcagtgtagccattcagaaatcgcggtccagcggcaactcgcgggctatggcggcttgatgcgcgaggagtgtagccattcagaaatcgcggtccagcggcaacttcgccgggcgtgcccgcccttcagcgatcagtgtagccattcagaaatcgcggtccagcggcaacttgcggcgcggggatagcgaccggggaccgagtgtagccattcagaaatcgcggtccagcggcaactaccagggcgccgacattaaaacgctcggcagtgtagccattcagaaatcgcggtccagcggcaactgccagtcggatcaatgaccttacgggtcgagtgtagccattcagaaatcgcggtccagcggcaactgcgctgtcgaacgagacgtcaaggatcgaagtgtagccattcagaaatcgcggtccagcggcaacttccgggaacaacccacgatgtgtccccgtagtgtagccattcagaaatcgcggtccagcggcaacttttagagggaacacaaatggacagactgcagtgtagccattcagaaatcgcggtccagcggcaacttttcagtggcacattcgagcgtggttcgtagtgtagccattcagaaatcgcggtccagcggcaactggtctcactcagttcggtgacgtgctgcaagtgcttagactcaaacatcaagtgcaacacccaccgcccgcggggcataggatgttgcgatggacagacgatacaagcacctcgacagcgaggaacgtggcg

SEQ ID NO: 3705 - DNA, 8337 bp, synthetic construct
  source 1..8337: mol_type = other DNA
  misc_feature 1..8337: note = Synthetic
cggcctgagcaagtcggagcggcgcgatcgcgcgatggcggcgctgaaagaggtcggcctggaagggcgcgagcgcaactatccgggccagctgtcgggcggcatgcgccagcgtgttgcactcgcccggaccttcgtctctgagccgaaagtgctgcttatggacgagcctttcggcgcgcttgacgcccagacccgcatcgtgatgcacgacatcctcttgcgcgtctgggaagcgcaccgcgccacggtgatcttcgtgacccatgacgtcgacgaagcgctgatcctgtccgaccgcgcccatatcatgtcggccgggccgggccggatcatcgagacgatcgggatcaagaccgcgcgcccgcgccatgtcgacgcgatctcggaggacttcattcgcaaccgcaaccacatcatcgggctgctgcgtcagcccggcatgcaccacgactgattgcagacatctgtcaaggggggagaaccatgcagaaccagatcaggacctttgcgaccgccatagggctgatcgccctttccaccgccgccatcgcggctgagccggcaaaggtcgtcatcggcggcggcgtctatctcgacgtgccgcaactggccgtagccgacgaccgcaatctatgggtagcgcatgacatcgaggcccagaccatcccgttccagtccggccgcgacgcgttcgaagcgcttttgggcggccaactcgatatcgccttcatcgccgagtttccggccgtgatcggggcgatgcgggaccaggacttcgccctgctggccgagatgacgcgctacaagggcacgcggatcatccatgcgggcggcgacggaattgccagcatcgccgatctcgacggcaagccgatcggcgtcacggctggcaccaacgtccatttcatgctggagaccgcactgggagaaaacggcgtctcggccgagatcgtgtcggtcggtccgcccgacatcgtgccggcgctcgcgcgcggagacatcttcgccggggcgatgttcccgtccttctatcagggcgccaagaagatgctcgccgagcgctaccgagagatccgggtgcccggctatcagacgcgcttcgtcctggtcgccacgcgcgaagtgatcgatgtgcggccagaggtcgttcgcgcggttctcgagacgctgatcgaggccgagtcggtcgtcgccacggatcccgtggccgcccaggcatcggtggtgagcgttcttcagggctcggtcagcaccgaggatgtcgcggccgcctggggcgactacgaccaccgcatcgggctggatgcctcgcttctcgacctgatggtgcaagaggggctctggatccatggccgcggctcgatcaaaggcgatccgccgaccgccgaaagcatcggcgcctacttcgcgcccgacttcctcgcagatatcgacgcgacgcgcgtggcgctgaactgaaccgccggggccggcgcctcgcggcgccgccccttgcccctacggaatctcatcatgatgcccgaagccgtctttgccggccttgcgatcgccgtcttcggctcatcggtcctgcaatcggtgaccgggatcggttacggggtgatcgctggaccggtctttctggtggttctgaacgggccggaggcattccatatcagcaccgtccacaatctcctgatcgcgctcgcattggcgccggtcctgcgccgcgaagtcgattggcagctgctgccggtgctcgtgctcggggcggccctgggcattccggcgggcttcgcgttgcaggtcctgtcgagcgtcgtcgccctgaaactggtttctgccgccatcgtcgtcgtggtggcaggtgtcctcgtccacgacatgtggcgggcgcggcgcggcgccacggcggccatggcccccggcggcgccgagattgctcttgtcggcgccgtcgcggggactatgggcggcatgctcgccatgccggggccggtcacgtcgacctggatgtcgcttcgcggctggccgaaatcgccggtccgcgcgacggtcctcgccttcttcgtattcagctacggcgtggggctcgcagtttacggcgccttcggcgcagtgtcgcgcgatacgctaacgctgtcggcgctcctcgcgcccttcgtcgtgctcggcctgatcctcggccaccggatcaaccgccaagtctcggaggcgctgttccgtcaactgctgctcgcggtgctcgcgctcaccgtcctcggcctgctcgtcagcctgatttgatgggttccaactttcgcggttgcgggcgaactccgcaggaggcgatgcgggcctcaccatgcttccgcatcataatgttgaggtgtagataatcaaagaaaacgcgggccgtagcccgcgttttgatttgttgctctgtcgagcttgttaacggctcgaccgcgaattctgaacgcagacattagacaatgctttttccccaggcgcaatgcccaagttgccaaagtgcggccaagtcgcaactaacgcagctttgcggcgccggttagcagcactacgccaagcaaggttggaccccagcttttcccagaaggaccgtcagtctataagttgggcgcaccggaatgaaccggacgcgcgcacacctcagcctctggtaggcgcaaaaacctcttgcacatgaggggcgggctggtcaatagtttcctaacgcagcttaaaattgagatagatacagatgcgccttggcatagacattggaaccaactccattggctggtggctctacatcaccgatggcgaccgtatcgccggggtagtcgacggcggagtgcgcatattttctgacgggcgcgatccgaaatccggcgcctcgcgagccgtcggtcgccggacggcccgcgcaatgcgccgtcgccgcgaccgctatctcagacgacgggcggcgctgatgaagcgactggccgaagccggactgatgcctaccgatcccggaaaggcgaaggaactggaagctctcgacccctaccaacttcgcgcggaggggctcgaccgcgcgttaccgttgccgcatctaggccgtgcgctcttccatattaaccagcggcgcggcttcaggtcgaaccgcaagacggaccggggcgacaacgaatccggcaagatcagggatgccaccgcgcggctagaccaagcaatgatggccacaggcgcccgcacctatggcgaatttctgcacctgcgccgctccgctgcgcccgatcctcgccagacgccatcggtgcggacccgcctcaccatcgcccatagaggcgactcagaaaaggacgaggctggttacgacttctaccctggccgccggcaccttatggaagagttcgcaaggctttgggcggcccaagcgacacaccgcccagacatcctgagtgaggaacttcgcgcagcagtccacgaaatcatctttcaccagcgcccgttaaaggagccgcaggtgggtcgttgccttttcatcgacgagccgcgcctgcccaaagcgcaccccctgacccagcaacgcacgctctatgagacgatcaacaatctgcgcattaccggggacgggcgcagacggcgccctctgacgcgggaacaacgcgatcaaatagttcatctgctcgacaacaagaagcccaccaagtcgctgagttcgatgacaatgactctgaaggcgctggccagggcgctgaatctgccgcctgacgaacgcttcacgctggaaagcctcaaccgcgatgcgatcgcctgcgatccggtccgcgcatcgctgtcgcatccggatcgcttcgggccaaactggtcgaaactggatgagagatcccaatgggaggtgatcgcgcgcatccgccaggtcgagacagacgccgaccacaccgcgctggtcgactggctgatgtcggtgcacgatctgaaccaggaaaacgcggacaccgtggcaagggcaccgttacccgaaggctactcccgtctaggagaaaccgcgactcgtcggattctcgacgcgctgcgatccgatgtgctgacctacgatcaggcggcggcggcctgcggctggcatcattctgacgggcgcagcggagaggctctggacgcgctgccctattatggcgccatcctcgaccggcatgtgattcccggcagcttcgatcccaacgacgacgagatcactcgctacggccggatcaccaatccgacggtgcatatcggccttaaccagctccgccgtctagtgaaccgcatcatcgcgacctatggcaagcccgatcagattgtcgtcgaactcgcccgcgagctgaagcaatccgaggagcagaagcgagagattcagcgggccattaagcgaaacaccgacgacgctgttcgccgcggcaaactgctagaggagatgagtattgccaataccggggccaatcgcaaaatccttcgcctgtgggaagatctcggcaatgacatcatgctgcgcagctgcccctattccggcaagcgcatcagcgccgcgatgctgttcgacggctcctgcgaagtggatcacattctgccctattcgcgcacgcttgatgacagcttcgccaatcagaccctatgcctgagggaggccaaccgcgaaaagagcaaccagagcccctgggaagcctggggaggcacgccggcatgggatcgaatcgccgccaatctaaataaccttcccgaaaacaagcgctggcgctttgcgccggatgcgatggcccggttcgagggcgaacgcggattcatcgatcgcgcgctcgtcgacacgcaatacctcagcagtatcgcgcgggcctatctcgacgcgctttatacccagggaggccacgtctgggtagttcctggaaggctcaccgaaatgctgcgccgtcattggggcttgaatgctctgcttccggatcacgtcaagggcactgccaaggccaagaaccgcacagaccaccgccatcacgcgatcgacgcctgcgtcgttgcggcgaccgaccgcagccttgtcaagcggatcagcgacgccgcgaagcgcgacgaggataccggcgccgaggagattgcacgctcaatcgacccgccctgggatggtttccgcgtcgatatcgaacaccaactcggcaagatcatcgtcagccaccgcgccgaccatggccgcatcgaccccgaggcacgcaagaggggccgcgacagcaccaccggccaactgcacaacgacaccgcttacggcctgaccagagaggtccgaaacggcgtgccactcgtcgtcacccgaaagccgcttgacaccctcacccacgcactgatcgacaagatccgcgaccccgaccttcggcagcgccttagattcgcgaccgacgggaaagagggaaaggactttaccgcggcactggcgaagttcgccgcggactccaaccgctatcgcggaatacgccgcgtccggcttgtcgacgcggttgaggtcatcgggataaaggaccgcaatggccgcgtctacaagggctacaaacccgacagcaatcactgttacgaggtctggcgcttgccgaatggtgatcttgtgcaccatgtcatcccgaccttcgccgctcaccaacgcaacccgcaacggccgcacccagctgccagacggctcctcaagctccacaagaacgacatggtccggctggagaacagcaaattcgggcccgtgatcgcgacggtcgagaaattcgacgggaacggcgcgattaccctggtcgcgcataacgaaagcaatgctgatcagagatatcgcaaggacaaggaggatgtgttcatccgccttcgccccgcgtcgctgcacaatgccggcgcgcgccgtgtcattgtcgatgaaatgggcagggttagcgatccaggcccaccgaaatagccgatcgttcggaaagtcctctgaatcctgttaccctccaatgggttgcggattcggtttgttcaatggaccagatcatcgatatcaccacggatgggcgccacctgtcacgtgagcgcggattcctgaagctatccgaggacgggcgcgagatcggacgcgtcccgctcgaccaaatcgctggcgtgatcgtccatgcgcatggcacgacttggtctacctcgctcctaaccgagttggccgagcgcggcgcgccggtcgtgctctgcggctccaatcacgcgccgcgctcagtgctcttgccggtcgcagggcaccacgcccagggtgcgaggatgcgggcacaatggacgacgaaggcgccgcttctgaaacaggcctggaagcagattgtcgttaccaaggtcaggatgcaggctgcggctcttgcggcagtgggccagccccccgccccgctcctgcaactcacacgcaaggtcacttcaggtgacgtgaccaatattgaggcgcaggccgctcgtcactactggccgcagatgatgggcgacgatttccgccgcgacccggtgcgcgacggccccaacgcgctgctgaactacggctataccgttcttcgtgccgccaccgcacgcgccgttgccgccgccgggctccatccaaccatcggccttcaccacgccaaccgaggcaacgccttcgcgctggccgatgacctgatggagccgttccgcccgctcgtagactgcacggtgcgcaacctcgctcgcacccgcgggccagaggtcgatacgaaggccaaaatggcgctcgtccgcctcatcaccctcgacctgccgcttggtgacggcctcaccccggtttccgtcgcgctcacgaagctcgccacgtcgctcggcaagagcttcgagacgggtaagctctcgctcgccctgccgtcgccgccgcctgcgacgacccttgcggggctgggacgctgagccgtccggtcgcttttttgtcaggataccgtctcatgtggatacttgtgatgttcgacctgccgaccgatacaaagccgcagcgcaaggcggcgacagatttccgcaacttccttctcgacgagggattcgagcgcagccagttttctgtctatgcgcggtttgtgaacggcaaggaagccttcgagacgcgcgtcaaccggatcgagcgtaacctgcctaccacaggcgatgtccagatcctcaacttcaccgacagacagtatcgtgatatcattcatttttcggaccagggccgccacaaggcccgcagaaatccggatcaactggtgatgttttgatgcgattcgcgccagatctcaacagcggaagcagcgcaaacccatgctgtttcaaagggttgcgaggcggtgtattgtagctgttcagaattcgcggtccagccgcaaccagcagcgatgccagcgcctcgatatggacattgtagctgttcagaattcgcggtccagccgcaacttgacgacgaggaacgtcacctcgacgcgaattgtagctgttcagaattcgcggtccagccgcaacatcccgagacgggcgcaggggttcgactgtattgtagctgttcagaattcgcggtccagccgcaacgttccgacgacattgttcacgatcacggaattgtagctgttcagaattcgcggtccagccgcaactcctcaccgcacaatgcgttcccgtgatggattgtagctgttcagaattcgcggtccagccgcaactatgtcggcgaggatgggatcaagcccggaattgtagctgttcagaattcgcggtccagccgcaacttattccgcagcgccgtggacaccttgccgattgtagctgttcagaattcgcggtccagccgcaacccggtcgcatccgcgctgccataggcgccaattgtagctgttcagaattcgcggtccagccgcaacgccaacgagtgccgccaatggcgcgagaagattgtagctgttcagaattcgcggtccagccgcaacccgtgacatggcccgcacaagtttacccgcattgtagctgttcagaattcgcggtccagccgcaaccttgcggacaaagggaacaatgaggccattattgtagctgttcagaattcgcggtccagccgcaacccgccgagaccgcggccgtgaacgaagccgattgtagctgttcagaattcgcggtccagccgcaactctcggctgatccggccggcggtgcgtcgaattgtagctgttcagaattcgcggtccagccgcaacgcctaaacacgacgctaggtggcgtcgcgattgtagctgttcagaattcgcggtccagccgcaacccttccgcccatgcctcccacataagcgggattgtagctgttcagaattcgcggtccagccgcaacatgtaggcgcggag

SEQ ID NO: 3706 - DNA, 7122 bp, synthetic construct
  source 1..7122: mol_type = other DNA
  variation 1234: note = note, n is a, c, g, or t
  variation 1205..1211: note = note, n is a, c, g, or t
  variation 5956..5958: note = note, n is a, c, g, or t
  variation 1223..1226: note = note, n is a, c, g, or t
  variation 5960..5963: note = note, n is a, c, g, or t
  variation 1255..1258: note = note, n is a, c, g, or t
  variation 1231..1232: note = note, n is a, c, g, or t
  variation 5965..5969: note = note, n is a, c, g, or t
  variation 1238..1240: note = note, n is a, c, g, or t
  variation 1202: note = note, n is a, c, g, or t
  variation 1244..1247: note = note, n is a, c, g, or t
  variation 1214: note = note, n is a, c, g, or t
  variation 1249..1250: note = note, n is a, c, g, or t
  variation 1253: note = note, n is a, c, g, or t
  misc_feature 1..7122: note = Synthetic
  variation 1216..1221: note = note, n is a, c, g, or t
tggtctaataagtccttggaaattgtcatcgttgtcatgctccttcgttgcagaagcatggaccaaattactcatacacagaagatcagacactctcgtataggtgaacccacccccatgcctacccccaacatgggtccctgccaatattcgtaaaagaccgctgacgcggtattttacgcccaaccaacacaacaagtttccctcccaacagcttgcttggttgtctttgctcatcaccttggcagtcatcgtcacgccaataatgctgatcggcattcccgcctatgtgttctaccgcctctataccgaaagcccaaagcggcttgagcgattggcccgcgaagaaacccagcttttgtttgatcacgcgctggcaggaagcgtgcatctctccgatgctgaggtggaaaccacctttgccacctttgtgcgcagtttaacggaacgcgccgtgccaatatctttcccgttctttgtgctggaaaagcgaccacaggcatcaaaggaaaagatcgacgccattcggaaacacagccgaaaatcctatgccgaaccatggaagaaagcacctgcgcatagcgagcccccagagaaccaagaacctgacaaaatgctagataatcccgacgatgaccctaccagaccttcgccagagctgtgatgtccgttaatctggccctatgaaacagacagactcattgggccgctcaacattccaccacataacgccacaagcacatgtgcgcccgaccccacgtgaagttcgctggctcaaacacatcgagcgccacggcccgcaatcctcgacctatttgtatgaattgacccgcgacacggctttgcgccaactgcaaaagctccgcgcgggcggatacctgaccctgccaggccagcaacgcgccacagaacatgcggagttcaatccatacatctatgacctgacaaagcgggcgaaggatcatttgtttgacctgggcattgcagagccaaccgtgcgccctaccggccattggtggcatggatacatgatctcctgtgttaccagctcgattgatattgccgccgcccgcgaaggtgtccgatatatccccgcccatgaaatcctcgccatcaagaacgcacccttggcaattccaattggtaaccagaaactcatcccagatcagctctttgcactggattacggtggcagctaccgngcnnnnnnnacngnnnnnntnnnncgtgnnancgannncgannnncnngcncnnnngcccgtaaaagttatgcacgttcaattgatctgtatcggcagttgattgaacggaaattatacaaatcgcattatgggctgaaggctaatttgttggtgttgtgggtgtttagtacaagctcgaatgaggcgcggtttttggagatggtggagaaacaaggcggcgagtctgcaggggcgatactggcgcaggttgccgatggatttgatcgccaacacaatcctacggttttgtgggaaggattgtttctgaatacgtgggacagatattcaggacaggcatcctcaatatattgaggcgaataattacgcattgcaggcataatacaaatttgatccgacgactgagtagatttcacaaacttgcaaacaaaaagcgcaggccgcagcctacgcttcaatgtggtgcagtctaagctacttgttaacggctcgaccacgatttctgaatagatgtatttagaggattcgggcacagattgtcaattcacaattgcaacataaaatccttgtccgtatattcagaatatcgcaatccaacagcaactaggaactcactccgagtaaaactcactcagggtaaacctatatgagcggtgaggtgtggacccccacaaaataagatgctacccatctaatgcaaactaatttgaagtcccgcatggggtgaaccaagctgaaaatctttggaaccatcttacagcgcccatggagtaattagcgcatattgacttaaggcacaatcattattacaccgtatgaactcacgttattgatttttagaattcataagaagcgaaaatggagagaataatagcatgaaaactcgtttaggccttgatataggcacaaattccattggctggtggctctataagttagaagcgggtcgccccgtttttatcatcgacagcggcgtgcggatattttctgacgggcgcgacccaaaatccaaaagttccctagcggttgaccgccgcgtcgcccgcgcggcccgtcgccgccgtgatcggttcttgcgccgcagaactgttttaatgcagcggctcgccgaagcaggattgatgccaactgatccggttgaggccaaaaaactggagcaactggacccttatgccctgcgcgccaaagggctgaatcagaaactctctctgacccatctgggccgtgccctgtttcatctgaaccagcgccgtggcttcaaatcaaaccgcaaaaccgatggtggcgataacgaggctggtaaaatcaagcaaggcacagcgcgtctggaacaggctatgatggccgctggcgcgcgcacttacggtgaatttctgcatatgcgccgagcaaccgctccaaccccgcgcgcgaccccttcggtgcggacccgcctgactttgcatcaggacagcgaagacggcaaaccggttatggcctatgatttttatcctgaccgcagtcacctggaagaagagttcaatcaattgtggagcacgcaagccacgcatcatcccgaactgaccgacaccctgcacggcagcctgtttgaaaccatcttttaccagcgcccgcttaaagcaccaaaggtcgggcgctgcctgtttatggatgaaccccgtctggccaaggcccaccctatgacccagatgcgcattttgtatgaaacagtgaacaacctgcgcatcacggcagatgcgcaccccaaacgccccctgacgatagatcaacgcgatacggtgatccttgcgctaaaccaaaagaaacacaccaaatccctgagcggtatgagcctcaaactcaaggccttgggcaaggtaatcaaactgctaccagacgagatcttcacattagagacccagacccgcgacgccatcgcctgtgatctggtgcgcgccagtctgtcacatcctgaccggttcgggccaaactggagcaagctggacgcggacgcgcagtggtcgctaatccaacgcctgcgtgatgacgaaaaccgcgatgagctgatcaaatggctgatggccaaatacgggctggatgctgaacatgccgccgccaccgctgacgcccctctgcccgaaggttacgggcgcatcggtgaaactgcgacccgtaacatccttgcccatcttaaggccgaggttctgacctataacgaggcggttgaaaaatgcggctggcaccattccaatgaccgcacaggcgaggtcttggatgccctgccctattacggtgaaatccttgatcgccacgttattcctggcacccaggagccggaggacgatgacatcacccgctatggccgcattaccaacccgaccgtgcatatcggcctgaaccagatacgccggatggtaaaccggatcatcaccgaatacggcaagcctgcggaaattgtggtcgaactggcgcgcgatctgaaaaactccgaggcgcagaagaaagagatcaacatcacgatcaaaaagaacaccacagcggcgattatgcgtggggacaaactggtcgaagaattgaaacagcccaataccggtagaaacaggatgatcctgcgcctgtgggaggaattgggttctgatccgatgacgcggctttgcccctataccggcacccgaatttctgtgggtatgctgttcaccggcgaatgcgatgtggaccacatcctgccctattcacgcacattggacgacagtttttccaatcgcaccctatgcctgcgtgaagccaaccgcgaaaagcgcaacaaaaccccttgggaagcatggggcgacagtccgcgctgggataaaatagcatccaacctgaaaaacctgaaaaggaataaagcgtggcgctttgcccccgatgcgatggagcagttcgaagagaccaaaggctttcttgatcgccaactggtcgacacccaatatctatcccgcatcgcccgccaatatcttgacgcgctttataccgaaggcggtcacgtctgggtcgtgccaggtcgtttgaccgagatgctgcgccgccactgggggctgaattcactgctgccggaccacaaccgtccaaccgtcaagaaaaagaaccgtcaggaccaccgccaccatgccatcgacgccgccgtaattgccgtcacggaccgcgcattgatcaagaagattgccgctgtagccaagcaagataaagaggacgggttggaacatttcgccgccagtgtcccgcccccgtgggaggggttccgcaatgacgtcaaggccagcctggaccagatcattgttagccaccgcgccgatcatggccggattgacccaaaggcccgaaaatccggccacgacaccacagcgggccagttgcacaatgacacggcatacgggctgacgggcgaggtcaacgacaaaggcgctgcactggttgtgacacgaaaaccaatcgacaacctgacccctgcgatgatcgacaaaatccgcgaccccgatctgcaacggatgctgcgggttgccaccaaagatcgtgagggaaaggactttgaggctgccatcaaggtctttgttgcaaaaaccggcccttatcagggcattcgccgtgtgcgcctgatcgaggccctcgatgttattcatatcgatgacaaatctggtaatgcgttcaagggctacaagggggattcaaaccatagttatgaaatttggcaaatgccggatggtaaatacaaaccacaggttatcaccacctttgaggcccaccagaccggcactccccgccgcccccatccggccgccaaacgggtgttgcgcattttcaaacgggatatggttgcgctggagcatccgaaacttggcccgctggtgtgctatgtgcaaaagctcagcctggcaaacggcctttttcttgtaccccacacagaaagcaatgccgacgcacgcaatcgggacaaggacgacccattcaaacttatttcgatggccacaggcccgcttatcaaggccaatatccgccgtatctatgtcgatgaaatcggccaaatccatgatccgcgcggcaacatttccggctaggtttccagcgaatcgaaatatctgctatattccaatccattagacagattggttaatgcattggatcagataattgacatcgccaccgacggacggcacctgtcgcgggatcgtggttttctaaaagtcgaggaagatggccgcgaggtcggccgcgtgccgcttgaccagatcgccgccgtcatcgtccacgcccacggcatcacatggacgacgtccctgttggtcgaactggcggatcgtggcgcattgctggtgctatgcgcggcaaaccatcaaccccgtgccgtgctttggccccttgaagggcaccatacccaaggtgcgcggatgcgggcacaatgggcggccaaaacaccctttatcaaacaggcatggaagcaagtcgtcattgcaaaggtgcaaatgcaggccgctgccctcgcctcgataggccagccccgcagcacactggaccgcatgacccgcgagattaagtccggcgacagcaccaacatcgaagcccaagccgcacgtcattactggccgcgcatgatgggcaccgaatttcgccgcgatgcgggccacaccgacattaacgccttgctcaactatggctataccgtcttgcgggccactacatcgcgtgccgtcgttgccgcaggcctgcacccgacaatcgggctgttccacaccaatcgcggcnnngnnnncnnnnnggccgatgatctgatggaacccttccgcccgctggtcgattgcgcggtgcgcaatatcgccgccaatgaagggcccgaggtgacaccgtcggcaaaacaggcgttggcacggctgatcgctttggatttgcctctgggtgattccattagccccgtctcggttgccctcaacaaacttgcaacctctctcgccctcagctttgagcgccgaaagcttgacctcgctttaccacgaccacccgacgccctgactttagcggggctggggaaatgaacaaaccaatcacccatctcagtggatataggctcatgtggatacttgtcatgttcgaccttccgaccgattccaagctgcaacgcaaagccgccggaaaattccggaattttctgcttgatgaagggtttgagcgcagtcagttttctgtttacgcccgttttgtgaatggaaaggaggcctttgccacccgcgtaggccgaatcgaacgtgtattacccgactggggcgacgtgcagattctcaactttactgacagacaatatcgggatattatccatttctcggaccaaggccgccgcgcggcccgaaagaatccggaccaactggtgatgttttgatgcgattcgttatgaaaaaccacaacagagcggcagaaactctttgtattatcaaagagttacccaccgcactattgtagccattcagaaatcgaggtccagccgcaacttgtggtctttttcagactggaatacatcaattgtagccattcagaaatcgaggtccagccgcaactgataactcaagcgcccgtgtttgttctgcattgtagccattcagaaatcgaggtccagccgcaactaagttccgctggcttcgagtttccccgttattgtagccattcagaaatcgaggtccagccgcaactttttctcatacgctatgacccctgacccattgtagccattcagaaatcgaggtccagccgcaacccaagaaattgagggacataatcaacgcgaattgtagccattcagaaatcgaggtccagccgcaactaatttcagggccatcaccattaacgataaattgtagccattcagaaatcgaggtccagccgcaactatcttcatcaagctagttattcgcaaggattgt

SEQ ID NO: 3707 - DNA, 6609 bp, synthetic construct
  misc_feature 1..6609: note = Synthetic
  source 1..6609: mol_type = other DNA
tggaccaatggcggaaaaaggctcgccatctccttgtcgagcgataggtccgcgacgatcttcttcagccgcgcgttctcctgctcgagttccctcagccgcttcatctcagacggcatcagacccgcatacttcttcttccaattgaagaacgtcgccgagctgatcccggccttcctgcagacttccgcgacgggcgtcccgtcctccgcctcgaatgagcgatccgtggtgcctgccgatatcggcgaccgtcggtggcaggtgttcgaggtgtccgacgaacactgtgaggacaaacctacttctcggccatcatgcgggagatgaaagagggaggctatgaagccatgcttcatgagttgcttgagcgggatatttccaaagggccggacccgcggaaaacgatcaggacgccggaactgttcgaccagatcattcaggctcagggaccggtggagaagtacatatatcagtttctggactctggatacctcccgcagcccgaggcccaggaaacggccccggcgtaacaaccattgccgccatgtattcagagatgaagcattctcagccgggggccgactacgtccacgaaacgctgttcggtcgggatcttgggaaggtgtttgccattctcaaaaaggtacaaagcggcaagttcatcacgggctgcagtcgtcaaggcgtgccgattgtggtgcgctctatgcgataccatttcccgcccttgcgggactgtaggaggatgttcgaagactatgtcgggcagccgattccttggtcacgcgaaccccaagaatggcaaggtgatgttgatccgtcgcataattacagcggaaccggcggtgggcaagaagcaccgttttaatataggtgaaataggtaataggggtggcttaggctgccctttttgttgccgtttttggttgtcacgtaattttcctatacaccgggctctgttgcacgcgggcgcactgaacctgctcaatccttacaacactctggtacgaaacgcaattttctaatcttgatcttgcacggcgtcgcaccccgcccattagcggttgcacgtcgctcccctactaatcccctacagatttcggtttgccctactaatcttccaaatgcgtgtgccggggcggcctctttggccactcaccttaggcaccccctacaccccaccccaagtacggcgacagcgaggctaggcggggtaggccgctcgtggtgaggcctctctggagcaaggggggctcgttggaacagacagcgtcatatttcacctgacgccgaccacaggagcgctgaacgaaacaaaagtagcgaaacgaattcagctcttaccgcaccggtcagagccatcccctccgcggtgcggtcagacaaaccggccatttgctacaggcataaacccgaagcgacggaatatagccgtagtagtatcttgaaattacgagatcgggttctaaacggacgatacaaaaggaaacgcgccccgtaggacgcgcttcaatgtggtgctacttcgagcttgttaacggctcgaccgcgaattctgaacagccagatattagctgttcaagaaacacggtcaagtcgtttgttgttcagtttcgcggtccagcagcaactaccaaaaccccttgtgcagttattgctaaatgctctcaagaagcgcggtaaattgtgcacggcaacgggtgtggaccccgccttgtcatgctggtatcgtttcatgtcccatgtggttgctgaaccaaaaatggccgtccccgcttggatgccgggcagcaaacctccgaagcaacatctagccgtatcttgacatacagccagaaattgccaattgtaaacccctaccaaaacccttttgtttccactatgtccaccaaacttcgaggcgatgcatgcacacccgcttaggtcttgacataggaaccaattccatcggctggtggctctatgaaaccaacggggccgagacaaacgcccgtatcatcagcattatcgacggtggagttcgcattttctccgatgggcgcgacccgaaatccggggcatctctggctgtggatcgccgggccgcccgcgccatgcgccgccgtcaggaccgttatctgcgccgccgcgcgacgctgatgaaggtccttgccaatgccgggttaatgcccgccgacccacaagaggcaaaggcgcttgagctgctggatccttatgagctgcgggcgacggggttggatcaggcgctgccgctaacccatctggggcgagcgctgtttcacctcaaccaacggcgtggctttaaatccaaccgcaagaccgatcgcggcgataatgaaagcggcaagatcaaggacgccacggcgcggctggatcaggccataatggccagtggggcccgcacctatggcgagtttctccataagaggcgcgggcgagcgatcgacccgcgccatgtgcccaccgtgcgcacccgcctctctgtcgccaatagggacgggccggatggcagggcagaagccggttacgatttctacccggaccggaaacacctcgaagaggagtttcacaagctctgggcggcccaggccgaacatcataccgaactgaccaaagagttgcgcgatctggttttcgaaaagattttctaccagcgccccctgaaagaaccgaaagtgggcctgtgcctcttcaccgctgaggagcgcctccccaaagcccatccgctgacccagcgtcgtgttctctttgagactgtgaaccagttgcgcgtgacggcggacgggcgcgaaacccggccactgacgctggaggaacgcgaccggatcattcacgcattggacaacaagaagcccacagcatccttgaaatccatgatactgaagctgcccgcgctggcgagggtgctgaagctgcgcgacggcgaacgcttcacgcttgaaaccggcgtacgcgatgccatcgcctgcgacccggtccgggccagcctttcgcacccggaccgtttcggtccgcgctggtccacgctggaccttgatgcgcaatgggacgtcgtcgcgcggatccgcaaagtgcagagcgagggggaacacgccgcgctggtggattggctgacgcagacacatatactcgaccgcgaccatgccgaggccactgccaacgccccgctgcccgagggctacgggcggctgggaccgacggcgaccgctcgcattttggaaaagctggaggccgatgttgtcacctatgcccaggcggtggcggactgtggctggcaccactcggaccaacggacgggcgaatgccacgaccgccttccatattacggcgaggtgctggaccgtcacgtgattcctggcacctatgacgaaaacgacgacgagatcacccgctacggccgcatcaccaacccgaccgttcatatcgggctgaaccagctgaggcggttggtgaacaagatcatagaagtctacggcaagcccgaccagttcgtagtggagctggcgcgggagttgaagcagtcagaccagcagaaaaaggcagcgatgcggaacatccgcgaggcgacggaggccgccaagaagcgcagcgagaaacttggagaactcggcatcccggacaatggccgcaaccggatgcttttgcgcctgtgggaggatctgaaccccgacgacgcgatgcggcggttctgcccctattccggagagcgtatcagtgcggccatgatcttcaacgggtcctgcgatgtggaccacatcctgccctattcgcgcacgcttgacgatagctttgccaaccggacgctctgcctgcagaaggcgaaccgggaaaagcgcaacgacactccgtatgaggccgctcgaaagggtgctctggactggggcaccattgaagcaaacctgaagaacctgcccgaaaacaagcgctggcgctttgcccccgacgcgatggagcggttcgaaggggaacacgatttcctcgatcgggcgctggtcgacacccgatatctcgcccggatttcacgcgcctaccttgacacgctctttaccgagggcggtcatgtctgggtggtgccagggcgactgaccgagatgctacggcggcactgggggcttaataccctgctaaacgacaaggatcacggtgcggtcaaagctaaaaatcgcaccgatcaccgccatcatgccatcgacgccgcagttgtggccgccaccgaccgcagtctgctcaaccggatcagccgcgccgctggccagggcgagatggcgggccagtccgccgaactcatcgcccgcgacacgccaccgccatgggaggggtttcgtgacgatctgcgcgttcaactcgacaagatcagcgtcagccaccgcgccgatcacggccgcatcgaccgggagggccgcaagcaggggcgcgacagtaccgccgggcggttgcataatgacaccgcctacggtgtcgtcgatgagaacacggtagttagccgcatcccgctactttcattgaaacccggcgatatcgccgtgacgcccaagggcaagaatatccgcgacccgcaattgcaaaaggcgctggaaaccgcgacccgtggcaagaacgacaaggcatttgaagccgccctgcgggaattcgccggaaaacccggccgctatcaaggccttcgtcgagtgcgcctgatcgaaaccttgcagcaaagtgcccgcgtcgaaatcggcacccgcccggacggcacgcccctcaaggcctacaaaggggacagcaaccattgctatgaactctggcgtctgccggatggcaaagtgaaaccacaggtcgtcacgaccttcgaagcccacgccggcgtagagaatcgcccccacccggccgccaaacgactgctgcgggttttcaaacgcgacatggtcgcgctggagcgggagggcgaaaccgtcatctgctatgttcaatcgatgcacgtaacgaacggcctgtatctcgcgccacaccaagaggcgaatgctgacgcacgcaatcgcgacaaatcggatccgttccggttcattcagataggtgccggaccgatggtgaaagcgggtatccgccgtgtctccgtcgatgagatggggcgactgcgggatagaggcgcgatgcctcattgacccagattcgcccgaatcggcagaatatgccatccttccaatggcttggaagggttacacatggaccagatcgtggatatcgccacggacgggcggcatctgtcgcgtgagcggggctttctgaaagtcagcgaaggtgccgaggagatcggtcgtatccccatggatcaaatcgtcggggtgattgttcacgctcatggcacgacatggaccacgtcgctactgaccgaacttgcggaccgcggggcgccggttgtcctgtgcggttctaaccacgcgccgcgctcggtgcttctgcctcttgaggggcatcatgcccagggcgcccggttgcgggcccagtggcaggccaaggccccacttatgaaacaggcatggaaacaggtggtgatttccaagatcgccatgcaggccgccgctctggaagcgatgggcgaagcccacgcccccgctgccatgctcaagcgcaaggtgaccagcggcgacagcaccaatgtcgaggctcaggccgcccgctactattggcctcggatgatgggcgaagatttccggcgggatcgcacggcacccgatcttaatgcgttgttgaattatggttacactgtcctccgagccgccaccgcccgcgctgttgtcgctgccggtctgcacccgaccatcgggttgcatcattccaaccggagtaatgcctttgccttggccgacgatctgatggaaccgttccgcccgctcgtcgattgctgcgtgcgcgggttggtcgcccgcaacgggccgaaagtagatacggaggccaagcagacactggcgcgcctcatcgcgcttgacttgccactgagggacggcctgacaccggtttccgtggcactcggtaagctcgccatatccttggggcaaagtttcgagaccggaaccctgaaactcgccctgcccgcgccacccgatgcgctcaccctcgcggggctgggcgcatgacggccgcccctgcctttttgtctggataccggatcatgtggatattcgtgatgttcgacctgcctaccgacaccaagccgcagcgcaaggcagcgacagattttcgcaatttcttgctggacgaagggttcgaacgcagccagttttcagtctatgcccggttcgtgaacggcaaggaagccttccggacccgcgtgaaccggatcgagcggcatcttcccaacaagggcgacatccagatcctcaacttcaccgaccggcagtatcgtgatattgtgcatttttcggatcaaggccgaagagcgacccggaaaaatccgcatcagctggcgctgttttgatgagaattatccagatcccctcacccgacccctcaaaaaaactatgtggtatcagacgcttggaggaaggtccagtttagctgttcagaattcgaggtccagccgcaacgaccaaccggttcctgccttggctgtgttcagtttagctgttcaga

SEQ ID NO: 3708 - DNA, 5858 bp, synthetic construct
  source 1..5858: mol_type = other DNA
  misc_feature 1..5858: note = Synthetic
ctatgtgagccagacggtgctgaagcatggcgctggatcctgtccgattggccgcttgcctgccggcgagatcgaggccgccgtgattgatcagctgcgcacagtgttccgccagccggagatcatcgcgggtacatggaaggccgcccgcgcgcaggatggtgagatagccgagggcgacgcccgcgcggccttgcaacagctcgacccgctgtgggacgaactcttccccgccgagcaggcgcggatcgtggcgctgctggtggagcgcttggacattggcatcgacagtttgcgggtccgcatgcgtgtcgatgggttggacgcggtcgcacgtgaaatgactggcggcagtttggggcaagcggcatgacacgcgcaaagccaatccccgaaatcattaccgttcatgttccgtttcgcgttgtgaagcgtggtgggcggaaggaaatgcaactgccagagggcgccgcgcatccgcgcaaacccgacagcgcgctgataaaggcgctggcgcgtgcattcaggtggaaaaggatgctggaatcgggagagttcgcaacgatagccgaactggccgagcgggtggggattgcgccgtcctacatgacccgcgtcctgcgcctgacgctcctcgcacccgatatcatcgaggcgattctagacgcggagcagggggcggaggtgacgttggcgcaggtgctggagccgtttccggttgaatgggcggcgcaacgacaaaccctcgtctaatcgctacgcgactggcccttaccggtcattcactctgcacagcctccgctgcggaggggcccgccgctccggactttcgctgcaggtgcaaagtcgagccgatgacgaactgatagtctgcggggcagtactgccgttgcttcaatgtcaggacaattaaccacaatcttagggcatcaaaaaggaaacgcgccccgcaggacgcgcttcaatgtggtgctacttcgagcttgttaacggctcgaccgcgaattctgaacaacacaactgttgcacgtccttgccgcactttcaagttgcaatgtctcccagtattccagagactttcgcaagttgtatgggggaagaagatgcgcctaggtctcgacatcggaacaaattccatcggctggtggctctatgaaaccaacggaaatgaaacgaatgcccggatcataagtgtcatagacggtggtgtccgcatcttctcggacggtcgcgacccgaaatctggggcctctcttgctgtcgaccggcgggccgcccgcgccatgcgccgccgccgcgatcgctatctgcgccgccgtgcggcgctgatgaaggttctcgccaaggtcggcctgatgccagccgacccggaagaggcgaaggcattggaactgcttgatccctatgaattgcgggcaaagggtttggatagggctctgccgcttacacaactgggacgggcattctttcacctcaaccagcggcgcggcttcaagtcgaatcgtaagacagatcgcggcgacaatgaaagcggcaagatcaaggacgccaccgcgcggctggatcaggcgatcatggccagcggtgctcgcacctatggcgagttccttcatatgcgccgtcagcgggccagcgatccgcgccatgtgccgaccgtgcgcacccgcctgtccgtcgccaatcgggacgggccggatggcaaggaagaagccgggtacgacttttacccggaccgaaaacatctggaggaggagtttcacaagctctgggcggcacaggcgggttatcattctgaattgacttacgaattgcgcgatttggtctttgaaaagattttctatcagcgcccacttaaggaaccggaagtcggtctgtgccttttctccggctacggtgacattccttctgacgagcggcgcctccccaaggcccacccgctgacccagcgtcgcgtgctttatgaaaccgtgaaccagttgcgcgtcacagcggacgggcgcgaaacccgaccgctgacgcgcgaggaacgtgatcagatcattcacgcgttggacaacaagaaaccaacagcatcgttgacatccatggtcatgaaattgcccgcgctggcgaaggtgctgaaactgcccgacggcgaacgcttcacgctggaaaccggggtgcgagattcaattgcctgcgatccggtccgggccagcctgtcgcatcccgatcgtttcggcccccgctggtccacgctggacgacgaggcgcagtgggacgtggttgcccgtatcggcaaggtgcagagcgatgcggaatatgccgcgctggtaaagtggcttatggataaccatgcgctcgaccgtgaccatgccgaggccgccgcgcgtgcgccgctgcccgaaggatacgggcggttggggctgacctcgaccatccgcattctggagaagctggaggcggctgtcgctacctatgcagacgccgtcgccgcttgcggctggcaccattcggatcagcgcacaggtgaatgcctcaaccgtctgccttattacggcgaagttctggaacggcatgtcatacccggcagctacaacccacaggatgacgacgtaacccgctatggccggattaccaatccgaccgtccatatcgggcttaatcagcttcggcggctagtgaataaaatcatcgagagctatggcaaacctgaccagatcgtcgtggaactggcgcgggagctgaagcaatctgaacagcagaaaaaggacgccatgcggaatatccgtgaggcgacagatgcggccgtaaagcggagtgaaaaactcgaagagcttggcattgaggatagtggccgcaatcggatgctccttcgactctgggaggatcttaatcccggcgacatcatgcggcgcttctgcccctatactggcgagcgtatttcggccgtgatgatcttcgatggctcctgcgatgtggatcacatcctgccttattcgcgaacgctcgatgacagtttcgccaaccgcacactttgcctcaaggaagccaaccgcgaaaagcggaaccagaccccgtgggaggcttggggcggcaccccaaaatgggacgccatcgaggccaatctgaagaatctgcccgacaacaaacgctggcgtttcggcccggacgcgatggagcggttcgagggggaaaacgatttcctcgaccgagcgctggtcgatacccagtatctcgcccggatttcccgcaactacctcgacacgctctttaccgaaggcggccatgtttgggttgtccccggacgcctgaccgagatgctgcgacgtcattgggggttgaactcgctgttgagcgatgcggagcgcggtgcagtcaaggccaaaaatcgaaccgatcaccgccaccatgccattgacgctgctgtcgtggctgcaaccgaccgcagcctgctgaaccggatcagccgtgccgcaggccaggggaaagaggctggccagtctgccgaactcatcgcccgcgacacgccgccgccgtgggaagggtttcgcgacgatatacgcgtgcaactcggcaagatcatcgtcagtcaccgcgctgatcatggtcgaatcgaccgggaagggcgcaaaaaaggcaaggacagcacggcggggaagttgcacaacgacactgcctatggcgtggtcgatgctatgaccgtggtcagccgcactccattgctctcgctgaagcccggcgatatcgccgcgaccccaagcggtaagaatatccgcgatccgcaactgcaaaaggcgctggaaaccgcaacacgtggcaaggaaggtaaagcttttgaggcggcgctgcgcgatttcgcagccaaacccggcccttatcaggggctgcgccgggtgcggctgatcgagaccttacaggaaagcgcccgtgtcgaaatcggcacccgccccgatggcggcccgctcaaggcctacaagggggacagcaaccattgttacgaactctggcgtctgccggacggcaaggtgaaagcgcaggtggttaccacgtacgaggcccattccgggcccgagaagcgtccccatccggccgctaaacgcctgctgcgcgtatttaagcgcgacatggtggcattgaaccgggagggtgagacgatcattggttacattcagaaactggatatcgcccacggcctctatattgctcctcataatgaagcaaattcagacgcgcgcaatcgtgacaaatctgatccgttccggtttattcagataggcgccgggccaatgctgaaggccggtattcgccgtgttttcgtcgatgaaatcggtcgtcttcgggacggggacgcaaagccgcgctgaatcggattcgtccgaatcggtgaaatatgtcactcttccaggagtttggaggctgacatatggatcagatcgtggatatctgcacggataggcggcacctgtcgcgtgaacggggctttctgaaagtaagcgaaggggccgaggaaatcggccggatcccactcgaccagatcgccgcggtgatcgtccatgctcatggcaccacgtggtcgacctcgctactggccgaactggccgatcgtggggtgccggttgtcatctgcgggaccaaccacgcgccacggtctgtgcttatgccgcttgaaggacattatgctcaggggcggcggcttcgtgcccagtggcaggccaaggtgccgctcattaaacaagcgtggaagcaggttgtcatctgcaagatcaccatgcaggcggccgcgctggaagcaatgggagaggcccatgcgcctgttgccatactgcggcgcaaagtcacaagcggtgacagcaccaacgccgaggcccaggccgcccgctattactggccgcgcatgatgggcgaggatttccgccgcgaccgcaccgcttccgactgcaacgcgttgctgaactacggctataccgtgctgcgggccgccaccgcacgcgccgtcgtggccgccggtttgcacccgaccatcgggctgcaccattccaaccggggcaatgctttcgcattggccgacgatctgatggagccgttccgtcccctagtcgattgctgcgtgcgttcactcgtggcccgcaacggagcggacgtcgataccgaggccaagcaaaccctgacccggcttatcgcactcgatctgcccttgggcgacgggctgacgccggtttccgtcgcgctgggtaagctcgccatctctcttgggcagagtttcgaagccggggccttgaacctcgccctgcctgcaccaccggatgcgctcaccttcgcgggactgggggcatgaccgtcgcccctgtttttttgtctggataccggatcatgtggatactcgtgatgttcgacctgcccaccgacaccaaaccgcagcgcaaggctgcgacggattttcgaaatttccttctggatgaaggtttcgagcgcagccagttctcggtctatgcgcggttcgtgaatggcaaggaggcgtttcagtcccgcgtgaaccggatcgagcggcatctacccgacaagggggacattcaaatcctcaacttcaccgaccgacaatatcgtgatattgtgcatttctcggatcagggtcgacgggcggcccgaaagaatccggagcaactggcgctgttttgatgatgtttttccagattgcctcactcgaccccttccaaaacccctttttttacaggagcttggcgggagatcgagtttagcagttcagaattcgaggtccagccgcaactggagtgtgtgtctggcgatgctggaccgatagtttagcagttcagaattcgaggtccagccgcaacggacccggccagctatgcccatgt

SEQ ID NO: 3709 - DNA, 5840 bp, synthetic construct
  source 1..5840: mol_type = other DNA
  misc_feature 1..5840: note = Synthetic
gttcgatccctaccgccggagccataaaaagccactaagctcaacagcttggtggcttttttgggacccaatatcagaaagctgagtgtaactgggtcccggagtgggtcccgaaatcgatactagaagactgtgccgtgatcctacttctggtgcgttgcgatgacccttcggccgatagccgccccctccccggtacctcccctcaaagccggaagttttgcgttatagggccagcttacaaaacaggacatttctgctctttctgaccatacagacagaggaaattagaactgacaattattcccgcaccagtacttggaagtccacaggggtataacctccactgagcgaccaaagttaaaagtgggcctaaagcgggtccccagtcacaagatactgcacttgtattcaggacgaaaagaaaactctcgctgtaaaatctcaagattaccttggagccactaaagcccgaagttgattcagcctatttcagtagcgttccccaaaaaagaaaacgcaggccgtggcctgcgtttcaatgtggtgcaatcgaatgcttgttagcggctcgaccacggattttgaacacactcaactttgcatattcaatagctcgacacaatgcagttcgaggttgttttgaacatttttccatgaaatggttggtcacgttttcaggagtattcttcatgcggttggggttggatatcggagcaagttccattggctggtggctttatactctagaggatggtgcgatttccgaggtgattgacggcggcgtacggattttttccgatgggcgcgatccgaaatccaaagcctctctggcggtggaacgacgtgcggcccgagccatgaggcggcggcgtgaccgttttcttcgtcgcaaagcggccctgatgaaacgcatggccgaggtcgggctgatgccagccgatccgatcgaagccaaagctttggaacagcttgacccttatgaattgcgcgcgcgcggcctgtccaatgaactgccgctggcgcatttcgggcgcgcgctgtttcacctgaaccagcgacgcgggttcaagtctaaccgcaagacggaccgcggcgaaaatgacaatgaaagtggcaagatcaaagacgccaccaaacggctggacttggccatggcaaccgccattcccgatgaaagtctgcgcacctacgggcatttcctgcatctgcgccgcagtgaccggcccgagaaaccagcaggcagcgaggccaacaagaatggctcgcggagtgacgaccggcgcacgcccccagtgcgcacgcggctgagcgtggcgcagcgtgacggggcggataaggctgaggttggctatgatttctatcctgaccgccgtcaccttgaagaagagtttctcaaactttggcaggaacaggccagctatcaccgggatgttctcaccagcgacctgcgtgatgacatctttcagatcatcttcttccaacgccaattgaagatgcccgaggtgggcctgtgcctgttctcggggcagcacggggtgccagagaatgaaaggcgcctgccaagcgcacatccgttgaaccagcgccgcatcttgttcgaaacggtgaatgccctgcgcgttgccgaattcgggcagcccaacagacccctgaaacgcgatgagcgtgaccagattatcttggcactagataccaaagaacacacgaagtcgctttcaggcatgtcgattaagctcaaagcgcttggaaaggtgatcaagctgcgaccgaaacagcatttcacgcccgaaaccgccaatcgtgatgccatcgcctgtgatccggtccgcgccagcctatctgatccaaggcggtttgggccgcgatggagttcacttgacatcgacggccaatggcaggtgatcgaccgcctccgcgaggtagagaacgaggctgagcatcaggaactgatgaaatggctgacagaatggcatgggctgaaccggacccaagccgcagccgtagccaatgcgccgctgcctgaaggtcatggccggatcgggcgaactgcgacactgcgcattctggaccaattggaatcggatgtgataccctatagcgaagcggtagcgcgctgtgactggcatcattccgacgaccggactggtgagattctggacgaactcccctattatggagaaatcctcaatcgccatgtgattcccggcacctacaatgaaaacgacgacgagatcacccgttttggccggatcaccaacccgacggtgcatatcggtctgaaccaattgcggcgattggtaaaccggattatctgcgttcacggcaagcccgatgagatcgtcgtggaaatcgcgcgggacctgaaaaaatccgaggatcaaaagcgtgaaatcgagcggacgatcaaaaaaaacaccgaagcggcgaagaaacgtggcgacaagctagtcaatgaattgggccagcgcgatactggcgccaatcgcctgcgtttacgactgtgggaggatctgaacccggaggattgcctgaaacggttctgcccctattctggccagcggatcagcgcagggatgctctttgacggatcatgtgatgtggatcatatactgccctattcgcgcacgctggatgacagcatagctaaccgcactctctgtttgaccgaattcaatcggcaaaagaccgaccagacgccttgggaagcctggggcgaaacccggcaatgggatgagatttcggacatgttgaaatatctgcctgcgaacaaagcctggcgctttgcccccgacgccatgagcaggtttgagggtgagaatgattttcaagcccgcgccttgaaagacactcaatatctgtcaaaaatcgcgcggagctacctgaatgcgctttatgatggtgcggatggcaaatcccatgtctgggttgtccccggccgcctgacggaaatgctgcgtcgccattgggggctgaacgggatcgaggcgatgagcgacagtgtaaaacgcacagccaaggccaagaaccgcaccgatcatcgccatcacgcaattgatgccgccgtaattgccgccactgaccgggcgcttatcaagcgcatttcggagatggccaaacgggatgaattggacggtgccgaagaggttgtccgctccttgcaggctccatgggaggattttcgcaacgacatcgctggccagttgcagcgcatcactgtcagtcaccgcgccgatcatggccgcatcgacccgcaggtccgcacatccgggcgcgacagcaccagcggcgccctgcacgaggcgactgcgctttccatcatcgacgatgcgacagttgcagtaagggttcccctaaagtcgctatcggtggcgcaattcgaagagggcggccgttcagggtgggtcagggatgaagacctgcgccaaaagctgcatctggcaaccaaagggaaagacggtaaggcgctggaggcggcgttggaggcctttgcagccaagccaggtccctatgctggtatcctccgagtccgcctcgttaaacccatgctccgggcagtgagggttcagataccacaagccgccccgaccaaagcctatcaggcgggcagtaaccactgttacgaagtctggaagttgcccgatggcaaggccacccacaatgttgttcaggtattcgatgcgcaccgaaatcgggaaagccgacctcatccggcggcaaagcgtctgcatcgtttcatgaagggcgatctggttcgcctcgatgatagcaagttcggtccggtcaccgctacggtagagaaattcaacaacaaggggatgatagaactggtgccgcacaacgaagcgaatgcctcggatcgttaccgcaagttgaaagaggatttgtacattcgccttggtgctgccagcctactcaaggccggtgcccgtagggtctacgtcgacgaaatggggcgcgttcgtgacccgggtcctcgtggatgaggccgcgcatttggtgaaatagtcgttcttccatatacttaccccattaacgattcgcgattttttacccggggtgatgtattggaccaaattattgatattgccaccgatggccgccatttgtcgcgggatcggggatttctgaaagtttctcaggatggggtcgagatcggccgaaccccgctggatcagatcgctggtgtgatggtgcacgctcatggcacgacctggtcgacctctttgctgaccgagctagccgacaaggggcgccccggtggtcctctgcgcggccaaccacgcgcccaaatcggtacttctgccccttgagggacaccacgcacaggggggacggatgcgggcgcagtggcaggccaaagctgcattggtgaaacaagcctggaagcaggtgatcatcaccaaggtgcacatgcaggccgcagccctgcaggcggttgggcaagatcaggcaccgttgaccatgatgattcgcaagatcacctctggcgacagaaccaatatcgaggctcaggctgcccgctattactggccgcgcatgatgggagctgagtttcgccgcaatagcactatgggtcaggaaaacgccttgttgaactatggctataccgtcctgcgcgccgccacggcacgggcggttgttgccgcgggtctgcacccgaccattgggttgtttcacgccaatcgcggcaatgcctttgcacttgccgacgatctgatggaacccttccgcccgcttgtggactgcaccgtacggtcaatcatgcgaactcgcggcggcgaggttgataccaaggccaagcagacactggctggcctcattgcacaggatttacccctaggcgacgggctgagcccagtgtcggtttccttgatgaaactggcaacctccctggggcaaagctttgaggcaggtcagctgtcgcttgctctgcccaaaccaccggaatctctggtgctggcggggctggggcaatgaatgcgcatatcacaaaactatcggggtatcgactgatgtggatattggtgatgttcgacctgcccacggacacgaagaaacagcgtaagcaggctggggcctttcgcaattatctacttgatgagggattcgagcgcagccagtattcggtctatgcgcgtttcgtgaatggcagggaggcctttgccacgcgggtgaaccggatcgagcgacatctacctgagactggtgatatccagatcttgaacttcaccgaccggcaataccgtgatattatccaattctcggatcaagggcgcaaaggcgcccgggaaaatccgaatcaattggttctattctgaggtcaaacggcatgaatttcgccaatgagattctatcaaacccttgtgaaatcaagggcttgatgcgcgatctattgtagctgttcaaaatccgaggtccagccgcaactacggtatggatagcaagaatttgcatacaattgtagctgttcaaaatccgaggtccagccgcaaccacaagctgacagggatgtgattcggctgtattgtagctgttcaaaatccgaggtccagccgcaactgatttaagcccgtttgcgccgtgccctggattgtagctgttcaaaatccgaggtccagccgcaacgacgccttcacagtcctacgcctgaaccacattgtagctgttcaaaatccgaggtccagccgcaactgggacccggctcacgtccagttggcaaacattgtagctgttcaaaatccgaggtccagccgcaacatactggcggtctgaaggcggtagaagcgcattgtagctgttcaaaatccgaggtccagccgcaacttcaaggcttcctt

SEQ ID NO: 3710 - DNA, 5399 bp, synthetic construct
  misc_feature 1..5399: note = Synthetic
  source 1..5399: mol_type = other DNA
ctctgggacgagttgttccccgccgagcaggcccgtattgtacagttactggtggagcgggttgatattggtctgggcgggctcgacgtgcgcctgcgggttgatgggcttcgcagtctggttcaggaattggccgccgacgtcgggaaagccgcatgacgcgccgccagacgcccgtggaagcgatctcggtccatgttccgttcgcgatccgcaaatatggtggccggaaacaggtcatcacgccagacggcacgcccacggttattgaaaagtccctcgtggacagcacgttggtcaaggcattggcgcgcgcgtttcgctggaaaaagatgctcgaaagtgggcagttcaccaccatcaccgaactggcgacgcacgagaaaatggcgctgacctacatgactcgcgtcctgcggctcagcctgctgtcccccgaggttgtggagatgatccttgatgggcgacagccgccggagatgaccttggcggttttgctggagcctttttcggtggagtggaatgggcaaagagacccaactatctagaccaaaataaaaaacgcaggccgtagcctgcgtttcaatgtggtgcaatcgaatgcttgttaacggctcgaccacggattttgaacgcttcaaatttgcacgaacacagaattatttcaaggtttctttcaagttgagcgttgtttctctctgtgtaacgatatgaacaatatatttgtgctatttattagagggcctcatgcgacttggactcgacattggaacaaattccatcggctggtggctttatgcaaccgagaacggcgcgatttccggcgtgattgacgggggtagccggatattttcggatgggcgcgatccgaaatccaaggcatcgctggcagtcgatcgccgtgtagctcgcgcacaacgtcgtcgccgtgaccgttatctgcgccgcaaagccgccctgatgaagcgcatggccgaggtcggattgatgccgtcggaccctgccgcggccaaggaactggagcagttggatccttatgccctgcgcgccgaggggctggatcgagcattgccactggcctatctcgggcgcgccctgtttcacctcaaccagcggcgcgggttcaaatccaaccgcaagaccgatcgtggcgacaatgaaagcggcaagatcaaggatgcaaccgcgcgtcttgatcaggcgatgatggcaaaaggcgcacgcacatatggcgagtttctgcacatgcgccgcgtggccgcaccagacccaaagaacgtgccgggggttcggacccgcctgtcgattgctgcgcgggataactccgataaagcggaatccggctatgatttctatcccgaccgacggcatctgtcagaggagttcgaaaaattgtggtcggcgcaggcggcgcatcatcccaatacgctgaccaacgacttgcgcgacgaaatcagggtgatcattttccaccagcgcccgctgaaaacgcctgcagttggcatgtgcctgttcaccgacgaaaagcgcattccaagtgcccatccgctcaaccagcggcgcattctgcttgaaaccgtgaacgctctgcgcatcgcggaacgcggcgcgcccgcgcgtggtctgactcatgaggaacgcgaccagatcgtgcatgcgctggacaacaaaaatcacaccaagtcgcttgccggcatggcgctgaaactcaaggctcttggcaaggtaattggactgcggagcgaacaatccttcaccctggaaaccgccaaccgtgacgcaattgcctgtgaccccgtgcgcgccagcctgtcgcatcccgaccgtttcgggccgcgttggtcggcccttgacagcgatgcacaatgggatgtggtccaacgcatccgcgcggtacagtcggacgcggaacaccttgaactggtgcaatggttggaaacaacacacggattggatcaggttcacgccgaaagtgccgcgagcaagccccttccagaagggtacgggcggcttggcctgaccgcgaccaagcggattttggcagcgctcaaggcggatgtgatcccctacagcgctgcggtcgcagcctgtggctggcatcattccgacggcagaaccggcgaggttctggatgaattgccctattacggtcaaatactcgaccgccatgtcatcccaggcagctatgacgaaaatgacgacgacgtcactcgtttcggccgcatcagcaacccgacggtacatatcggcctcaaccagttgcgccggctggtgaaccggatcatcaccgtttacggcaaacccgatcagatcgtggtggagcttgcccgcgacctgaaactgtccgaggacaaaaagcgcgaggtgcaacgtaaaatcaaagaaaacactgtcgcagccatcaagcggggggaaaagctcgaggaaatcggtgtgcccaataacggagcaaaccggatgcgcctgcgcctttgggaatcgctgggcgaggatgtgatgacccgcaactgcccctattccggtcagcggatcagtatcgggatggtctttgatggcagttgtgatgttgaccatatcctgccctattcccgcacgctggacgacggtttcgccaatcgcaccttgtgcctaaaggaattcaaccgccagaaaaccaacagaaccccgtgggaggcctggggcgataccggccaatgggacaccattgcggccaatctaaagaacctaccagggaacaaggcttggcgctttgctccggacgcgatggagcggtttgagggtgaaaacgacttttccgaacgcgccttgaaggatacccaatacctgtcgcgcattgcccgcgcttatcttgatacgctttatgacggcggtgatcacaagcgccatgtttacgccgtacccggacggatgaccgaaatgctgcgccgccattgggggctgaacagcctgctgccggacaaggatggtgccgtgaaagccaagaaccgcaccgaccaccgccaccacgcgattgatgccgccgtcgtcgcggccaccgatcacagcctgataaaccggatcagcaaagccgctggacgcgacgaattaatcggcaatgctgccgaagacgtcgcccgtacgaccaaagagccatgggacggctttcgcgccgacatcagggcgcaactggccgaaatcaccgtcagccaccgcgccgatcatggccgcatagatcgcgaagggcgcaaatccgggcgcgacagtaccactggccaacttcacaacgataccgcctatggcatcattgacgaccagacggtcgtcagccgcgcgcctctgctttcactcaaacctggtgatattgaactcacgaccatgggcaaaaatctccgcgactcctatctgcaaagaaagctggccttggtttgcaaaggcaaagacggaaaagaccttgaagaagcactgcgcaaattcgcggcgaatgaaggcccctatcagggcatccgtcatgtgcggctgatggaaagcctgcaagcctcggcccgggtggaaatcgccgatgcaagtggcaagcctgtcaaagcctacaaaggcgacagcaattattgctatgaaatctggcgcctgcccgatggcaagcctaaggcgcaggttatcaccacctatgaggcccatggcgagacactccgccgcccgcatccggccgcaaaaaggctgctgcgtgtcttcaagcgcgacatggtcgccattgagcgcgagggcgagaggatcatttgttatgtgcaagccatgcacgtcgccaatggcctgtatctagcaccccatacagaagccaatgccgatgctcgcaatcgggacaagtccgacagtttcaggttttttcaaatgtcggccggatcgcttctcaaagcgaaaatccgccgggtgtttgtcgatgaaatggggcgtttgcaagaccccggataacccagcccatcacgccgattagggcgcttcctaattctgtcgtataatcaacggattagcgattcgcgcagaggcgcgaggggtagtaagtggaccaaattattgacatagagaccgacggtcgccatctgtcccgtgaccgtgggtttttgaaagtatctgaaaacggtaccgagatcgggcgaacaccgcttgaccagatcgcggcagtaatcgtgcatgcccacggcacaacctggtcgacctcgcttctggttgagcttgccgaacgcggcgcaccagtggttctgtgtgccgccaatcacgccccaatatccgtattgctgccgatcgagggctattttgcccagggcgcgcgtatgcgggcgcaatggaacgccaaaacaccgctggtcaaacaagcgtggaaacaggtcgtggcgtgcaaagtcgggatgcaggcggctgcgcttgaggccataggccagccctctgcctccttaactatgatgctacgcaaactcacttctggcgacaccaccaatatcgaagcacaggccgcccgctattactggcccagaatgatgggggcagattttcgccgggataccggcggcagcgatgaaaacgccttgctgaattatggttataccgttctgcgcgccgcaaccgcgcgggctgtcgtggcggcgggcctgcacccgaccattggccttttccattccaaccgaggcaatgctttcgcgttggccgacgatttgatggagccgtttcgacctctggttgatagctcggtccgaaccatcgtttccgccagtggaaccgatgtggatagtttggccaaacaggcgctggcgcgcctgatcgccacggatctgccacttggtgatggggttacgccggtctcggtcgcactgatgaagctggcaacctctctggggcaaagttttgaaaccggcaaactggctcttgtcttaccaacgccccctgaccctttgatattcgcagggctgggccaatgacccaccctgtcacatttctatcgggatatcgtctgatgtggatacttgtaatgtttgatttgcccaccgacaccaaactgcaacgcaaagcggcgagcggttttcgcaatttcttgctggacgagggatttgagcgcagccagttttccgtctatgcgcgttttgtaaatggaaaagaggcctttgcgacgcgagtcaatcgaatcgcgcgccatttgcccggcgccggtgatgtacaaatccttaacttcacggaccggcagtatcgtgatattgtacatttctcggatcagggccgcaggaaggcgcgggaaaatccacaacaattggtgatgttctaatgcgattcgcgctgaaaaattacaataggtcgccagttaaatcctgtagtttcaggaagttaactggcggcctattgtagcggttcaaaatccgaggtccagcagcaacaga

SEQ ID NO: 3711 - DNA, 15765 bp, synthetic construct
  misc_feature 1..15765: note = Synthetic
  source 1..15765: mol_type = other DNA
gcgtggtggttcctggtttttgccttgcatgtgttcttgcaggatgcttttgtagttcaccagttcatcgcgggtaacggtggcttcgtaatctattaaaatgtgatgtttgatgaacctgcccgcagctgcaatgccactatccaaataaatggcacagattatggcttccatggtgtccgacaatatggaggctttggagcctccgccggactgttgttcttccgggcttagcagcacaaacttgccgagatctatggcgtttgctttcagggtgagataggtttccgagacgattttggattttagtttggatagcttgccttcctgttcgtccgggtggcgggagaagagttctttgctaacgatgaagcccaggatggaatcgcctaaaaattccattctctcgaagggagagggtgctttatggtcatcataacggcgacgcaggtaagatttatgcgttaaagcagcatgcagcaatgtggggtcgttgaagctgtaatctatacgcttctgtagctgagtgaggcttttttcccacttggggtattgctccgtaatcttcttgctgttaaagtactcaacaatcttggagatgattgttttcatctgtttctccatcaggggctataaaccggattagttatagatagcgcttgatgatgatggcagaattatgtcctccaaaaccaagagagttggatatagcagcatttaccacttgcttcacagcggtgtggggagtgtaatccaaatcacaattggggtctggattagttaaatttatcgtggggtggattatgccggattcgatggtctttacgcagacaattgcttccataccggcggcagctcccagcatgtgtcccaccatggatttggtggagtttaccctcactttgtaagcataatcgccaaaagctgttttgatggacatcgtttcgcccttgtcgttcaggggagtggaggtgccatgagcgtttatgtattgaatgtcggttggaatcatgccggcatcttttagtgccatatttatggcacgtgtgctgccttcaccatcttcggtaggggcagtgatgtggtaggcatcgccggtagcgccatagccagccagttctgcatatatcttggcaccgcgggcaagagcgtgttccagctcttccaatacgagaatggctgcaccttcgctcatcacgaaaccatcacgacccacgtcgaaaggacgggaggctttttcgggttcgtcgttgcgggtggaaagagcgcgcatggcggaaaatccgcccacagccagaggagttactcctgcttcagctcctccgctgatcatgatatcagcatcgccgtattggatagtacgcatggcagtaccaagggcgtggttggcactggcgcaggcactcattacattaaagtttacccctttgaagttatgttcgatgctgatgtgtgcagcagcgatgttgccaatcattttggggatgaagaaagggctaatgcggctgggaccacgggtgtagcttttaatggtctcttcttcaaaagtgaggatgccgccaatgcccgagccggtgataacgccggtgcggtctggatcgaaagaaccggcaactaatcctgcatccgctacggcttcacgggctgcgatcatagcaaattgggtgtatgtatccagtttttttacttctttgtggtcgaagtgttcttccggattgtaatttttcacttcagcagcgatgcgggtgggaagattggaagtatcaaaatgagtgatttgggcaactccgctaacgccattgataaggctttgccaggtttgggatacattgtgtcccactggggttatagcaccaataccggtgataactactcttcttttagacatataaacctctgctaattattcaattttatatggtttgcacattatgctgatctgaaacatactgccggcatgtgccccggcagcatttcttagattaacacaagcaaaaaaggtggattcaatcctgatacctgtaagctatcaggattgatccactctaatttgggcttaacccagtttttccttcaggtaatcgatagcctgaccaacagtgcgaagtctttcctggtcttcatccgggatggtgatctcgaattcgtcctcaaaagccatcacgagttctacggtatccaaggaatcggcacgaaggtcttcgataaagttagctgcatgtactacctgagcttcttctacgcccagtttgtccatcactatctgttttacttttgcttcaatatccattattcctcctatgttattgaagagtgttttctatgttgattgggtatttccctttcaatccaagttactgcatagtcaatccgccatccactgccatggtttgcccggtgatataggcactggcgtcaccggcaaggaacaggcatagattggctacgtccatggggcttcccatcttattaagcgggattacattggcataatcagcgcggacttctgcgctgagtgatgcggtcatttctgtttcaataaaaccgggggctacggcattcacacggatattgcgcccggcaaattctttggcgcaggactttgtgaaggcgataagcccacccttggaagcagcataattcgcctgtccggcattgcccataagccctactacgctggcgatgtttatgatgctgcccttacgagctttcatcatatgcttaaatactttctgggtgcagatgaagctgcctttaaggtttatgtccatcaccaactgccattcctcttccttcatgcgaagaagaaggttgtcgcgggtgatgccggcattgttcaccaggcaatcaatggctccgtgctgcgttacaacatcggcaaaaatggcttctatgccactgctatccgttacgttgcctgtataaccgtatgctttgccaccgatgctttttatagcactcacggcactgtttactgcatcggacattatgtctataatcacaacctttgcttgctctgctgcaaaggcttctgcgattgcatagccgataccgcgggctgcgccggttataattattactttatcttttagattatttgtcatcagaacctcatgaacataattcaagtttcagctgcatcaacctatagctgacacaacagcatcaacatcttctattttgtcaatggaaaaaacctgacagtctttgttaatgttcttaatcatcccgcttagaaccttctggggtccgaattcgataaactgctgcacaccctgggtaaccatgtattcaatgcattccacccaacgtacgggagagattatctgttttgccagtttttctcgctcaagcgtaccgcttacacatggaagagcgtcatagttcgaaactacagggatattgccgtcatggaaggtgagtgttttcatttcgtcatacagccacaggcttgcctgggctatcagaggtgtgtgaaagggtccgcctaccacgagaggaagcactcttttggctcccttgcttttagcaagttcaccagctgctgccacaccctcggcggttcctgaaatcacagtttggataggggtgttaaaatttactgcctgaactaatccttcgcttgatgcttctgcacagatatcaatcacgacttgggcatccaagccaataatggcagacatcgcaaaaggaaccccggcattggctttgatcatgtactccccacgcttatgcaccaaatgcatggcatcagaaaaagaaagcattcctgaagctactaacgcactaaattcacccaaggagtgtccggcaacaaaatcagctttaaccttgcaatgagcttgaaacctgtgtagtgcggcaatgctgtggaagagtatggcaggctgagtaaaactggtctgtttgaggttttcttccggtccttccagcataacttgcttcagattagttgcatgagtcttgtcaaaagcgtccattacttccaaattgtgggggtcgctttggataaaatccagtgacatcccgatgtactgtgctccctgtccggggaatacgaaagctgtcttcatttactttcctccctgtagaaattagtatctggctaaaacgctaccccaggtgagacctgccccaaatgaggttagcaggattatatcaccgcggcggattttcttgttgcggatagcttcatctgtggcaatggggatagttgctgaggaagtgttaccatatttctcgatgtttactatcaccttgctcataggcacgcgcattttatcggcaagcccttctataattcttaagtttgcctgatgcgggatcacccaatctatatctgccacactaaggttgttgcggcgcagaagttcatcagaagaggcaaacatggattttatggcattcttgtatatccggttgccttccatagcaactgtatgaaggttggcatctacgcttgcgtgcgaggcgggcatacgcgagccacctgcttgttgaatcagcagttcaccctggctgccatcggcatctatcttggtatcgataatgcgggagatgtcgcttgcttcggcacgactaacgatggtagcgccggaaccatcaccaaatagaacgcaagtgttacggtctttccagttggttatcttggtaagaatgtccacgccaatcaccaaaacgtgcttagcaataccattttccacatactggcgggcaacatccaaggcatatacaaagcctgtgcaaccagcggatacatcaaaagcagggatgttttttaagcccagtttcttttgcacaatgcacgcggtagaggggaagggatgatcgccggagatggtggcgacaataatcaggtctatatccttgtatttcacggtgctgctttcaatggcgtttactgctgcctgatgggcaaagtcactggcagcttccgtttcggaggcaatatggcgttctttcatcccggtacggctgcgtatccattcgtccgaggtatccacgatcttttccagatcgaagttggttaaaatcttcttgggagcataactgccgaaggaggagaacttggcatgataactaagcattatggaatcctctcatagtattcttttgcgtgggcgatgaaaccggattttgcgatacgatctgcaaagcgaatggcgtttttcatggctttagcattgctgcgcccgtgtgaaaccaccgaaagaccattcaatccaaccaataatgcaccgccatattcggtatgatccagcttctttttcatataagtataaacaggatatgaaagcatagcacccagtttagcaatccagtccttattaatctgctctttcaatatttcaaagattgagaaccccactccttccactgtcttcagcacaatattgcctacaaagccatcgcacacaataacatcggtaaccccacggataatatccttgccttcgatattgccgatgaagttaatatcctcgttggcatttaacagctggtaagcttgcttggtaatggcattacccttggcactttcttcgccgatgtttagcagggatattctggggcgggattgtttaaaaaagaattcgaaatataggctgccaagctgggcaaactgaagcaagttctcggcagtacaatctacattagcacccatatcaagcagaatctcgtgtccctcttgagtgggaaagagcacagctatggctgggcgaagcacgttctttatccgaccatagccaagtagcgaagcagccatcacagcaccggtattcccggcactaaccaccgcatcagccttattttgattgtataaatcaaccgctcgcactaatgaggaatccttcttcgtgcgaacagaagcagaggcactatcgcccatctctattcgttctgaagcgtgaacaacagtaatcctggctggatcgaaaaaatactttcccagttctctggtaatcgtttcttcgtccccaaccaggatcacttcgtcacacaaatcttccttgaccgcaagaacagcgccttcaatttcgggaaacggtgcatgatcgctcccaaatgcatcgagggctatgcgcacattactccttggcgtcgattatctgcttaccgttataggtgccgcagttttcgcagatgtggtgagagcgtgatgcttcaccgcatttgctgcaggtcgaaaagctcgggggagtaagcgcatcatgggttctgcgtttatctctacgggttttcgaggtctttctttttgggactgccattggtttctccttggtttatagcaaatagcaacaacatcatttcaaacactgatttacgttttaagcttgtgtcgcagctatcgtgcatgtaagtttttatcagttagaggataaacttggtgaaggctgattttgtcaaccaaaaaaagccaaacattgctaagcatgttcgtctaaaaggacttagcctgcacgtgattgcaggaaaaccaatgccgtgagaggtctggatttgatctatctaacgctaaacaaaccctctgccacgtttatcaaggtggaaagctcctcgaacttgcttttcgggcacaccacgatgatctgataaaggcggttattgtgccgcagataagtgaagcgaaaatacatatcggtacccttaatcttgccatgagtaatcacgtaataagcagggattttacttacttcggtatcgagggtagccagtatctgaaatgtagtgatgctgtcggatttagcatactccttaaactggctgaaaaccttctccctgatactacccagtgccggtaaagcatccactttatccagaggggtaaccgcaacacggatgtatgttttcgcttttattcctgtatcttcagatgggcatacagaaaaatcatcaggtttgtcggacatcacagtccattttgcaggatatgacaaagagtaaccaagctctttactatcttgatttcgccactccaatccaaaaagtgtagaaaacatacaacacacaataaacaatgcaaatagagtctgtttcataagatcctcgtcttccgaatttaaatctaagctatactacatagatgtcataaactgtcaagttttatcttacaagtcatggtttctctcagcttcatatttcctcgtagttttcatcgattgtggtggcttcatccagctctaaaatttgcttgctctccagtgacgggaggtcttgcattttgcttaggcgtttctctatctggcggctgcggtggctggctttttctatggtgttagatgcttcttgcagcttcttctgggtgagatcgagcaccgagccgaacttgccgaattcatgtttaacggcactaaggattctccacacttcggcggatttcttttggatggcaagggtctggaatcccacttgcagactgtttatcaacgcggcagcagtggtgggaccgctaaggattacatgaaactcccgcatcacactctcaaataagcctacattgcgcagcacttctgcgtaaagcccctcaaagggcagaaagaggataccaaaatcagtagtctgcggtgggttcaggtatttgtccctgatatccctggcgcagcttttaatcctcagcaccatgttcttgcgagcctggtctatggcaggcagatcgcccaaatcataagcttccatcaggcgataatagtcttctatggggaatttggcatctatcggcaaatacacgctttccaagtcatcatcttttccgggcaggcgaatagcgaattccacaacctcatcccgccgtttattaggcttgaagttcttctcatattgttccggtgaaagcatgtcttgcagcaggttttccagctgtatttctcccaacaccccgcgggatttcacgttggtaagcgctcttttcaggtctcccaccccgatggcaagattctgcatttcgcccatgcttttttgcaccagttccagcctttcactcacgattttaaagctgtcgccaagcctcttttccagtgtctcatgcagtttctcatccacggttatccgcatctgctccagcttactttcattgttcaggcgaatctgctccatctgtgtttctatgcttttacgcagaacatctgcctgagattgctgtgcagcggtaagatcgttcatgcgcctgctgaagttctcggacagattgttcagcgaggtcttttgttcttcacggttctgggcggcatcggcattcatttgctgtttcagcgcattgttagcattgcttatttcttcacgtcccgcctgattctgctgagttagggattcgttttgcatgcggatggcttcgcttagctccttgcggttatccatgctaatcccaagcagttccgtacgcaaacggctcatctcttcgcggctgtagcgatcgaaagtttcaaatgctcctttcagctcacgcagtgcctcttctccggaagtttggggacgctttgctaaacgcaaaacataaagtaaggttatcagtgcaacgcatgcaattccgctaaccagtacatataataatgtcatcaggcacctccgcttaatttttggctaacacacggaacaagtagaacagcgagccgatgagcgctacatccctgtggttatccggatttactataattggctggaaatcttcgtttaagggcaccagcacaatcatccgcttggcatcatccaacatcagttttttaagtgtgatggcaccatcgatacgtactgcacaaatcttaccctcaaggtgacgccagtcctgatcctgctttatcaacaccacgtcattatgccggatatccggctccatactgcgcccgttcacccgtaaagcaatgtaatccgccacaatgccgtgtatcattctgcgccttacggttaccacgtccacggtgtcgccgaagctttccagcggttcacccgcagcgatttcaccgcttacgctaaaatccaccgattcggaatccagcataccctgacgcgcctgaacaatttcttccaggctggcattcatcatcttctgaagcttgtcccaacccttggcttgctgcttggatgcttcaggctggctaaacatttgcccctcaccggtgatcagccaatgcagatcaaccttgtaactttgagcaatctcaatcagagtctccagcgagggcttggtgcgcccgctttccatttgcgatatggcggaaggattcatatccagaacctttgccatttctatctgcttcaaacgcaatgcgctgcggatagctttcagtctttctccaatcataaaccagctccttatcggatgtttagagcagcttaataacttgctccatagtgtacaatgtcaatatgattagcggtgctaaatctgtcaagttttatttagcgacactgcgcgatatgttatgggagataataaaactagtatgggcgacagaattgagattttgggacagatttcgcatctatttccaaactgaggatagaagagaagacttctttgtttctttgttagtaacatagctttgtaaagtaacatagctttgtaacctgcgaaatggagtattttaaaaaagatgaaaagaggggacgtcagttgtaagggctaaccgccgtttcgccctatttcaaatagcagcgaacaacattaaaggtaacttgaaggggcatgtaacttgccaaatcaaagcaccaagcctgatttcgcaaatgtacataccgcaatgatgcgtaatccaactcctttcatctctgtaatccctgcataggcattaccatcaacccttcccgtcattccactgtaatcaagttcttttcaaacaaggataaagccgttgcatctatggtgccataaataaataagcggtgccgaatcaagttcagcaccgcagttgttggaaaaatccttattaacagcttgacaccaaatcatagttagctaattaaggttccatggacataaataacaaaccttatctggaggtcaagtaaaatgtgcaaagacggcaaaaaaaactatcggcttggtattgatttaggttccacctcactgggatggtgcatgctggagattgatgaagagcgcaatcccatagggatcatcaatatgggagttcgcatctttcctgatggcagggatgcaaaaagtaaagaaccgcttagcgtagcccgtagaggttaccgggggcaaaggcgcaatctggacagatatctgcaaaggttaaaagagctaattacttatctacaaaaacatgggtttcttcccgcagatgaagcagaacgtcgtgaagtgtttaagctaaacccctatatgctccgcgctaaggctcttgatgaagccttatctccatctgaatttgccagagcaattatccacctttccaaacgcagaggctttagaagcaatcgcaagatacaaagcgacaaaaagacggcatataccgaggcaatagacaatctgaaaacaaatctggaaagcaatggggcacgcaccctgggagagtatctttggctgaggtatcagcagatgccggaaggaaaggaacatctgcgtaacccaattaaattccgctacgagataaagcttgaagaccccaacccaatattcccattaagggaaatggtggagcacgagttcgatgccatctggcaagctcaaagcaaatatagccctttgttcagcgagacgcataagcaaaacattttcgccattatcttcacacagagagacctgaagaaacaggcaaagggcaaatgccagcttttaccagaatttacccgtgccccaaaagcccaccccctgtttcaggaatttagaattcgccaggatttaaacaatctgaaagcgagagatatgttcaacaacacaaccatagaactaaccgacgcgcaatataacacccttttccaagcactcagtacaagcaaggaaagaagctttgaacaattgcgcaaagccatctatggtaagcaggcagaagattaccgcttcaatctggaagcaaacgaccgcaaaaagctacttggagaccttacttatgcagagataaaccggaaaggcaacgaagctgtccggtcatattgggaaaaatggagcctggaaatgcaggctcaggttatagaaatagtgatttccgatcttgatgatgaacctactcttgtagaattatccgagcttggcatcccgaaagatatcgcatcagcattgcttgatttacacttaccttctgaatattgccaccttagcacccaagccatggaaaagatattaccctttatgcgccagagaaccatctactctgaggcgtgtaaacttgccgggatggatcactccggcgaattcaccggagaagtattcacagacggaagcttgccctattatggtgagttattaaaacgtgaaacgatagaactaaaccgccagacaggtgacaatgatgccgatgaaagcggtaagataaacaaccccaccgtccacatcgccctaaaccaattgagaaaacttgttaatgccatctgtaaaaggtatggagctgcgccaaaagaaatagtgctggaacttggtaaggatatcaaactcggcgaaaaggaaaaggaacgcctgaacaaacaggcgaacaagaacaaaaagataaacgaaacagtggatgaactcctgcgttataacgatattaaacccaatcatcttaaccgcctgaaagccaagctgtggcttgaattaggagccagtgagcttgaccggcgctgcgtatattccggccatcagattgcagtaaacgacctgttcacttccaaggtagaaatagaccacatcctgccaaaatcgcgaacctatgatgacagcacctctaataaaatcctctgtatcatagatgccaatcattacaaaaaagagcgcagcccttacgaagcatttggtgaaagcaaggacggctaccgttgggaggatattgtttcccgtgccaacaatctgcccgataacaaaaagtggagattccaggctgatgccatgcaggactatgccaataaagaagagatccttgcccgcatgctgaatgacacccgctatatgagcagagtagctaacaaatacatgtgctatatctgcggtataaacaatgtatggactatcaccggcagacatactggtatgctgagggcaaaatggggcttgaacgctgccttgggtgatgatgaacgcaaagaccgcagcgaccaccgtcaccatgccatagatgcatttgtgatagccctcactaaccgcgccatgatccacaggcttgccaccactatcgaaaacagcagagagcgctttatagaaaacttggaaccgccctatacaagctttaaccatgaagagttcaagcagaaagtaaacagcatcgttacctccttcaaacctgaccaaataaatcctgaaaagcttcaaagccgcaaccagacagggggttcgctggtgcaggaaaccgcatattcattcgagggcattgatcccgataacccaaaatataacctctatgcagtgcgtaaatctgttagcgacgttacagaaaagaactatcaagatatcgctgcccctgaattccgcaaagaactggaagcaatcgctaaaacatatacggggaaggattttcaagcgcaggtttccatctgggcaaagcgcagaaacataaagaaagttaagcttatctcttccatgaatcccgatggcatggtccccattctaaacaaagaaggcatagcattcaagtttatggcttccggcgaaaacctctttgccgatatctacattaaagaccccgccgaccccaaagtgaaatggagcatagagatagttaacagttacaaagcccaccaaccggggtttactccgcaatggaaacaggaattccctaaagctaagaagcttatgcgtgtgtttaagaacgacattatcgctatcgatacccctgatggaggaagagaattgcgcagagttaagaagatgacaaaaggtgccttattcttaagggaatcaaacattgcaaaaaaggataaagcacttgatgatattggggaacagttttcgcccaacaaactctttgagctacatgctcgcaaagcaggtgtggacatgataggacgctggttcgaccccattgtaaacgaacatgaatagcgtggtagaaattagcagtgatggcatcagcatctcggtaagtaagggctttttgcttgtaaaacagcaggaaagcgaggaaaagatacccctatccgagatagaaactcttgttataaactcctacggtgcctatatcagcaataaagccattatgcgccttagcgaggagggagtccccattgtccatagcgggcagaatgccatcccttgcgccataaccctgccctatggcaataatgtgtatcgcaaggataggattgaactgcagattaaaagcagtctgccccaaaaaaagaacctctggcaacaggttatcaaagcaaagatacgcaatcaggcaatggtgctggagcttaacaatcttaggcataacgatctggatacactggcagataaagtgcaatccggtgatgtgggcaatctggaggctgtggcagcacgtatctattgggaaaggctgtttggcaaaggcttcagacgcaatcctgatctgccggggataaacagcttcctaaactatggctatgccatccttagggcaagcatgtgcagatgtatcgtggcatccgggcttatccccgagctgggcatacaccaccataaccagatgaacccctattgccttgcggatgacctgatggagccatttcgcccctacatagatatctgcatcagcatacagcagatttcggatgcaactccgctttccacaatgcataagaagacgcttatcggcttgctggatcttccggttaagctccaagacaacaacacacatatcaggtattgcattttgcacgctgtggaggattttgtgcagtccctcgtgcagaaaaaggcaagcatcactttccccttaatctgcgctgaaactgcaatatgtattaaggggcgaataaactaacaaaggattccgctatggaaaccacacttaacgggtataggcttatgtggattatggtaatgttcgatcttccggtggtggatgcaggtgaacgcaggattgctactaagtttagggactttctggagaaggaaggctttggcatgtgtcagttttccgtgtatgccaaatactgcggaccgcgcgagaaactggaaagcctatttcagaaagtgaatgcccatatcccggaaaaaggcaaagtgaatatcatcacctttacagacaaacaattcggcaacatacagataatggaaaacaacagacgccgaaacccaaaagaaaaccctgaccaattactaatatttgaggatgcagaagagtgaattatcctgaacacacaagattaaagccttgttgccacaggggcttacaagagctgtatatcactctataagggtttggtgtcaagctgaaacctaacattcccgctcccactgtcattcccgatatcactctataagggtttggtgtcaagctgaaaccatgtgcaagataatgcactgaggataggcaatatcactctataagggtttggtgtcaagctgaaacaatgcttgtttattcaaagcaattaattgctatatcactctataagggtttggtgtcaagctgaaactgattagctcctctatctacataagaaacaatatcactctataagggtttggtgtcaagctgaaacgatggcgggggatatagcatcacggggttgaatatcactctataagggtttggtgtcaagctgaaaccctgtcaccatcatagtagcgattcatccaatatcactctataagggtttggtgtcaagctgaaactctgctcatctgctgaacagctttacactaatatcactctataagggtttggtgtcaagctgaaacgggacgcctcacactatctgattccaataaatatcactctataagggtttggtgtcaagctgaaaccgaagttgtatgatatcgccaagcgactaaatatcactctataagggtttggtgtcaagctgaaacaaaagcaagccggatgggacgatttcactcatatcactctataagggtttggtgtcaagctgaaacccgtccacccacatggtgagcttgcctttttatatcactctataagggtttggtgtcaagctgaaactagagttccttgtgagtggatttcaataccatatcactctataagggtttggtgtcaagctgaaacagaggtatgggatacaataagaccgcacctatatcactctataagggtttggtgtcaagctgaaactagtccagcgcacttgtttcggtatcgagaaatatcactctataagggtttggtgtcaagctgaaactggtcggattagtaaggcttgatacgtaccatatcactctataagggtttggtgtcaagctgaaacagctttacattaaatcagaagctggtagcaatatcactctataagggtttggtgtcaagctgaaactatttatcttatggtttaagcacaactttaatatcactctataagggtttggtgtcaagctgaaacgagacaccactactatcgcatacagcctaaatatcactctataagggtttggtgtcaagctgaaactcagtaaccatcttcatgtatcgggctgaaatatcactctat

SEQ ID NO: 3712 - DNA, 5786 bp, synthetic construct
  misc_feature 1..5786: note = Synthetic
  source 1..5786: mol_type = other DNA
ttcacaattgtgcatagacaacccgatttgcatccgaaaacacaaattaatggacagaaatataagctatctatctgataaacatactgctacaactacaattccccacttttttgggggaatgacttaagaaggtctgggaggggggcaaagatgctgggaagtgaggttgcacataaaaaaagcccggcgggatcaagtcctgtcgggcagttgttggtaaaaccttattatcagcttgacaccaattcaattctgaagaatatggtttcatagaccaaaataaaaaagtatcgtagggagtcaagagaaaaatgaaaaaagattacaggcttggcatcgatctcggttccacctcactgggatggtgtatgttggaactggacaaaaacaacgatcccaccgggataatcaagatgggcgttcgcattttcccagacggacgcgaaatgaaaagcaaggaaccgctttccgtgcaaagacgaaacgcacgcgggcaaagaagaaatctggatcgctatctcgaacgcgcacgtcaactgatttcatatctattggaacacggttttttgccaaaaaatgaaaaggaacgcgcggaagtgttccaggttaatccatacatgctgcgtgccaaagctttggaccagcctctcagcccggctgaattcgcgcgcgccctcatccatctggcaaaacgccgcggatttcgcagcaaccgcaaagccctcagcgacaaaaaacacgcatattctgaagcgataaacaacctcaacgaagccttgcagagcgagggagcccacaccctgggcgaatatatgtggaaccgatatcagcaagtgccaggtggaaaacagcatcggcgtcaacccatcaagtttcgctatgaaaaaacttacgaagaccccattttccccacccgtaacatggtggaggaggagtttgatgccatctggagcgcccaggcggccttcaatcccatcttcagcgaacaacacaaagaggcgcttcatcacatcattttttaccaaagagaattgctgtcgccttccaaagggaaatgccaactgatacctgaagaaccccgcgcacccaaagcgcatcctctcttccaagaatttcgcatccgccaggatttgaacaacatccgtgccgtcaatcttttcacgaacgaaacccaggcgctgagtgatgcagaatatgaaactctgtttggcatgctcaatcaaaatgccaaggtaagcttcaaagccatgcggaaaaagctgtggggcaaacaagccgaggattggcgtttcaacttggaaacaaacgaacgcaaagagcttttgggcgatcaaacccgcgcggttttccacaaaaagggaaatgaagaccttgccgcgttgtggggaaaattggatttggacacaaagaatgaggtgattgagattttaatttccgatctcgacgacgaacctcttttgcgcggtctttttgaactgggcgtggcagctgaagcagccaccgcgttgatgaatctgagccttccagatgattattgccatctcagcgtggaagccatgaagaggattttacccttcatgcgccaaagaatgatgtattccgatgcctgcaaagccgcgggttttgaacattccggtgaatacagcggcgaaatattcgacgaaggaaacctgccctactatggcgaattgctcaaacgcgaaaccatcgagctaaaccgtgacactcatgatcccgatgccgacgctcacggcaggataaacaaccccagtgtccacattgccctgaaccagctccgcaaactggtgaacgctctggtggaaaaatacggtgttccccgcgaaattgttttggaacttggaaaagacatcaagctgggcaaaaaagaaaaagatgcaataaacagggcgaactttttgaaccgaaaggaaaacgaaaagatagacgactttttggaagagcacggccagcgtcccaaccggctcaacaggctgaaaaccaagctctggtgggaactgggggaagacgaactggaccgccgctgtccctacagcgggcaacagatagccttggctgatctttacacccacaaaacccagatagaccacatcctaccaaaatccctcacctacgacgacagcaacgcgaacaagattctctgccttgcacacgcgaaccgatataaaaaagaacgcagtccctggcaggcttttggtgaaagcctggatggatatgaatggagcggaattgtggcacgcgcgaacaagctgaaaccaagcaaaagatggcgcttccaagccgacgcgcttcaaaactttgaagaccaggaagaagtgttggcacgcatgctgaacgacacccgctatatgagccgtgtggcaatgaaatacatgtggcacgtgagcggaaacaacagggtttggactgtgactggaagacacacctccctcctgaggggaaaatggggtttgaacaccgctctgggcgaagaagacgcaaaaaacagagccgatcaccgccaccatgccatcgacgcctttgtgattgcgctcaccaccaggtcattgattaaaaacctggcttcccggattcgcgaaagccgcgagcgattcgttgaaaacctcgacccaccctggcctggattcagccacgaggattttcgcgacaaggtgaattccatcgcggtatccgtcaagcctgaccacatcaatcccacccttttggcaaagcgaaaccagaccggcggcgccctgctgaaggaaaccgcttacggctgcgccggaccagaccccaaaaaccccaaacagatgctttacaccttgcgcaagcctgtttccgaactgaaccccaaaaatgtggaaaacgtggtgaggctcgacctccgcgaagaactgcaagatatggctcaaactcgttccggagcggattttgcggaagctgtccaggcttgggcgcaaaggaaaaatataaaaaagataaaactggctctgtccaaaaaccctgccggcatggtgcccattctcgataaaaatggcagccccttcaaatatatggacactggagaaaacctctttgcggatatttatttgtcagatcccaccgatcccgacagtaattggggtattgagattgtggatatccacagtgcccatcaacccggatttctgccccagtggaaaaaagacttccccaagggaaaaaggttgatgcggctctacaaaaatgatatcattgctatagacgcgcctgatggattgcgggaactgaaaaaaatcaggaaaatgacaggtaacattatttatcttcgcgatttgtcggtggcaaaaaaaccgaaagggcaggaggatatcggcgaacaatacagccccaagcaactgaaagaaaaacgagcacgcaaagccggcgtggacattatcggcagggttttcgatcccattgtgaatgagctatgaacagtgttgtggaaataaacgctgaaagctgtggcatcagcgtatccaagggatttttgctggtgtcctgtgcctcgcgggaggaaaagataccgctttcggaaatagaagccctcatcatcaacgccagagctgccaccatcacaaaccgcgccctggcaaggctggcagaggaaggtgttgtagtggttcataatggtccaaattcgcagccggtggctttaaccctgccctgcgcggcaaacgtatatcgcaaacagcgcgtggaaagccagattgcttgcagcctccccctcaaaaaaaacctctggcgtcaggtggtcaaagctaaaattttgaaccaagccaaagtgttggaactggcaggtaaaaacagcctcgatctccaaactctggttgggaaggtgctttctggagatagcggcaactccgaggctgtggcagcccgcatctattggcaaaggctttttggggctaaattccgccgcaagccggaactgcctggaatcaacggtcacctgaactacggctatgctattctgagggcttcactttgccgtgccatcgcggcggcagggctgattccagagcttggcatccaccaccagaacatgatgaaccctttttgcctggcggacgacctgctggagcctttccgtcctttttgcgacctgatggtgtggaattggcgcctgcctctgaacgcgattttgcagaccaaagaaaaacaaagcttggcagccctgttgaatcttggcctcatccatgaaaacactgccacgcggctgcgccattgcctcacacgctgcgtggaacaattaatcagatctctggaaaccaaaaaaccgctgctaattttccctgaaatatcggcgcaaaccttggaaaaaatgaaaaccggagagccaggtgccaaatcagattcttagcggatataggcttatgtgggtcatggtgatgttcgatctccctgtggtggatagcgaagatagaaaagccgccaccaagttcaggctttttttggaaaaacagggtttcggtatgtgtcagttttcagtgtatgcgaaatattgtgggacgcgtgaaaaactggattccatcgtaaggctggtgaacgataatatcccggaaaaaggcaaggtcaatatcctcagctttacagacaaacaatttggcaaaatcgtctttctggaaaacagaaaaagaaaaaaagccaaagagaatccagaccaactgctgatattcgatgaccccaatgaatgatattttctgcccgcggaaacagcaaagcccctgcgtttgcaggggcttgcaagagcaataaatcactctatagctgtttggtgtcaagctgaaacaggagcatggtcatgattatcgaaatgcctaaatcactctatagctgtttggtgtcaagctgaaactggaagtattcggtcattacgatctgatataaatcactctatagctgtttggtgtcaagctgaaacacgtctatgcaggcggcatggtagggattgcaaatcactctatagctgtttggtgtcaagctgaaactggtattctccttcaatgggcggggcgtgaaaatcactctatagctgtttggtgtcaagctgaaacaggcgttggttgctgttctggtattgtgtgaaatcactctatagctgtttggtgtcaagctgaaacatacaaaatgatggaggtgataacatgattaaatcactctatagctgtttggtgtcaagctgaaactcatctataatcgccccggcgtttccctttgaaatcactctatagctgtttggtgtcaagctgaaacgtaacctaaaggcggtcacagtatgttctttaaatcactctatagctgtttggtgtcaagctgaaaccgtggttcatctctctcatccgtgtctttcaaatcactctatagctgtttggtgtcaagctgaaacagtccacgccgcccattgcctgaaagaaaaaaatcactctatagctgtttggtgtcaagctgaaacaaaaagatgtatggctatttcctgttttagaaatcactctatagctgtttggtgtcaagctgaaaccagaacggtgttcatgttttggtcgctggaaaatcactctatagctgtttggtgtcaagctgaaacagtgaagcgatgaggctcgtcatgcttcagcaaatcactctatagctgtttggtgtcaagctgaaactttggccttttctgttgacattatgactgaaaatcactctatagctgtttggtgtcaagctgaaaccatggtcgcaacaatgttggagtaaatctgaaatcactctatagc

SEQ ID NO: 3713 - DNA, 4732 bp, synthetic construct
  misc_feature 1..4732: note = Synthetic
  source 1..4732: mol_type = other DNA
cgaagccagatcaagtccgacttcgcatttgttggaaaatccttattaacagcttgacaccaaaaccagctttgttaatttggattctatgaacaagttttagaaactatgtaaaggagtcaagcgaaaaaatggaaaacaagaaactttcttatcgtttaggcatcgatttgggtgctacctcattggggtggtgcatgttagggctttcaaaggaaaacgaagtaatgggcattatcgatatgggtgttcgcatttttcatgatggtcgagaggctaaaacagaaacgcctctaagcgttgcccgaggtcatacagggggcagcgtcgtaatctggatagatatttggagagaattagggatcttattatctatatgacagagcatgggcttttgccagaagacaggctgcaaagagacgaagtattcaagatgaacccattgcgtttaagggcaaaagcacttgatgaggaattgagccccgctgtgttttgtagagcactcatccatcttgcccgcaaaagaggttttagaagcaatagaaaggtgctgagtgataaaaccaccaaactatccgaagctattgaaaacctacaaacacaactacaagaatacggatcaagaactatgggagagtatctgtggcaccgctacaatgagacgcccaaaaatgcaagaaacatgagcaaatctgtaaagtttcgctatgagataaacgaaagagagccgatgcccatcttccccacgcgagatattgtcttggatgagttccataaaatatgggatacccaagcatcgttcaaccccatttacactgatgccttcaaacaagatattgaagatatcatatttacccagaggccactcctgccacaggttaagggcaagtgtcagctattgccagagcatgaaagagcccccaaagcccatccactgtttcaggaatttagaatcctacaagacctcaataacctcaaagcaatcaatatcttcacaggagaaacggttttgctggatgacgatcaacacgccaagcttttacacctgctgatccacaataaggaagtcacattcaaaaaaatgcgcaaagatctgtgggaaaaagaagctgaggattataggtttaatctggaaacaaacgaacgcaaaaagctattgggagatcaaacttggatggcgatcagctccaaggcagatgaagagacaaaagcttggtggtaccaagccaatgaagagctgaaagagaaagctatcaatatcatgatatcagatcttgatgatgaacccttcttgattgaaatgggaaatctgcatgtgcctcacgctatcgcaaatacgctgcttgatgtccatcttcccgatgcttacggcaatctcagtgttgcagcgctcaagcggttaatacctcacatgaggaatagaatgatatactccgatgcctgcgcagaggagggcttttcacactcaggagatgatgtgaaggctgaatactatgaagggaacctgccctattatggtgagttattaacccaggagacaatagccctaaacagaaatacaaacgatgcccaagctgataaatggggcagaataaacaatcccactgtgcatatagctctcaaccagctccaaaaactggtgaataccctttgcatacgctatggcggaccaaaggaaattgtgttggaattgggcaaggaattgaagctgagcggcaaagaaaaagatagaatcaaaaaacgaatgaaccaaaacaagaaaatcaacgaagaaatagatagtctgttggaaaggaattatcaggatattaattatgcaaacaggctcaaagtgaggctttggcaagagatatccccggaagagatagatcgccgctgcgtctatactgggaaacaaatcaatatcacggatctcttctctcctgccatccagatcgatcatatcttgcccaaatccaaaacctacgatgatggcattgccaataaaatcttatgttatctggatgcaaaccgctataaaaaagaacgctctccctgggaagcatttggacacagccaagacggttataactgggaagaaatccaaaggcgtgcccaaaacttgcccgataacaaaagatggagattccaaaaagatgccatggaccgttatgtagataaggaagaactgattgccagaatgctgaacgacacccgctatatgagcagagtagctatgaagtacatgtattatgtaagcggcaaaagcaatgtatggagcatcactgggcgtcacacggctttgctcagaagcaaatgggggctcaattcggttttgagtgaaggtgaccataaggaacgtgccgatcacagacaccatgccatcgatgcttttgtaactgcgcttaccaccagatccatggtaaaggggattgcagatagtattgagaaaagcgtggatcgttttattgagcaggtgccagcgccgtatacaggattttcatgggaagattttaaaagaagagtgaataccattgccgtatcccacaaacctgatcagcccaatcccagaaagctaactgcacgcaaccaaacggcaggtgctcttgcaaaggatacggcttacggattcgtacgaccggataccaaaaatgataaatacgcattcttttccaaacgcatcgccattgaggatcttagtataaaagatattgaaaagattatcgaccctgacatcaaacaagccttgctcaaaatagccgatacatatggggggaaaccaagtgaatttaaagatcagctttcccagtggggtatggcaaacaacgtgaaaaaagtaaaaacagaattcagagcctcattagataccatgattcccgttgctgacaaaactggcaaaatatataaatactaccaatccggtggaaatctctttgctgaaatctatctcaaagaccccaccgatcccaagtgtatgtgggagatggaaattgtctccatgtatgaggcgcatcaaccagattttgctccccaatggaaaaaggattatcccaaaggaaaaaagattatgcggctctacaaaaacgacatcgtggcctatacaaacgataaaggaatcagagagctgcgcagagttaaaaaaatgtcgggagaaatcgtttatttgcgtgagatatacgtggcaaaaaaaactaaagatatggagaatattagagaacaatataatcccagagccttaatgatggctaatgcagcaaaggcaggaatcgatatcatgggcagggtgtttgaccccaaggcaggcagtgtggatgcagatactggaaattgataaacagaatatcagaatcagcgttagcaaaggctttgtgactgttgaagataaagccgagcaacacaggcatcccttggataatattggctgtataattgtcaattcctatggtgcccagttttcaaaccaaacgctgatacgactcgcggaagccaatattccgcttctaatatgtggtaacaacgccatgcccatcggtatgctgctctccacatctcaaaacgtgtatcgcaagcaaaggattgaaacccagattaaagcaagtgtgcctttgcgcaagcagctatggcaatctatcgtcaaagccaagatctcaaatcagtcaaatgtattgaaaaagctgaaaaaggagtataaggatatggtgctccttgccacgaatgtgcgctcgggagatgccgataatagcgaggctgtggctgccagaaggtattggaacaggctgtttgaagagtctttcaaaagagatccagagctgccgggcatcaatgcctttctcaattatggctatgcaattatcagagcggcaatttgcagagccattgtgggcaccgggcttttgccggaactgggagtaaatcatcgcaatatgatgaatcccttttgtttggcagatgatatcatggagccctttaggccatttatagatataaaggtccatgctcttgccacccaaaaccatgatgcacttacacctgccatcaaaaaagaactgatatccatcctcaaaacccagattaactttcagggaaagagggtacacttggatcaaagcatgcttaccattgtatatcaatttatcgaatctctaaatcaaaaaaagcctcttcttcaatttcccattttagagtgaatgcttagcggatacaggcttatgtggatgatggtgatgtttgatttgccggtgacttcggcaaaagaccgtaaggctgccaccaaatttagaaagtttttggaaaaacaaggctttggcatgtgccagttttccgtatatgcccgcttttgtggttcacgggaaaaaacagattccatccataaaaccatctgtgaaaacataccagaaaaaggcaaggtgagtattatctccttcactgataaacaatttggatccataatccatctctatgatagaaaaaggaagaaaaagaaaaataatcccgaacaactgctgatattctctgaagatgatgaggttttagattgtgattaaccccataagcggttatcctttatggcacttatggggccaacacaatatctaaactggttttggtgtcaagctgcaacttgcacgccttgcttgacgttgatgtccggacaatatctaaactggttttggtgtcaagctgcaacctgcctcgtggttgtcacgaaggacggtgaacaatatctaaactggttttggtgtcaagctgcaac

SEQ ID NO: 3714 - DNA, 23141 bp, synthetic construct
  source 1..23141: mol_type = other DNA
  misc_feature 1..23141: note = Synthetic
cccccagccgacaccaaaaacccgcaaacaccaacaactatcccaacgataacagtagccaattcggcctcccagacttattcaactgtctattatgtaactaatgcaaccatacatgacggcccaaatcgaccactccattctctgtcatcgcgaggagccgaaggcgacgtggtgatctcaaagccgacgactttccacggaccgtccaacgcataaaccttctacacctgtcatccgccgaagacggacccagagaacgcaacgccagccgcagcatcacacacacctatataccacgcccccaaaacacatgcacgccaaaaaacgcgagcgtcgactcaggttgtcatcccggaccccgatccgggacccagcataaaaaaaccgtcgcgaagcgactccacacgagtccccacgcaacgccagccgcaacactccacccccaatataccacgccaatcacccacaagcacgcccaaaaaacgcgagcggcgacccagccgcgagtccccacaaaacgccagccgcaaaacattacgcctcacccaccgcgccgcatctcccgcaactgctccaccagccgagcacgcaccttgctcaaaaacgcatgataccgcccgcccttgtaatccggaaaactgtactcaaaccccagccactcacctcgccgataccccagcgtaatctccgcatacatcccctcgccgatataaatccgatgcgcaaaattcttcgtcgacgccagcaccagcttcgccggctccaagtaccccggatccagattcacaggccgccccagctcacccccgacctcatccgccagctcccgctccatatcgttcgccgcatgctttatccccgcaagcctccccggatcgaccagctcacccacactaacgaactgccgcaaaggccgctcccccagctcgtcctcataatatcgcgtctgatcgaacgcccacacctcgctcacaaaatccagctccccgaactcgtcctccacccgctcccgcgcaaagcgcagacactcctcatccgcccccaatatcccaactatcaactttaccggctcaggccgaccaacttcccacaatctctcacctgcaaaaaacaacagcatcactcaaaaaactgtcatccgccgaaggcggacccagcataaaacagccctcgcaaagcgacttcatattttaaaacgtcaaccgcatagcgcaaagtctgtcatcccaaacttgatttgggatccagagaacgtaacgccaaccgcaaaacgaattcgataacaacagcacgctaaccaaacgcatgcagccaaaaacaaaacgcgagcaccaacccgacgcccgccatccgccgcaggcggacccagagaacatcactagcacgcatgcacgctctcaacagcatcccgctaacgcgcccagcaaaacaaccatggcgcaaaaaacgcgagcggcgacccatgttgtcatcccgggcttgacccgggacccagcataaaatagctgtcgcgaagcgactccttgcgagtcccccccccgcatcctaaccaacctactccttcccctccgccagctcagccttcatcgtcttcaccagcccagcaacctcctcgctcgccttgtccagctccatatcctcacgctcactcgccgtccgcagcttcatctcgaccttaccatccgccaggctcttcttcccgatcgtcacccgcaccggtatccccagcagatccgcatccttgaacttcacgcccgcacgcacatcacgatcatccagcagcacctcaacccccgccgccgtcaactcgttatacagcttctcgcccgcttccacgatctcgtccgtcgcaccggccagcgtaatgatcacctcccacggcgcgatactgatcggccagatgatcccgttatcgtcattgcccagctcgatcgcactcgccatgatcctgttgatcccaataccatagcatcccatcaggcaaggcttctcaaccccgtccgcatccaggaacttcgccccgagcttctcgctgtatttcgtgcccagcttgaacacctgcccaacctcgatcccacgtttgaacttcaaaggcttaccgtcatacgtatcaccctcaaccgcgttccgcacatccgcaacctgtaccttctcgccctcgatcgcaaagtcgcgccccggcacaacattcttcacatgatagtcagtcttgttcgcaccgctgatccccgcgcccatcgcagcaacccccggatccacgaacacccggctcacgttctcagccagtcccaccggccctgcaaacccaaccgccgcacccgtcacatcgaacaccgtcgcatcgtccgccatctcataaccgaccccgcccagcaactgcgtgatcttctcgtcgttcagctcatgatcgccccgcagcagaacgcccacgacttccccctccgccgtcttcagtatcagcgtcttgatcatctcgctcgcctgcgtcttcaagaacctgcaaacctcctcgatcgtcccaacgcccggcgtatgcacatcctccatcgcacccacatctaccgcctcaaccttcacagggggatcgaccggcgccttctcgatgttccacgcccgcccgccttcttccgtataaacgatcacatcctcgccgttctcacagggcacggtaaactgatgcgacccgcttccgcccatctcacccgtctccgcctcgacgatcacataatccacgcccgcccgctcaaatatcctgcaatacgcatcatacatttccatatacgtcttctgcagacactcatcgtccggatgaaaactgtacgcatccttcatgataaactcacgcgaccgcagcacaccgaacctcggccgaaactcatcgcgatacttaaagctgatctgatacagattcaacggcaactgcttgtacgaattgatctcgctcgctcccagaaacgtaaacgcctcctcagccgtcggcgccagcacgttcccccgcccgtgccgatccgtaaacgtccccagcgtctcaccgtaatccacgtcccgacccgtctgctgccacagctcgatcggatgcacacacggcgcaagactctcctgcgccccggacctgtccatctcctcccgcacgatattcatcaccttgttaagcacccgcatacccgctggcagatacatatacgtcccgctcgcgatcttccgcatcagccccgcccgcagcatcaactgatgactgactatctccgcatccgaaggtgtttccttgaccgtaggtataagtgccttgctgtaacgcatgaattctccttgcaaaatcaaaaacggaccgcaataacccggccccgaacatagattcaatactatataaacgaaaaactaaaccctgccgccgaaacgacatacaaacccagaatatagccccaaaaccccgcatttgcaagccaatactcccacatccagcccccaaaaccacaacaaaccgaccccctcttttcccttttgtcatcgcgaggagcgaagcgacgtggcgatcccaaacatccaataaagctggctactccctcaaacgcataactcatccgttatcatcccactcagacaggcccatagaacacaacacaaaccgcaaactaacgcaataacagcagcacgctcaccaaaagcataaagtcaaaaaaacgcgagccccccccggttctgttatcgcgagaagccgaaggcgccgtggcgatctcaaccgtacaataaagatagctcgtcctaagccacattaacccgacccctgtcatccgccgcaggcggaccaagagaacacaacgagtgcgcatgcacgcccaaagcagccacaagcctacccaccccgcagaacgaccatgtcgcaaaaacgtaaaaacctgtcatcgcgagaagccgaaggcgccgtggcgatctcaaccgtacaataaagctagctcgtcctaagccacattaacccgactcctgtcatccgccgcaggcggaccaagagaacaaaacgagtgcgcatgcacgcccaaagcaaccacaagcctgcccatcctatataacgaccatgtcgcaaaaacgtaaaaacctgtcatcgcgaggagcgaagcgacgtggcgatctcaaacgttcaataacgctggctcgtcctaagccacattaacccaacgcctgccatctgccccagacgtacccagagaacaaaacgagcgagcatgcacgtccaatacacccacaaccctacccgccccgcacaaaaaccatgacgcaaaaacgtaaaaacctgtcatcgcgaggagccgaagacgacgtggcgatctcaaccgtacaataaagctagctcgtcctaagccacattaacccaacgcctgccgtccgccccaggcggaccatgagaacaaaacgagcacgcatgcacgtacaaaacagccacaaccctacccgccctgcacaaaaaccatgacgcaaaaacgtaaaaacctgtcatcgcgaggagcgaagcgacgtggcgatctcaaacgctcaataaagctggctcacccataacaagaaaacttctttccccttctcacccttcatgaccttcgcgttttgtgatgaaaacaccaaaaaaccttgacaaccacgacacacaaaagctatattgcatccactacaacaaaactcaaacgaggagaaaatatgaaatcatccatcgccgtcactctcataatctgcggcacttttcttatcacagttccctatatccacaacgacttggtcacacacctggtatcacagtcagcgacccagcttaaaaaggacattaacgttcgcatttcagcacctatgcccgaatacgcagatacagcctgcatcctcggcggaatcacaatgatcctgataggagccgccgctggcatcaaacaaaccctgcaaccgcaaaatttaaatgaaaaccacccgcaaaacccagagtcaacaaatgcctgaacaaaacaatactcgcaagctcaccaagatcaccatcacgagcagaaaacagaccatcctcccagtagccctcatcctcgccataacctccaccgcccacgcaaactccggcacaccgctcatgtggtccagcttcctccacctgttcttcggtaatcttttcctgggcatcttcgaaggcctcctgctcgtccattttttcaaaaccaaaaagaacctcgccgtcatcctcatgatactggccaactatctctccgcctgggcaggcgtttttataatatacgatttaatacccacccagtcactcggcctctcgcaggtctggccctacttctggaaaatggtcgccctcacctacattctcacgcttttgctcgaataccccttcgtcgccctcagcttctggcgcaaaccccgctggctcccccgctccctcaagggcacgctcatcgttcaaacaatatcacattttataatcttcggctggtattcactcacctcaactgcaaacctttataccgataaccagatcgtggatttatccgaaatgtccctcccccagcacgtcactatgtattatatatcctctgatgacggcgatgtatactctcgttcactcaccgcggatgccgcaccctccaaaaccttcgacctcaactccaaaggctacggcgactacctcttcgtccgccactcagaaaacaacgacggcacctatgacctctatgcatgcatcacgtccgacaaggactaccgcgactcagaaactatactcatcgccgagtcattcacaaaaaccgccgccccgaccgaacgcgacctcgaacatgacctcgaagagtaccgcacacgctattggttcagcccgacagatgtcccgaaactcggaccagcccagtccagcccttggaaatttaaaacaagcatctggtccctcatgggcctcaccgcaaagaacacaaaaaccgagcaaagcgaaagagtcgccttcaccacacccttcggcggctggctaccaaaaaacgcaacccacctccccacggacaaggcccttttccaactcggcatctaccccttcaacctcaagtatctaagaggcgaccagatctgcatctacgaccccaacaaaaaacaactcgccaaaataacccacggcaaaggccccatcgcgatcataaaagacaaaccccaaaaaccaaccgctaccccgacaaacacaacagccgattagcaacatatccgaaccaacccgacgcgacggcccaactaattttgtcattgcgaggagccgaaggcgacgcggcaatctcaaccgtacaacaaagctggcccgtctcgcaaacgcatccctcacgcgttatcatccagggcttgaccagggagccgacatagaacagtcctccttgtcatcagcctttgacggacccagcataaaacagcatcgcgaagcgattccttattaaaaaaccgagcaacattaaaagtagaagtttaaaactactttttacaaagcgtttttaatatatcggcaacacagtctgcgattttaagactagcatccggcctagctatttttatagagtcctcccccatctgctcacgaagtttataatcactcatcagcttttcaagctgtataaaaagttcatcagccgtttttatattatcatcgggccgatcatcaactataactgccgcgcccgcgtccaccagtttctgcgcatttaaatactggtgcttgtccttatgatacggataaggcagacacaccgccggaaccccgcacgccgcgtactcagccacactcaccgcgccggcccgacccaccagcagatccgccgcagcatacagctcccccatctcatcgcagtagtccagcaccttacattccagcggctcattttcgtagtaaccccttacctcatcatagtttgcgcgccccgccaggtgcacgatctgccactcgtccgcaaattttcccagccgatacagtatccgcgacatagccttattgatattcacgcacccgctcgaagcccccgtaataagcaaagtcttcttgcccgcatccagcccgaacttctcataagcccttttcttatagtcgtttatgtagggtggaccatgtccacgagacgtatcgccgccctgctgatccttcgcgtccgcacccgcattactcccctgcgatgtgtgcgatgagttctgcctgcgatgtgcgccgcacgcctccagcaattcctcacgaagcggacagccggttacttctattgtggcattggtcttaaaatattttgcggaatcttcgaactgaacgaatatccgctgggcatacctggccagaaaacggtttgccttgcccggcacaaggtcggtattgagcatcaccacgggaatgctaagtcctttagcagcaagcactaccggcgcagaagcgaatccgcctacaccgatcacaaccgaattctcgcgcacggacctaagctggcacgtcgcgaatttgcgaccctttaccagcgaaaccacgaatttcgccatatcaacgggccgtgacgacaacccccgggcctccaccggcgtatagctaaaccctgatttagaaaggatttgcgcatcgatatctcgggtactgcaaaagaaatgtattttcgcgtcaggatcgatcttcgcaagctgctgcgccaccgccagagcgggatagatatgcccgccagtaccgccgcccgcgaagaaatagtgcctgacatccccctcagccatcacacaaaaccccgttttcagcattgccaacgctcttttgggtggtgacccaggacctgtcggccagagcggaatctgacgtaagtctttccccggcagaggtttgtcgtgcgatgttcagcagcacgcccaccatcgcagcggtcagcagcatgctggtaccgcccgcgctgatgaaaggcagcgggatgcccttggtgggcaaaactacggttacgacaccgatattcagtgcggcctgtatggtgatgctaagaatgataccggtcgctaagagcttaccgaacaggcacttacagcggcataccagaatgattcccagcaccagcagcagcgcgaaaagcaggatgatgcacacgccgccgacgaatcccatctcctcgcagatgaccgcgaagatgaaatcggtggtgtcttcgggcaggtggccgtacttgaaaatgccgcgaccgaaacccttaccccatatgccgccggtacttatggcgatcagagactgcctggcctgatgatacatctggtcagggtccagaaaccgcgttatgcggttgatacgggtgggtgagctcatgatcgcgtatgtgaacatgggcacaacaacgggtaagggggtgagaaaatgccaccatttcgctcggccggccagcagcatcaggaatgcaagaagtgctataagtgctgctgtgccaaagtcttgcgtcacgatcagagcacagacgatacccgctacaacacagagcgggacgaagcgtttgaaatacagactcatactgtcgcgatagcggtccaggaaggctgcaaagaagaatacgactgcccattttgccagttccgagggctgaaaactgacggctgcggggcccaacggcagctccagccagcggcgggagtagttgcgttcgacgcctatgccggggattagaactaacgtaagtagtgctatagcaaggattaacagatatggagtgaatgaccgccaggcgcctgcgcgggtgaagctgaagcggcgataatcgatgtatgaggccgtgtacattaccgcgacggcgagggggaaaaagagtatctgctttagtgtagtgaatttgtagaattgagataagtccagctctgaactgaggttagcgcccgctgagaatacgaaggcggtgcctgtggccatgagaatgagcacgaccacttcgatatagaacgatattcggctggagggagcgattttcagcatgtcttcaaggattatgtcggcataaatgcggtttgaacagcaaaaaatcgggaaacagggctgaaaatcggtgagttatcgggctgtcgtgttttttttgggcggatcagggcagttgggctgctgtggtgctcgcctgggtggtgttttgtgtcgcgtttggttgcgttttgcggtcgaaatgggggtgtaagtatatttgaggggcagatactgtcattttgtgcggggttatggtgtggaaatatgtagactggtttggtgcgttttgatcttttggatgtgtttcgggctggatcagtatgcagtttggggcggttttgggcttgtgggggatattgcccagtgaggcgggttgaaatgggggtcggctgggaaactgtgggtatttcgctcttgaaaaatgggtgttttcctccttcggatttgggtaaaagtgccgagagtggacacctggtaaataggacattgggtgaaatcggctgatttcgggtgattttgagggggcaaaagtagggtaaaaacgagcaaaagtggtatataggtggggtaaaaatggggtaaaagtgggcaaaagctgacaggctgtttcctacctgtcaagtgggagattttttaaagacagtttttaccacgaagggcacgaaggagcacgaagaaaagggctggagggctgttttatcaataatgagaatcatgatcaacacggggtaggggtttgggattttttgggatgaagtgttttggagtcggtgtgtatttttttgttttttcgtgtttagttatgagtgctaggtgggcggttggatcattttgcgtgatgaaacaaaaaaagcgcctccccgaagggatgcgctttaggttgctccgcagagcgcccgccggagcgggctgccttcgacttttctcttgttatgaaaagaagcaggccgagattaattacactattggtattaaaccggatattgcttgaatttgcaagggaaaaatgtaaaatcaagtagattttattttatttggaatggagacttctttatgggttatgtgcttggacttgatctgggaccgacttctatcggatgggcggcgatcgaggtagatgagaatgaacggcctgtcggtttgttgacgctggatgacaatggtgagaaggttcctgcgatgggttcgcggatatttccggtaggagtcattaattatggtcagggtaaaaaaagggagcagtccaataataagaaacgtagggataaacgttcggtcaggcgaaggcttaggcgggcgcgggcgagacggctgaaattgatcggactgctaaaatctcaaggattgcttaacgggcagccggtggatgaggtgcagcagatggatccttatgaattgcgggcgaagggtgtttctgaaaaacttgagccggaggaatttgcgcgaatacttttgcactttgccaagcggaggggattcaaaagcaatcgcaggaagccgatcgatgaggacgccaagggaacggacatgaagaaggcgaaggatcggctggaggcgcagcttgacgggcagacgctgggggaattctggtatgacaaattgagtgatggatcgtcggagccgatccgcaacaggcgggacaattttaagtggctagctcaacgtaagcattaccaggaagagctggggcgtatatgggcggtgcagagtgcgcattatccggagatctttacgcacggattttacaaggagctggaagggatattgttcgatcagataccttttgaactcacgaagacgaaaaagaagaaggtgatcggtatgtgttcgctgatgcccggcaaggttcggtgcggatactcggaacggatcgcgcagaagtttagaacgctgcagaaggtaaacgatctacgggttgaggatggcaaggaatcgcgggatctgtgtgacgctgaacgagaggtgcttgttaattcgctttcggcgagtaaggacaagtcttatgaagctatgcggaaaaagatttggggcaaggacgcggattatgtgaagctgaatctggagtatcggcctaaggaaaagatcaggggcaatgagatagattcgatgatggtgagcgcatcattttttcagaagaaggcgtggctgggtttgacggagcagcagaaggatgaagtgtgggggttgctgcggagttacctggatgagtcattgagtgcggatgatgtcgaagcgcgtgtgggtgagtatggattggagttcaagaaggacaactggacggacaagctgaaagaacctgtcgggacgtgcagttacagcaaggcggctctgaacaagatcgtgcctttgatggaagaggggaaggacctttatacggcgatacaggaggcgggattgtcgaagaagcatgagcagcacggattgctgccggtgccggacaaggcgcatggctttgcgatacctaatccggtggttcagacggtgatgttccaaatgcgcaagatagtgaacctgctgatcaaggaggtcgggccgcccgagcggatcgtgatagagacgacacgcgaactgaaagccagcaaggagagacggcaggagatactaaagaagcagtcggacaatttgaaggacaaggagaaggcgaaggacaagatacgggagatgagggggtggtcggatgatgtgcgggtgtcgaatacggatgtgatgaagtggcgtctgtgggaggagcagaaccattattgtccgtaccgttgcaagaagataactttgggggaggtgctgtctcgcgaggttgagatcgatcatatactgccctactcgatgagccttgataatacgatggcgaacaaggtagtttgttttgcaggtgagaatcaggagaaggggcagaatacgcctatttcatggctgggggagaacagcgcgaagtggcggaagattacggaggcgatgagcaggaactcgtttaatttttccaaagagaagtgggagcggtttggtgtgctcaacgaggagatcgaggagaagtatcagcctgagaggttgatccgggatacgtcatatattgcgcgggaggtgagggcgtatctgaagcggctgtatccggcggattacgcggatcagagtgtgcggacggcgagcggcaagataacttttgaattgcgaaacctttggcagcttaacgcgatattgcgggacggggagcttgggccgaagaatcgggacgacctgcgacatcatgcggtggatgcggcggtggtggcagtgacgacgccggggatgatccagcggataacgagggtgctgcaggacaactggccgaagaggcccaagtatgcagcgatagctgagccgtgggagggatttggcgaggagctcgcatcggcggtggagaaaatcaatgtgtcgcatcgcgtgcagcggaaggtaaagggagccctgcatggtggaacacactacgggaaaattgcacatgggttgcatgcaggcaaattcgttacaaggaaaaatctttctgacattacaaaaacttctgccgagaacatctgcgatcccgagatacgggacatggctcttgctcggttaaaagagtacggcggaaaggcgaaagatgcttttgcgaagccgttgaagctggagaataagaatggcgagccggtgccggttaagaaggtgagaatatgggaaaacagcagcaatatgataaagttagagagaagcaataagaacggaaattcgttagataattctgtatgggttaaaccgggtgaaaaccatcacgttgagatatttgtgcacaccgtaggtggcaaggatgaatacgtttgcaaagggtatactatatgggaagccgggcaacgtgtgaaaaacaagcaaccgataatttctagacaacatcctgactatccagaagccagattcattatgtcgctgtccaagcgggaatcactcgttatgaaaaataagagcggaacagctagaaaggtttttgttttaagtatctcgacgcagcctacctttgacatggaagtgcgtccgctgtctgtgggtgatgtgaggaacttgagtgataaagaaaagaaagcattgcgtagagaatggaggcttcagtccttgaaagcactgaaagagcgtttgatgcaaaagattacgctcgatccattggggagggttagaagagcgggtgattaaacgtgtagttgagatatcatctgcacggaggcatttatcaattaagcacgagcagcttgtcatcagcgagggcaggcaggaatgcgggcgcattccgtgcgaggatatgggggtgctgctggtcgatcatccggcggtcacttacacgcacagcgttttcacgaagctgctggagtgcgggtgcgcggtagttctgtgcaacggcaaacatcatccggtggggatgcttctgcctatcgagagcaatacgctgcagtgtgagaggtttcgtaatcagatcgatgcgaagaagccggtgaagaaaaggctttggcagcagatcgtgcgtgcgaagatactgcaccaggcgaaggtgatctctgaggacgagcttgcggtcagcgcactaaaggggatggcagagcgggtgcggtcgggtgatccggataatgtggaggcgcaggcgagcaggaggtattggggagtgtttgcggaggggataaaattcaaacgtgagcggttcggggggccgccgaacaatatgcttaattacggttatacggttatgcgggcggcggttgcgaggtcgctctgctgtgcgggtctgctgcctacgctggggatacatcatcgaaacaagtataatgcgtattgtcttgctgacgatctgctcgaaccgttcaggggttttgtcgaggcgagggtgcgggtgatgtgcaatgaatttgaagaggttgaggaactaacgcaggagatgaaggctgagttgctggaggttctttatgagcaggttgagatcggtgggtataaggggccgttgatggtgggtcttcatcggacggcagcttctttgcagcgtgtttttgcaggagaagggaaatgtctggaactaccgaaaatcgaaatttaagcgggtacagagcagtgtggctttttgcgatgtttgatttgccgacggataccaagagggcgcggaaagattatactattttccggaaaaggcttatgaaggacgggttcgccatggtacaatattctgtgtatgttcggcactgtgcgagtgaggaaaatgcccaggtacattacaagagagtcaaaggttttttgccgcccgagggtgaggttcggctgcttcagatcacggataagcagtacggacggatggaaattttctggggtaaaaagcgcaaaccaaccccggccgcgcccaaacagctcgaattattttgagctgggcggccgtaaggtcatgtctgacagcgatttacggattagctagtgtaatcaatcccggcctgctgtcaaatcacaacttcggcactggagagtgtgtcgctggacggagtgtaatcaatcccggcctgctgtcaaatcacaacgctagtgaagatgaaaagttcaaccaacttagtgtaatcaatcccggcctgctgtcaaatcacaacggaaatgcgagaagcggcagcggaaagtatagtgtaatcaatcccggcctgctgtcaaatcacaactggtgggtcggtgtcagtggtaggatcttgagtgtaatcaatcccggcctgctgtcaaatcacaacgtcaatccagtcgctaacctcgccgtccgaagtgtaatcaatcccggcctgctgtcaaatcacaacttttcgggtaatgctatggggggggttatcggactgttgggttttggggttggttggggagtctggttttgcgggggtttaggtcctgtaatttttgggctggggggtgttttgcggggtttcgttgctgtttttgaggtttttggggttggtttgcgcttttgggggagaatttgtggtgaagcttggggttgggaacgccgatgcgaggggcacgtaaacaggttctaatatggagataagaaaaatgaatcaggttgaaacaaacgaacagagaagggaagctcgtctgcgttacagttggccggtatggtatgcggaaactttgagcgatatgctggcgcagggtcagatggtggacgtatcgagtcagggtgcggcgtttacgtgttatgccgatcgttgtccgaaggacggcgataaggtgacgacgcggttttcagtgccgacgtgtgatgcgagcgatccgttcgacctggaaagctttgtacgcgaaggcagcgtttgccgggtggaagagctttcgccattcgttcgcaaggttgcgatgcagtttgcggaaccgctgccgttcaatccggcagatgcaccgaaggacggcctgctcgatgaggagttggagacgatatagaagctgcttcggaggagcgagcgccgtcgcaggagggttctttatttgggagctgaggagaaagcgactggcgcattagttgagtgttgggtgaggcatggtcgagatgagggccatgccgttttttttgcgcgctgcggggatggtgttttggggggcgtgggggctcgcggctatttcaccacaaaggcacgaagagcacgaaggaaggtttaggataaaatattgagtcgcttctcgacggctattttatgctgggtccgcctgaggcggatgacaacctgagtcgccgctcgcgcttttttgttggctgcatgcgtgctcgttgtgttctctgggccccggctctgaggccggggtgacaaaggggggggcgtacatccgctcccgcaacattctctgggtccgcgtgcggcggatgacaggcgtcgggttgtgcggtttggggacgagccagctttattgtggggttgagactgccgcgtcgccttcggctcctcgcagtgacaatgttggatgatcgcggctaggctgtcgttcgaatttttggtttgcggttgtgcggcgggcggctattatggggggcatgatcgagaaaggactggtacagatatatacgggggcgggcaagggtaagacgacggcggcgtttgggcttgcggtgcgggcggctgggcacgggaaccgggtgctgatctatcagtttttgaagccggactcgctggtgctgggtgagcggaagtcggcggagaagcttgggatcgaggtgcgggtgctggagcattgctgggatatgcggcggtcgctggatgatgcggcggcggtggcggaggtgcgcgaggaggtcggtgcggtgctggcggaggtcgggcggctggctgcggagaaggcgtacgaggtgatcgtgctggatgagatcgtgttctgtgtgaacagcgggctggcggagtttgcggcggtgaaggaggttgtcgagcggcgggcggatggtgtggagatcgtgatgacggggcgaggtgcgagcgaggagcttattagcgcggcggacctggtgacggagatgcgggaggtgaagcatccgttcgagcggggagtgggggcgcgtaaggggatcgagttttaggcggcgcggtttgatggcacgttctgctggcggaagtcgagccagctttattgtacggttgagactgccacgtcgctttgctcctcgcagtgacaatactgggggctcgcggcttaggcgccatggttgttttgctgggcgcgtctggcggatgctgttttggacgtgcatgcgtgctcgttgtgttctctgggtccgcctgcggcggatgacaggcgtcgggtcgatgcggtttggggacgagctagcttaattgtacggttaagactgccgtgtcgcctttgactccttgcaatggcagtggggtaagtgtattttcgttttggttgacaggttgggggcggcgtgttagtttttattttgctttggtgggtccggttttgggccgggccggttttggtgctaataatatgttttggggacagcagggatgacgcagttgactaatgaagacgggcgggcggagatccggatacgcagggcgatcattgacgatctggcgccgatattttacctgggggagaagctgtttacggcgcaggattattcgaatctttatcgcacgtgggatgagtatgaggttacgcatctgttcaacgtggacagcgattatatgctggtggcggagtcggacgggcgcgttgttgggtttgcgatggggacgacgatcgagaagacgcggacggcgtggaactatgggcacctgatatggcttggggtggacccggcgtatgcgaggcaggggatcgcgagtcagttgttcgatgagtttcgcaagctgatggaggatgcgggggtacggatactgcttgtggatacgcaggcggacaatgagaaggcgatcgggtttttcgagcagaaggggttcgtcaatccggtggaccatgtgtacatgacgttaaatcttgagagtgagaagtcctgatgagtgaaggcaaggtgcagatacaggcggatcggctcaaagagctgatgcgggatatggtggatatttacagtccgtccggcaaggagggtgagatcggggagtacctggcggggtatctgctggacaagggtctgccggtgacgctgcgggaggtgagcgagggcaggcggaacgtggaggttgtgttttcggacaagcgtcctgagatcgcgttcatagggcatatcgatacggtgcccgcgtatgatatcgagaactatgagtttgacgaggaggacgggctgatatacgggctggggacggcggatatgaaaggcgggtgcgcggcgatggtggaggcgttcgtggcggcggtcgaggcggggatgaagcctgagcgggctgggctgttcctggtggtgggtgaggaagagacgagcgacgggacggcggcgctgctggaggcgaggtcgtttccgtgggcgatcatcggggagccgacgaatcttgtgccgtgcctggcgcattacgggtatatggagatgctggtgcgggtattcgggacgcggaggcatgcggcgacggcgggcagagagtataacgcgatattcagtacgctgcggatgctgctgaggcttggcgggatcatcgaggcggagcatccggaggcgatcctcaatatacgggacattcacagcagcgaggccgggtttgctgtgccggggagctgcgaggcgtgggtcgatctgcatatcccccctgccgcgaatcctaagcagttcgcgagtgagctggagaagatcgtgcgggagagtctgacgggcggatcggtgacggattatgagatcgattttccgctgctggcgaaggggtcgcgagcgagcggtgcggggcttgtgccggaggtgctggagaaggcgtatgcgggcgaggggatggaatggcatccgggggcgttcaagagtcattcggatgcgaatctgctgtgtgaggctcagtgcgagacggtgataatcgggccggggcagttggagaaggcgcatacgcgggatgagagtatttcgtttgagcaggtggagaaagctgctagaatatatggcggggtgctggagaggctgtgagataatttttgctggaggaacatcatgagatgtcataagtgcggggctgagacggggaacgataatttttgttctcggtgcgggatagagctggagcatgatacgttcagtgatgctgcggagccgataccgcctgagcatgcagaggcggggatgggggaccggcggcgggtttcggcggttgctgttgtggggttcttgcttgggctgggggcgttcgtgatgcttttcattgacgttgcgtggttctggtgcgcgatggctgcggcggtgcttggggtagtggtcagtgctgctggtgtgaaggttacggaggcgaacaagcaggtgctgtcgggtaagacggcggcgtggatggggattgcgctgggggcggcgttcgtgctgatgtgcggggcactgatcgtgctgggggtgctggcgccggtgcggtaggggcggacggcaggcgaggcgttgatggcgatggcgatacgtggggactcgcaaggagtcgcttcgcgacggctatttcatgcttggtccgcgtgaggcggatgacaggcttaggtgccgctcgcgttttggcgccatggttgtattgctgggcgcgttagctggatgctgtggagagcatgcatgcgctcccgccttgttctctgggccccggctcggaggccggggtgacaaaggggtgcgtacatccgctcccgcaatattctctgagtccgcctgcggcggatgacagacgtcgggttgtgcggttggagaacgagctagttttattgtgcggttgagactgccacgtcgcttcgctcctcgcagtgacagaaccggtcgtttggggctgggtgtagagaactggcggtgtgtttgaataaaaagggtttgttggggtggatggggtgaagttggggtttacaaatgcacggggtgcgtatatctttaggcgtagtttctgtaagcccttttgaggcctggattggggttttggtgccctttcgggttttgggctggcgaattttgtaaactgcggcgaaatggagaatttgcagcatgaagaatgtggcggttataatctgtgcggctggggccggtaagcggttcgggggtaagacgaagaagcctttcgtgaagatcggcgggcgggcggtttttctgcggagcgtggattttttcgtcaatcatgaggcggtcaagcagatcatactggcgatatcgccggaggatgaggagtcgatcaagatcaatttcggggcgacgctgggcttttgcggtgtgcaggtcgtacatggcggggccgagcggttcgagacggttgagaatgcgctgaaggaggtgcgggaagatattgacctggtggcggttcatgattcggtgcgttgctgtctgaaggacgagtgggtgtcgggcgtattcaaaaaggccggcgagacgggggcggcgatgctggcgtgtccggttgtggcgacgatcaagcgggtcgagggggacaagatcgtggagacggtggatcggcgaggattgtatgaggcgcaaacgccgcaggtgttcgaggcggggctgctgaggcgggcatatgagaagctgcacgagatggataaggcggcgataagtgacgatgcgcagttggtggaggcgctgggcgaggcggtgcatgtggttgagacggattcgacgaacgtgaagatcacgaagcaggcggatatggagattgcggagtcggttatcaaggcgcgggataaggcgaaggtcaagaagacaggaagtccgttttttgaggcggagtggtaaaatccggctatcgggcgcagcttttcatgatattgggcgcggtttgacgataaattgtactaaacagcttctaatgtgggcggttttgcggtgtttggcgtgcgggctgttgacatagtggtgtaagatggtatttttggaatatatgaaaatcggctgatgcggacggtacgtgtgttttttgggccgaccggaggcgatttcggggaaataagcgggttacggcccgcaattagagactgaaagggattagaatgactaagacgatttacagtttgacgcttattttgctggtggttatggcggctggttgcggtgagcaggttcaaaaggagctttacgaggagccgagcggcagggtcgtgcaggaggggatcagctttgcggcaccgacagcggaagaggttgagctggtggaatacatggcggcacagcggagctcgtatcgcaagtcgctgcaggcgctggcggattactataaaagaactggcgatgctacaaaacttcgctgggcaaggcaggaggtcgatgcgttgaacgaggttccgcggtacagctatattatggcggcggagacggttgatatcggtcagcgggcggtcaacgagatcgaggctgcgaatcagctttacaacgaggggctgagcatttaccgcagtacggcgtttgtgcctgtgctggcggatgagggcaagctgaggcaggcgctggcgaagttcaacgctgtcataagtcgttatccgacaagcgataaggtcgatgatgcggcgtatcgcgcgggcaggatatatgagcatttcgacaattacgagatcgctgtgacgtactacaagcgtgcgttcaagtgggatccgaatacgccttatccggtgcgatatcgggcggcgtttttgctggatcatcggctgcacgaccgtaaggaggcgttgacgctttaccgcgatgcggttgagaaagagtccagctattttgacaacatggaatatgcacgcaacaggatactgcaactgacgcagccggagcgggaggtgagcccggaggttgaggagaccgagcctgtcgagggtcaggtgacacagtaataacggcgtgaatagggatttgccgggcccggttcctttggtgggatcgggcccgtttttttggcagaagcaaggctgcggctttggatgttgacctgtcgagtgtgagtgtctataatcgcgtagtatctcaatggatagcgggtagtttgttagaattcgataagtggttattttataaaggtttaacttatgtcatttttgagaatgtgttttgtgttcggtctggtaactgctgttttgggggttgctgttgccgaggaggccggggggatggtctggcgtgacgggagcgagcttcggatagacggcaagggctggtcggacacgccgacgccctactcacggctgcctgagcgtgctgaggagaaggtgcggaagccggtatgggatcggtcgctgaaatcagcggggctggtgatacatttcaatacggatgcgaggaaaatatcgttcaaatggacacttacaagcggcagtcttgcgatgcaccacatgccggcgacgggggtttcggggctggatctttatgtcaagaatgcggacgggaagtggttgtacgtgcgcaatgccaggcccaccgggaagagcagtacgggtagtgtaaatatctgggacgctgaaaaaggcaatatgagggagtataagctgtatctgccgctgtataatggtatcgagtccttgcagatcggtgtgccggagggggcgaagttcgagcagcccgatgtgagcgatgctaagccgatcgtttattacggtacgtcgataacgcagggggcgtgtgcttcgcggccggggatggcgtttgcggcgatgatcgagagggagcttggtgttccgttgatcaatctggggttcagcggcaacggcaggatggagcctgaggtggcagaactgctggcggagcttgatccgcaggtttatgtggtggactgtctgtggaacctgacgagggcggaggacgagacgatccaggaacgggcgaggaaccttatatggaagatacgcagcaagcatgccgagacgccgatactgtttgtggggcagtcgaatttcagggggctgcggacgggtaagaccgaggcactgctggaggagctggagaaagccggcgataacagggttgaaaacgtgcattttctgcctgggcgtgatctgctgggcgatgatggggacgggacggttgacggggtccacccgaacgatctggggatgagacggcatgcggatgtgctgataccggcgatccgggagcttattgcggaggagcctgaaccgaaagatgccggcgaagcgaaatctgattgaggccaggtaggctgcgatgcggtatagatgaacgaatttgagcgtaaaattgcggattttgtgcggtcggaggggctgatcggggccggtgagcgagtgctggcggcggtttcggggggtgcggattcggttgcgcttttgcgggttctccaggcgatgcgggatgagggagcggagtttgaggttgcggtcgggcatgtcaatcacaatctgcggggggcggcgtcggacggggacgaggcgttcgtaaaagtattggcggagcggatgggggttgaggtgcggagcgagtcggtggatacggtgggtcatgcgaaaaaacaccgggtttctacggagacggcggcgaggcggctgaggatggaggggctggggcggatggcggatgaactggggtgcggattgatcgcgacggcgcatcatatggatgaca

SEQ ID NO: 3715 - DNA, 23165 bp, synthetic construct
  source 1..23165: mol_type = other DNA
  misc_feature 1..23165: note = Synthetic
tttctatcgctggtttaatgaggtgccagtattgatattgatcgcagtggttattttggttgtggttaagccgttttagaaaatctttcggcgagcgcctcgtagataggctgatggtaaatttgcctggaaataaagttagcaataaaggcaacagccaaacctggaatgagtaaatgtaggctcatcgtcatttctaaaatgacaaaagttgaggtgagtggcgccctgatgaccgcacttagataaccaatcattgccattatcatgatgacttgcatatcgatttgcgtatagaaatttgccaattccgcgccaattcctgcaccaattgaaatacttggcataaaaataccccctggaatagtggaaacgaaagaggttaaaactgcaaagaatttcattgccacaaaatccaatcccaatgattgactattgagcatctgcagaacttcagtatgcccagagcctgcaatttgtccttttgagacatagttaaacaatgccgcaatcattccaacactcaatgccatcataaacactttgattttactattgataattaatttatgcacaaaatagagtgttattctggaaaataacccacccaaaacactgaccactacgactaaaggtagcagttgccaaatcaaagttaaatcaaacgaaactgaggataaatccattaaatatgggctgctaccatggtatgaaatatttaaaaaataaacaagcccactgacagtcgcgattaaaatcaaagcctgtttttttaattttctgccaatttcttcgtaagcaaataacacaccagcaataggcgcgttaaatgcaacaattaaccctgcactaccaccaattgcaatcagagcatggattaaaagtgtgcgcttaagttttaaaaaacggttaaatccataaaaaatagagccaccaatatgaatactcgggccttcgataccaatcggtgcaccacctaacattgcaaaaaagatgaagccaattttccctgccactattctgaacgataatagtttttcgcggatagatttattgtgagactcggtggcagcaatcagttgtggaatgccactaccttgaacaaaatgacaaaaatgcttggcaaaatagataatactaacaaaggtaatcggtgtaataataaaactcagtgcaggatttttgacaataaatactttaaaggtatgatgtgaaaattcgctaatttctaagaaaatcccaatcgtaataaccgtcaaaatacttgctagtatcagtgatatataggtttttaattcatgggggaattgagatgctatatatttcttcatggtttttttatggtgagtaaggcaacacctgtgattataaatataatgccagcaccatagtatatattgaaaaattcatctaaaacccatacacctaaagcaatcgtaataataggacctaaagtgccaataatccccgtttgcgctgaaccaattttgggaatagcctcactaatcataaaactaggtattaccgtgctaatcactgctagcattacaatccaaaaccatgctatattactcacatcaagcacattaaaatcaaatactagaaagtaataactcagtacaaacacgctggacacactcattgctaaggcagtgaaccataagccgcctaacaaatgaataatttttttgctaagcaaaacataacaagcaaaactcaacgctgaaagtaatacgaacaacacacctgtagttgtatcacctatgtgggtatttaattcttgactaaatacaatccacaaacctaaataacttaacaataaactactgataatttttttggtgagtggtgtgttaaaaaatagtgcacctaagattaccacaaaaataggataagtgaataaagttaaacgctctaaactggctgagatattttcaagtccttttaaatccaaccatgatgccaaggcgtaaccgatgaatcctaataataaaatcatagaaaagttgttttttatatcagttttaggtatgtttttttgacttaaaaaaccaataattaataaataaattggcaaagaaattgccattcttaacattaaaacagtatcggcattcagtccttgttggtagattaatttgataaaaatagactttagagcgaacaatgccgtacctaaaaacgcaaagaaaaagcccagaagaacttctttttgttcaaatttaaacatttaattttgagtgaataaacccgttgaaagatagcggtcaccacggtcacaaacaattgttacaatcgtagcattgttgactttcttagacagctcaagtgctgctgatacagcaccaccacttgatacacctgcaaatataccttctttagtggctaaatcacgcgtgatttgttcggcagcagattgcgaaacatctattattgaatccactttggaggcgtcaaatatttttggtaaataggcttttggccagcgacgaataccggcaatttttgccccatcttcgggttgaacgccgatgattttaatatcagaatttttagactttaaagtttcagatacacccataatcgtacccgttgtacccatcgcagagacaaaatgcgttacctcgccattggtatcattccagatttcttcagcagtcgtgttaatgtgtgcgcctgaattatcggcattagaaaattggtcaagttgcttaccttttccgtctttttccattttatcggctaaatctctcgcaccctccatgcctgatttttcactcactaaaatcaactcagccccatatgccgtcatcgcatccctgcgttcttgtgagagattatcaggcataatcaaaatcatcttatagcccttaatcgctgctaccattgccaatgcaatgcccgtattaccgctggttgcctcaatcagcgtattacccaatttaatgtctccgcgtttttctgcctgagtaatcatattaaaagctgcacggtctttgaccgatccagcagggttattaccctcaagttttagcaagatagtgttagacgggttagggttaaggcgttgtaagcacaccaatggcgtgttgccaatagttttttctatggttgaatagtgcataattttttaactcctgaaagtagcgcattgaaactagtagatgtgttgctatcatctaattttaagtggggcgctattgcttttgaacctgatatgggctgatattctttgttggttattctttgtaattcttgttttgcgttggctaaattatcggcatttctgaatttcttagaagtttgacttgaaggcaatattttattaaaggcttgcttaactgctaataagtcacctaaataaaaattttctaattcatgacaagcaatccgaacaatagatacatctttcttaccactttcattaactttgtctagtaattgctgcttaatatcagtgcaaatagcagaatcttgatctctaagaattaaaaagcgagcgcctggaaggttgtaattttttaactttttctttatttgtctgtctaaatcactttttccttcaaaagaaaaaatagaatgtaaagaattattaggtagtattttaggcagaacaattcgtaacatttcttttgcagatctttcttcggtgaagcaaaccagattcattgcttgcctagttgatcaaaaaatccttgtttccacaaatatcccattttgtcgccatcgttcataaaggctttaatttgttcatcgtcagagatgcgcttgattgtcgtgtagccattattcttggatagataaaatacttcattaacttcaacagcattaagaaaatcaggtgagtgtgtggagacaaaaacctgctcacctcgattagcatacgctctaaattcctctgccaattcttctaataaatgcggataaagttgattttcaggctcctcaacgcataacaaagggtagggtttggggtcataaagtaaaactaaataagccaacatttttatagtgccatcagaaatgtaacgcactaaaaatggtttatcaaaagattcgtcttgaatttttaataaaacttgccctgtttcaatagtttttgcctctaccttggaaattcctagaatcctttgttgcaagattttgataatctcatccagtgttgatttgtgattattatgcaaatagtcaacgacattggataaattctcacccaaagtagataaatgctcggcataatccgcttgctgaatgttgcgcgcttcattgacatggatatcagacacatgccaattgtcaattaattcactaagggcaataactgctggaaatttctcaaattgcgccaaacctttgatggctaaaatatctggtgattttaaagtttgttcttctctacttaactcattaatatccgtatccccatctaactcattagttacagcgtaacctttgccattgctaaattctaaaaaatgccaaggtgtacctttacttccacgacggtattttaaaacttctttttccaccaatgctttgccatttttttgggatatacttaaagaataagtgataattgggttgtttttagaagtgtctttggccctaaatttaatttcaaactctatactgccactacaatcgcgactaataacctcgttaaatctacctcgtttattaaaggcagtattaacatcatcagttaaagcatcttttaaaaatccaaaaacattaaaaagtgtagtttttccagaaccgttagcaccaacaattacgcaaaatctaggaatatctttcatttcagcatttttaaatgctttaaaatttttaatttttatggattcaattttcataattgttttctacatattctccaaaatcgcatttttaacttcgtccatcacaggattaattaaaatcatctcacttttacattgtgcgattgctgtatcagggtcttttaagccgtgacccgttagcgtgcaaacgatggtagaaccttctgggattttgccattgttaatgtcaatcatcgcacctgcgagtgaggtggcagaagcaggttcgcagaaaataccttcttgttctgttaataatttttgtgcggctaagatagcctcatcactaatagcatcaaaccaaccgttagattcttctttaaccttatgtgccaaatcccaactttgtgggtgaccgatgcgaatagcggtggcaatggtttcagggttgtcgaccatttcacctttggtaaatggtgctgcgccttctgcttgataaccgaccatagaaggggttttcgctgaaattccatcttggttgtattccttataacccatccaatgcgcggaaatattacccgcattacccacaggtaagcagtgataatcaggggcatcacctagctcttcgacaatctcaaaggcggcagttttttgaccttgcaggcggaaagggttgattgaattgacgatagatacaggtgcatggttggccacttctttgaccagtcgcatgccatcatcaaaattacctttaatctgaataattaccgcaccgtgcatcattgcttgcgctaatttacccagtgcaattttcccctctggaataagtacaaatgctttgataccagcgcgagctgcataggctgctgcagaagcagaagtgttgcctgttgaagcgcaaataatggccttagagcctgcttccacagccttggttacagccatcgtcataccacggtctttaaatgaacctgtcggatttaagccttcgtatttcacataaatatccacatttttgcctaatagcgcaggaatattttccaagcgaataagaggcgtattgccttcacctaaactgataaattttgtatttttatcaaccggcaatctgtttttgtagtggttaattagccctgtgtatcttttgctcataatctattttcctgttaatctaatgtttctacatgaatgattttaattgccgcttgaataaaatctttttcttgaatttctgcaactgctgtattaatatcccccgtttcgaccgagttagtgataatggcaatgtgtgcattgttttgtgcgtcaatttgtttttgtacaacagattctacactgatattatgatttgcaagaattgaagtaatgtctgccaatacgcctgttgtatccttcgccaataaacgcaaataaaatacgctttcaatgtcattaacattttgactttgtactgctttaagcgatttccagccaaacacatcagcactcaccgtgcctttaatcacatcaactaaatctgcaatcaccgcactcgccgtggcttcagcgcctgcgcccgcgccataataaagcgtcggcccaaccgcattgcctttgactaataccgcattcatcacgccatcaacatttgccaataactgtgtttttggaatcaaagtagggtggacacgcatttgaatttgaccattaatttttttggcaatccctaagtgcttgatggaataacctaactcagtcgcaaacgccacatcttcgccactcacttcgctaataccttcgcttgaaactttgtcaaaatccagttcgcaaccgaacgcaattgatgccaaaatggccagtttatgtgccgcatcaataccttctacatcaaaagttgggtcggcttctgcatagcctaattcttgtgcttcttttagtacatcggcaaaatccctacctttgtcacgcatttccgtaagaataaagttgcctgtgccgttaataatacctgccaccatttcaacttgattggcactcaaaccttgctctaaagattttagaataggaatgccaccagccactgctgcttcaaacaataaatgtacattattagattttgccaacgccaataatgcattgccatgtgtggcaatcaacgccttatttgctgtaatcacatgcttgccattgcgtaacgctgcctcaaccaattccttagcaagacctgtgccacccattaattctaacaccacatcaatcgacgcatcattaacaatcgtcaatgggtcttctgtgagtttaatatggtcagtagggcagatacgcgcttgattaacatcgcgcactgcagcgtgcgtcacctggatagacgcgccagtgcggcgtttaatctcagcattatttttagccaaaacattaacaacgccaccaccaacagtgccaagtcctaaaattccgatattcacaagttaaatcctatacaaataaaggatgaaattataccaatataaaatcttatttgctgaatgtaatcgcactgcattttaatgggcgagaatattgcacagggactttgtgctgattgttaaataaaacaggcgctagggcttttagcatatcttcataaatcggttttttaaagtcaataattgcctcaatcgggtgccaataatccacccatttccaatcttcaaattcaattttcgtatgtgtgtctaatttaatgtcactttctgaacctatcagttttaacaaaaaccaaacctgcttttgccccacgcaatatttacttcttttattcttaggtaaatcataacgcaaccattttggtgtctttgccaccacctcaatgtgctcagcccgtaagccgacttcttcttctaattcacgcaacagagcttcaagttcattctcacccttgtcaattccaccctgtggtaactgccagccttcttttttgaagcgtttggccaaaagtacctgttgtttgtcgttagtaataacaatgccgacattcgcacgatacccttctctatcaatcatcgccaccgaaagcgcctaagatatgcagcaaactggcaaacatattgtgcaatgataagtacaatccaaccgtcgcagcaatataatttcgttcaccaccgttgataatagacgacatttgcatcaacataaacgcacccattagcagtacaacggcaaatgaaattgccaaacttacaaatgaagattcgataaaaaagatattaatcaatgacaaagcaatcacaccaaccatagcaaagaaaatcatcccacccataaaagaaaaatctttcttagtattttgtgcataaaaactaatggcaaaaaatgacacgcccgtacccgtcaacgcctgcatcactaaacttgccccattcggcatcgctaaataatgcgttagcataggacccaatgagtagcctaataaccctgccaccgcaaaggctgtaacaatacctttgttgctattttgtgtttttggtaatacaaaccaaattactgcgattgccaccaatgatgccaccattgccgatccaaagcctgcacctgtggttacagcaaaccaagacgacaacccgccaaatactagcgtgtaagatagtaatctcattgtatcggataaaactttgttcttaacctgtacgctacccattgtagccgtcgttgtaaatgtactcataacttactccttataattaacggtaaaatacctattttataccaaaatagcggactgattatgaaactggttttaggtttaggtgatacaggtttatctatcgcacgatttttatctaaacaaaatatcgcttatcgcatcgccgacagtcgccaaaatcctccttcattaaacaattgcccccaatctccaattctcggcgactggaccttggacctgctcgctgatattgacgagattttcatcagccctggtatcgctcaaactgagcccatcgtcctttgggcaaagcagcaaaatatctctattgtcagcgacatagaactattttctcgtcacgctcaagcccccatcattggtattactggctctaatggaaaatctaccgttactcaattatttggtgagatgattgccaatgatggcaaaaaagtcgctatcggtggtaatattggcaaacctgctcttgattgcctggatgatgatattgcgtattatgtgttagaactttccagctaccaattagattacacgcaaaatttaaggctattcactggcgtggtacttaacattacccccgaccatttagaccgctacctaagttttgagcattatgcacaatctaaactcagcctctatacacattgccaaacctccgtcattaatatcgacgaacccctgacatctaaacaatcttccagtaaaatttttggtatggacatacctaaaaatcctaaagatttcggcaccgtcacttgtcacaatagcacttatctactcaaaggcgatacttcattaatgtgtattgatgatatgccactcatcggtgaacataatatcaaaaatgccttagccgcacttagtcttggcgaccaaattggattgagcacggaggcgatgattgccaccttaaaaaccttcaaaggcttagagcaccgcctggaaaaagttacagaaaaaaacaacattacttactacaatgattcaaaagccaccaacgccatctccacaatcaccgccattcaagccctaatttccacccataaaaacatcattctcattatgggcggcgtcgctaaacaagaggattatcacccgctattcaccctcattaacgagcataaaatccccgtcgtcctaatcggcaaagatacccacaaatttgaaaaatccatcaccaacacaaccttggcaaacaccttagaagacgccatcaccaccgctcaatcccttattatcaagggtgcaatcctattatctccagcctgtgccagttttgatatgtttgacaactttgaacagcgtggaagaatgtttaaagattatgtgaatagcgcccattaaaaaaccctatacaataaccattgtgtagggtttaaaaaaaagtgtggtttcttattgaggataatataaatattagagcctttcggatcaagaaacctagaaaccttattatagtaaatcctccctctctcttggtatgacatactattaagatggtgtattatatacattttttttaacataataaaaaaatatgagaatattaggtgttgatttaggtgtcgcttcagttggatgggcattggttaatgataagaataataaaattattgattcaggggtgcgtattttcactcaatcgactaatagagaggggaaaacgcttgctgctgttaggcgaagttttagagggggtagaagagttttaagtcgtagaaaacaacgacttaaccaactcaaaaagttatttattgcccataaattactttcaaaatcagaatttaaacatctatttaatagtaaaaatcgtttagatatctggcaactacgggcaaaaggtttagaacaacagctcaataacaaagagtgggcaagggttttgtatcatattgccaaaagacgagcttatcaatctaatcgtaaatcagaagaaagtggcaataccgataagaaaaaagttttaagcggtattagtaagaatgaaaagaaaatgaatgaattaggctataaaacgattggagaaatgctttatacagaaaatcgttatccagataatagaataaggcgcaataaaaaagatcaatacaagcattcaatttctcgtgatttattaagaaaagagattgatgtgttatttgaatcacaaagagattttggtaatcaatttgcaactgatggattgaaagaacattataaagatattgcttttacacaaagaccaataaagtttaaagccgatttagttggaaaatgcacttttgaaactcaggaatatagaggagcaaaaaattgtttttcagtagaaaaatcaaccttacttagtaaaatcaacaataccgatttaattgataaaagtacgggtgaaatcaagcggttatttgagatttcagaatttgataaattgcttgatattttttatagtataaaagaagttaaatacacaaccctaagaaaacaactaaaaataaccgatgcctttaaatttaaacaactagattatcatcaaaattttgaatataaaacgaacattaaagccaaaatagaagatttttataaactagaggattggcttacgcctgagcaaaaagtcttattagaaaaacaagttttagatgataagaaagaaaagtttaagtgttataaatatagcagtattcgcagtattttatctctttcagagtcgcaaaaatttaacggcgttaaatatgacactaaggttgagaacactgtttttggcaaattaaatggctaccactctattaaaaaagaattaaataaagaagtttttgatttgttatttattgacaaagataagtttaataaaattgctgagattttaagttatcaaaaagatgataaaagtgcaacacaagacttaaaaaagcaagtttttaatgactttaatatggataaaactattgtaaatgaagcgattaatagcttgttaaatatatctttttcggggtttaatagtttgtccttgaaagctatcaacaaattattaccttatttatgtcaagggttaaaatatcatgacgctgttgctcattctgaatataaacaccattctcaatttaaagccgctaatccacaacaatatttacgacctctcaataaagaagagaattatcaaattaccagtccaacagttaagcgtgttttttcacaatttagaaaagtgctaaatgctgttattcgtaagcatggtagttttgatgcgatgcatattgaaatggcaagggagttaaaaaattctaaaaaaataaagtttgaaatccaaacagggcaaaaggaatatgcacaagaaaaagaagcaatcagggtaaagtttttagaaatttttaagtatgaaggttcaggtagagacttgttgaaattaagattgtatgaacaacagcatggaaaatgtatctattctaaaaaagaaatcgagataaacaaactactggaagatgggtatgtggaaattgatcatattttgccatggagcagaacttttgataatagtttgaataataaggctttgtgtttatctgcagaaaatcaaaataaagcaaaccaaacgccatttgaatatttgacaaatagcgataaaaacagtaaagacagtaaagaatggcaagaatataaaaattatgtgagtagctttgctggcattaagcaggcaaagaaacataaactgcttaatacgacactaccaccaagacgaggcaatgattttagcgatgatattaaaaacccagaaagtggttttttagcacgcaatctaaacgatacggcttatgcttcaagatttattaaaaattttgtgcaaaatcatttgcaatttagtcaaaatgatacgattaaacaaaaggtaaaggtcagaagtggtgcattgacaaatcaattgcgttataactggggtattgaagagaaaaatagagataacaatctacatcatgctgaagacgctattattttggcatttgccacacaaggcgaagtgcaaagaatgtcaactatttccgctaaaagagaagacttcaaatatcaaactgccaaagaaagaaaaataaaattcaccccgcctttttctgatttcaagagtgtacttgatgaaagtgtcggtgatatttttgtttcattcgcaccaaggcgaaaaatttcaggagcagcgcataaagcgactatcaagccaaaagacacgggtggaaagtataaattcccagttaataatggtatggcagaaaatggggtcattcaaagagttgatgtgtttaaaaatgcaaaaaataaatatcaatttatagtattttatccagccgatttttataaagatgattttccagaactggatttgaaaggtaatgaaatagataaaaacgttcagtttttattttctttgtttaaagatgatttgattgagtttaaaaccaagaaaactaaaaccaaagatagtaagcatcttttggcttattttaaatatatcagatcagatggaaaaattgcctttcagcagaattataaagctgaaattgaaagaaaagaatctgataataaaaaagggtataaagatattttgcttgcaactggatcaggattggcatctttaaaaaaatatcaagtatcggtattaggagacatagcggaagtgaaaaatgaaaaacgactacctctgattaaacaaatgtataagagcaagccaaagaaaaaataaagaccctgtaaaccagattgtgtaaacacctctttcaaaaatcagacataatcctttaatctatcctcatgtaggattataaactgattcattgcttgtgaccaatttcgtattggcattgtccatttcttactggctgcttcaatggctaaaaagaccactttaaaagcagagttatcatgattaaaaatctttctgtttttgatagattttctaatcattgagtttaaggattcaatggcattagtggtatagattgcctttctgattgcctcaggataagcaaatagagtagcaacattatcccaatttcgtcgccacgatttggcgatacttgggaactgcgtatcccatttatactcaaactcatctaacgccaataaagcttcttcttcagtaatagactgatagatttgctttaaatcactagcaacattcttatgttccttatagcccacatatttaagcgagttgcgaaccatatgaacaatacacagttgtacatcagcctgtgggaacacggcattaatagcttcggggaatcccgttaacccatcgactgaggcgatcagaatgtcttttacgccacgattagcaatatcgttaagaacgcccaaccagaacttagaagattcatttttggacaaccataagccaagacattcttttttaccctcaagattaacgcctagggcaatgtacatggtctttttaatgatttgtttatcttgcctaactttaatgacaataccgtctaaataaacaatggggtaaatctcatccaatggacgattacgccactctgtggcttgagtaataaccgcttgtgttacattggacaccaacgttgctgagatgtcagcgtcatacatctctttaaaggttgtgacaatatcacgggtgctcatgcctttggcatacaggcttaatatttgattatcaaaagcgcctaatctggtttgacccttctcaatgatagcaggctcaaagttagcattgcgatcccttggaatagcaagttcaacttcgccatgattacctttaacaattttagagtagtagccattgcgagcgttattactggcattagattcattgccattttgtccatattttggatagccaaggtgatgttccatctcagcaccaagtgccgcttctatggtcatcttaaccaatgatgcagacaagtctgccaagtcatcttgggtgtggatgtctttggcaagctcaccagcaaaagcacggagtttttgttggttaatgcctgtgttgttcagttggttcttttggttttttcttagtgttgcgttactcatgttttttctcctttttagggattataaaatatgagggtttacacaatctggtttacagggtcaaaataaaatgtcgtggcaaacgctattaatcagtaacccttgcaaattatccattaaaaatggtaatattttgcttaggcgtttagatgatgaagatgcaaatattgccattagtgaagtatctgctattgttattgaaaatccgcaagtaacaatgactgccgtttttatgtcgcattgtgcagatagtaatattgttgttattttttcagatgaaaaatacacgcctattggtgtattccaccctttttatcaacatagtagaatgacgaaacatgcatttttacaaaataactggtcgcaatcttttaaaaatagagtgtggcaaaaaattgttaaagcaaagatattaaaccagcagcaaactttaataaaaattaccaaacaacctaataaacagcttagtttaatcgcatctaaagtgcaatcggcagataagaccaatagggaggcatatgcggcgacaatttattggagaacattgtttgagaattttaaacgcaataatactaatgatattagaaactctgccttagactatggctatagtattgtacgttctgcgattgctaggagcatcagtgctagtggctttgttccagcatttggttttcatcataaaaatgaattaaatgcctttaatttggtggatgatttaatagaaccttttagagcgtttattgattttgaagtgtatttgctcaatccatctaagacaggcactaagttaacttttaaaatgcgcgctgatttggttaatattttaaataaacaggttgtgtttaagcaagaaaaaacaacactattgaacgctattcaaatgatggtatttggtttgttaagtgccagcgaacatcaagatattgatttgttgttattaccaagacatgctcaataaaaatgatcgttttatgcgattaattgtattttttgacttaccaactaaaacaaaacaggataaaagagtttataccgttttcaggcgatacctattaaaagatggatttattatgttgcaattttctgtatattcaagggtttgcaaaggattggatagtgtagaatcacatttaaaatacttaaaatctatattgccacccaagggaaacattagaatgttacaagttaccgaaaagcaatatgcgcgcatggaaatattacttggatcagttaaaaaaacagagaaaagtgcaggcaaacaactattattattttgaaaaacgcatactacaaagccacacaactcttgatatataagagttgtgtggctttgtagtatatcagaccagagagagggaggggtctataacgagccaccaccgactaaggcgactgccgaaagtatatcagaccagagagagggaggggtctataactagccagaatgtctttgcacatatttatttagtatatcagaccagagagagggaggggtctataactgactgccgttgcttttttttataatttaggtaaaaaattatgaatcatgcaaaggcctttcattatgaataaattctattgctttggtgatatctggcatttctagagttagggcattgggctcattgcggagccaagtgctttggcgtttgcagagttgcctagtggcaatgatggatttttctatcatggttgctttgtcgatttcattgttgaggtattgccacgcttggcggtagccaacgcaacggatagagggaaggtcttcatggagggcagggttttgttttaaggttttgacttcggcaaggaaatcgttgtctatcattgagaggaatcgttgttcaatacgagcgtggagttcggggcggggcggcattaggatgatttttttgacggggtaggtgagtcctaattgtttgttgccttggagttcggtgagggttttgccactgatgtcaaagacttctagggcgcgggtgatgcgttgggcatcattggggtggatgcgttttgcggcagttgggtcgattgttgccaaatcttgatgtaaagtggatgcgcctttctcgcatagtagttgggtgaatttctctcgggattctggggtagattcgggtaggtcggatagaccatgttctagagcattgaagtagaatgctgtgccaccgactaagattggggtttcgttgttgttgaaggcgatttgtatttgtgttttggcgtcttggacaaaatcaaaggcagagtaggaatcttcggggttacaaatgttgattaattgatgggggtattgtcgtaaggtttcggcgttgggcttagcagtaccaatgtccatacccttgtaaatcagcgcagagtcaacactgataaggcgtacggggaattgtttggataattcaatagcaaaatcggtttttcctgaggcagtaggtcccattaaaaagaccgcagtattgggttgtattgacatttaattagtaagattaatagggcgcaacctacattataatatcaacacgaaattagttagggtaaataatgtttacaattgaaaatcaagcgacgggtaaagtttttagaaccgagggtaatggtccgattttggatgatgcgttaattcacggtctgaactttccatacggctgtcaaaaaggcttttgtggcaagtgtaaggcgacgattattgagggtgaagtgggttatgatactgatgtgccgaatggcatcacgcctgaggaagtagcggatgggatggctttgttgtgccaatgtcatgcgaaatcagatgtgtcgctggtggtggaagaactggacagtttggcagatattaaagtaaaaattttgccttgtaaggttgaaagtattacacatttaaatcacgatgtggcacaaatatttttgaaaataccaggggcagagtcgctacagtattttgcagggcaatatattgatttaattcatcctgattttgagcctagggctttttctattgccaatgcgccaaagaattcaaacttgattgagttgcatgtgcgcttggttgatggtggtaaattcacgcatttcatatttaatgaaatgaaagaaaaatctttgttaaagctcgaaggtccaaagggcgatttcttttttagagaagacagtaaaaaaccagtaattttgctggcaggtgggacgggttttgcaccgattaaatctattgttgaacacgctattgcaacgaatttaagtcgacaaatttatgtttattggggtgcgcgtgaggcgtgcgatttgtacatggacttgccacagcagtgggcaaatacacatgataatattcattttgtacctgtattgtcggaggctgatgaggcgtggcagggaaaaacgggttatgtgcatgacagtgtgttagcggattttgaagatttgacgggctatgaggtgtatgcttgtggtccaccagcaatggtgaaatctgcggcaaatactttcgtagcacaggggatgattaaggataatttcttttctgatgcttttgtttttgcctatactaaggaaaaataacaatggacatgcaacaacatttgaccgaacaattgactacggcattgagccctgcgcatttgcaagtgctgaacgaatcaaaaaatcattcaggtcctgcgacgcagtcacattttaaattgattgtggtgagtgatgaatttacaggtttgaaattgattgataggcatcgtttcatcaatcaattgtttaaagaggaattaacgcatattcacgcattggctatgcatacttacacacctagcgaatggaagatgaaacagggcgcacccgcttctccgcagtgtgcaggggggtcaaaatcttaagaatcctattactcctgtcttttgtattgttgagtgcttgctcaactcaagaaaccaccagcgataaacattttgtaaattttacagtcgctgaaaaacccgtaaaactcatctcttcaaaaatagagggggaggatttatggcgttatatctctcgtgggagtacgctcaaagcacgcagtcaaagagatttatattggcatattaaatggtttaaggaaaatcctgattacttgactcgagtgactaagcgcgctggaccgtatttgcatcttgttattcaagaagtgaaaaaagcaggcttgccgattgagttagccttgttgccaattgttgaatctgcttattacccgttttcttattcacatggcaccgcatcgggtttgtggcagtttattccagatacaggtagattgtatggacttaaacaaaattattggatggatgaacgacgcagtgtgattcgctcaacgcgtgcagcagttgcttatttgaaaaatttgcacaccttatttaaaggcgattggttgctagcaattgccagctacaactctgggccaggtagagtgcaaaaagcagttaaaaagaataaagccaaaggtagaaaagcggatttttggaacatttctttgcctgcggaaacgcgaggctatgtgccgagattattggcagtggcggaactaattaagcacccagagaaatacgggcaaaccattaccccaatctcaaatatgccaaagcttgaatcggtgttcgtttattcacagttagatttatctttaatttctgaatggacggggttaagtttagatgagatttatacacttaatcctgatttaaatcgttgggcaacgccagatacgacgcgttatgagttattattgccaattgataaagtagcgcgttttaaaaaagcacgagcgagttatccaaagcaaaaacagttgcgttacaagcgctatacaattaaatcgggcgacagtttaaatagtttggcaaagagatttaattcatcggtgagttacattaagagtattaataatatcaaaggcactcgtattaaacttggacaaaaaatcattattacaattccaaaaaaagccaaagattattattcactgtctatagagcaacgcaaaaaacagcgatttaacagccgaaaatacggaaaaaaaattacccatatcgtcgccaaaggggaaattttgtgggtgatttctaatcgttatggtgtacctgtggacagtattattaaatggaattatttgtctaatgcaaccaaaggcttacaaattgggaaaaagttagtgatttggcaagtgccaaaaaccaaggcatcggctttgaaaaatttgactaagaagggggttaatgttaaaagaacattaagttataaagttaaaagcggtgacaatctgtcaaccattgcacataagtttaaggtgcgtatctcacagttgcgtcagtggaataatttagctaaaaataaaccgcttaaaataggaaaaaaattaaaaattatcaaatccattgttgaataaggagtgccatgaatcaattacctgttaataaagtttttatcgctggctttgcttttgcaatgacacattggaagaaaatattggaaatttctcttgttcctttggttatttctttaccgttattgatgatgttgccagaattgttaatggtcgctaagcaggtatttttagccatagagcagacagcacctgatacgccgttgcctgagattatcttgccagataacacaggtatttattttattttgttcttatatggcaatatttctttatctattgacatgtatcgattggttattttgggcaggcaatctgttggtattacgccagtttttgaccttggtaagattgctcgattttttggtttgacattattagtagggatggtaacgatagtgccattggtactcactaatcttttgatattgcaatttatcatctcttttctgatggtgccaattacccttaattttgttaatattgccattgggaaaccttctagatatcgctggggattgtcattcccgacacatatgaatttgttttttttgcaagtgattgtgccgatgttagtggtgctattattaacttctttagcgaaacttatcggttttggcgtgggcgcagaatgggtggcaagagtgttagttttttactggagtgcgattacccttgccttgtgttaccaactacttacaacttcagggaaaaccccttagggtaacgcatatcaaacgaggctcgattaagtttgactttaggagttgtttttttgagttctttataggcttttaaaaatctttctaatcgctgttgtttttgttgatagcccaaaatcactttaatattcggcttaaatataagcgtgtcaatctgtgtttttgagaaagcgtgaattcgcatttctccagaggatttttggtagttttgataatcttgatatagttgagtaatgacggcttgctctgctttggagtgtgccaatacagcattagatttaacggttttcctaggcataaacaaggtgccgttagtagagatatatcccaaacagccaggcacacttttttgcttgcaatttatgttttcccaccgcattgcaattttatgagttttgatactgacttgaatactgttgaaaaataaacgcttaatatttgccgtggcaatccaaggttcattttctagcacttgtttaatttcaatcaaatttaataacaaatacttgtttttaattaaaggctgtaccttactttcaaggtgagattgggcaactaataagttattgtcaatttgccatgtaattttggtctgtagaaaatccatctccttaatttttaccacgccccaaatagtaaatcccaagataataagaatggatagaattttggcaatcggcatcaggcgttgtgccgtggtttttttgtgtgcgttatagcgcctattttgttttttaatcattaagaatttccataactaattcatcaaaactcattccccttgctttgactgccatcggtaccaatgagtgagaagtcataccaggtacggtattgatttctaataaatagggtaggttttctttgtctaaaataaaatcaactcgcccccaagtttctgctcccatgagggtaaatgcccgcatggcaatttctttgagtaattgttcattatcatctgagagtccgcaggggcataaatattgcgtgtcatttgcaaggtatttagatgcataatcgtaaaaaccttgattggttttgatttgaataacaggtaaggcttcacctttgagaatggatactgtgtattcgctaccctcaacccattgttcaatcaaggcaatttcatcgtattcccaggctaattctaaggctttgttgagcccttcaatggtttttactttgctaataccgacacttgatccctcaagaattggcttaactgcccaaggtaatgggaagtcaatatccggtattttctgccccacttttgataaaacagagggcgaaagtggtaagttatgttgccgccaaatatttttagtggtggctttattcatgcattgctcagaggttgtcgcacctgaacctgtatatttaatattacgctgttctaactgctgctgaatgtagccatcttcaccaccacgaccatgcaagacaatgaaagctttgtcaaaattttgtacccaaagcgtgtcaagattattgccgtgccaatcaaatttaaaacaatcgacaccctgatttttcaaagcattataaaccgcctcaccgctgtttaaggagacttctcgttcagcggagttaccacccattagtaccgcaatcatataatcaccacctcagtttctaagtcaatctcacagttagattttacggtttgttgaatgtgttgaatgagattttcaatgtcatttgttgtggcattgttctgattaatgatgaaattagcgtgtttcttagaaacacaagcaccaccgatacaaaacccttttaaaccactgtcttcaatgagtttggcagcgtgattatttggcggatttttgaagactgagccacaattgggtagcccgatgggctgagattcattgcgtttttttaataggactttgatgttgtcttgcttttcggtctgtgaagtttttaaattcgcaccaataaaaatctcgtctttttgatgtggtattacagacctataagcaatatcatattcagatttatcacgcatgaacaccttgcctgaatgattgatcgtgttaacagactcaacaaaagaccaaatatcagcaccaaaggcacctgcattcatcgctaaggcgccaccaacactacctggaatggcacttagaaactctacaccgtttaactgttgagattcgcaaaaacgagaaagttttgccagtgttacccctgcacctgcatggattaacccatctttaaaagtgagttgattaaggtgtgtgagtttgattgcggtaccattaaagccacaatctctcactaataaattactgcctaatcccagtattaaaatcggttgttgattgttttttagaaaatcagacagttcatttattgtatcgggtacaaagaaatctttaaccttgccacctgctctgagtgagcaatgtttgtgcattgattcattccgcaatctcattttttagtcagtaaagaaactaaagaatggatattgcccgcgccaagtgtcagtattacatcgttatcttgtacgatatttggcagtactttaagggcttcatttacatctt

SEQ ID NO: 3716 - DNA, 16249 bp, synthetic construct
  source 1..16249: mol_type = other DNA
  misc_feature 1..16249: note = Synthetic
taatttttaagcaataattccaatgggtcaatgtctttatttttatgcatttcttttaacaatcgagtgcgagcaaaatctagctcatctttaaaaattgccgcccctgttcgttctgcacttgcaataaagacattcggcaataaattatcaaataaaatttcaataataaaatttgcaataatatctttaataatgtgatgtggaaatgttattttctctttgctcaataaggaaatcaataagttattactattttcttctttggttaaagaaaacatttcaccctctccactaccaatagtttgcttaaattctttttctaaaggtagatttttagcaatttcaatgctaaatttagaagtttgaaacaaactcttttctgaggcaaaagtgattgctaattgtttgctgtattcttggcatgctgtttgtaaaatatcatcaatttgagtggcgtaatgcattaaatcgatggatgtactgccgtcacgcaataaatcttcaacactggcatcaggaacagttattcgtaaaaattcgttttttaaatctaaaaagccaataaagcataggttgtgtaagttttccccgtgttgtttttaccacaaatgatcgttaaatcgcctatttcaaattctgcttgtttgattgcccaagattttttagtttaattttcataaaattacatatatctaaaattgcatttttaacttcttccatcacaggattaatattaatcattgtatctttgcattgtgtaatcgcagtatcagggtcttttaagccatgacctgttaaggtacaaacgattgtagagccttcaggaatcttgccacttttaatatcacgcatcgcacctgctagtgaggtggctgaggcgggttcacagaaaataccttctttttcagttaatagtttttgtgcgctcaaaatatcggtatcacttaatgcgtcaaaccagccattggattctttttcaacttcatgagccaaatcccaactttgcggatggccaatacgaatagccgttgcgaatggtttcgggattgtccaccatcccccttttttaaaaggcgcagaaccttctgcttgatagcccaccatggcaggttttttggcggatttaccttcttgttggtattccttatatcccatccaatgggcagagatattacccgcattacctacaggtaaacagtgataatcaggcgcatcacccagctcttcaacaatctcaaatgctgctgttttttgcccttgcaaacgaaaaggattgattgaatttacaatggatacgggcgcatgctcagccacttcttttaccaagcgcatgccatcgtcaaaattacctttgatttggataatgacagcgccatgaatcatggcttgtgccaattttcctaaggcaatcttaccttctggaatgagtacgaatgctttaataccagcgcgcgctgcataagccgcagcagaggcagaggtattgcctgtagaggcgcaaataatggcttttgagcctgcttctaccgccttagttactgccatcgtcataccgcggtctttaaatgaaccggttggatttaagccttcgtatttcacataaatatccacttttttgcctagtagggtggggatattttctaagcgaattagtggtgtgttgccttcacctaagctgataaagtttgtgttttcatcaacaggtagtctgtctttataatggttaattaagccggtatatctcatcatattgtccttttaatcgagtgtttctacatgaatgattttaacctcttcttggatagaatcatgttgttggattgctgctgccgctgcattaatatctttggtttttacttggttggtgataatggcaatatgcgcattgtcttgtgcatcaatttgcttttgtatgactgcttctacactgatatggtgattggcaaaaattgcggtaatatctgccaatacgcctggtttgtcagtggctaataagcgtagataaaaaatgctctcaatatcatcttggttttgatagggggttgcttcaagtgactgccaacccaaaacatcacgactgagcgagcctttaattatgtcaaccaaatcagcaatcacggcactggcagtggcttcatcgcctgccccagcaccataatacagcgttggacccaccgcattgcctttgactaatacggcattcatgaccccatcaacatttgccaataggcgagtttttggaatgagtgttggatgtacacgcatttgaattttaccgttgagttttttggcaatgcctaagtgtttgatagaataacccagctctgtagcaaaagccacatcttcaccactgatttgactaatgccttgtgtggatactttgtcaaattgcaattcacaaccaaaagcaatggcggacaatatggctaatttgtgcgctgcatcaataccttcaacatcaaaagttgggtcagcttccgcatagcctaactcctgtgcttctttcaacacatcagcaaaatctctacccttatcacgcatctcagtcaggataaagttgcctgtaccgttgataataccagcgaccatttcaatttggttggcactcatcccttgctctaaagctttaaggattgggatgccaccagccactgccgcctcgaacaataaatgcgcgttgtggtcttttgccaaagccagtaattcattgccgtgtgtggcaatcaaggctttattggcagtaatcacatgcttgccatttttaagggctgtctctaccaattctttggccaaagtcgtaccacccattaattcgagcacaatatcaattgagttattgttgacgatgtcaaggggcgattgagtgagctgaatgccttttgtcgggcaaatacgagattgattaatatctctaactgcagcgtgcgttacttgtatttgtgcgcccgtgcgacgcataatttcggcttgattttttgccaagacattaaccacgccaccaccaacggtgcccagccctaaaattcctatattcataagtttagtcctatctatgaatgaacaaaggttggaattataccaatagaccactgcattagattatttgttgagtgtaattgccacgcatttaagtgaacgggaatattgtgcaggcactttatgttgattgtcaaacaacacaggggctaaagatttgagcatgtcttcataaattgactttttgaagtcaacgactgcttcgatagggtgccaataatccacccattgccaatcgtcaaactcaacatcagagtgtgtgtctagtttgatatcattctctttacccgtaagttttagcaaaaaccatatctgcttttgcccaatacaaagtggtttttgtctgtgtcttatgtgttgttttggtaaatcataacgcaaccattttggtgttttagcaaccaaatccacatgcttaggtaagagtccaatttcttcatttaattcacgaaacaatgcctcaagttcactctcacctttgttaatgccaccttgtggcaattgccaagcatcctgctggtggcgcttggctaagagtatctgctttttgtcattggtaataacgataccaatattggcacgatacccttctttatcaatcataagaaggggtggtttgttgttgagtgactaatcgtcgccaaaagcacctaaaatatgcagcaaactcgtaaacatattgtgtagtgctaaatatagaccaaccgttgctgagatgtaattagtctctccaccattaataatagcggacatttgtgaaagcataaatgcacccatggttaataccgtagcaaatgaaatggctaagctaacaaaagaagattcaataaaaaatacattaactaaaggcaaaacaataatgccaaccatagcaaaaaatatcatgccattgagaaaactaaaatcttttttggtattttgtacataaaagctaattgcaaagaaggaaacgccggtaccagtgagtgcttgcatgaccaaacttgcgccatttggcattgctaagtaatgtgttaacatcggaccaagggaatagcccaataggcctgcaactgaaaatgcagttaaaatccccatattgctattttgagttcttggtaagacaaaccaaatgaccgcaattgctgcaattaaactcacgattgccgataaactcacgattgccgagctaaaacctgcaccaatagagattgaaaaccaagaagacaaaccaccaaacaccagtgtgtatgataataatttcatggtatctgacaaaactttatttttaaccttggcaactctcattgttgccatatttgcaaatgtattcataatttatcctttgttgttaaccgtgtaaaatgatttaattttatactaaaaaaccaagatgaagctgattttaggcttaggaaaaacaggtgtttctattgcacggtttttaaccaaacaacaggttgcttttaggatagcggataatcgaaacgcccccccatttttattgccatttaaaagccaatttaacacagaaaatttatttttaggcgactggaagcccgagttgttaaataatattgatgaggttattattagccctggaatcgctcaaaacgaggctattgtggttttggctagggcaataacatccctgttattagtgatatagagttattttcacgccatgccaatgccccaattatcggcattaccggctctaatggcaaatcaagcgttacccaactactcggtgaaatgattgccaatgatggcaacagagtcgctattggcggcaatatcggcaagccagcattagagtgtttaagtgataaaattgattactatgtattagagctgtctagttaccaactagattacacacaaaatttaacactattaactggcgtggtgctcaacatcacccctgatcacctcaaccgataccccagttttgaacactatattcaatccaaactgagtctataccaatattgccaacatccagttattaacgcagatgagccactcaccccaacgctagacaatgccaaatattttggtatggatatgcctaagcaaggcagtgattttggcacggttacctgtcatggtagttgctatattctaaaaggcgatgacgcactgatggatgcagatgagttgccacttatcggacaacacaatatagtcaatgtattagcagcacttgctttgggtaggcaaattgggcttaacaccgattcaatgatgacaaccatcaaaacctttaaaggcttggaacaccgcatagagtgggtcacaaaaaagcaaaatattgattattacaacgactccaaagccaccaacgccatagccactataaccgcaatcaaggcattaataaaccaatacgaaaacattgtactcattgcaggtggtatcaaaaagcaagaagactacaacgctttatttgcattgattgataaccatataccccatgttgttttaatcgggcaaagcgccaaagagctaggcaacaacatccacactgcaaaagttacctatgccaactctatggaagcagcggttaatgttgccagtaccttaattgacaagggtgcaattttgttatccccagcttgtgcgagttttgatatgtttgatgattttgagcagcgaggaaatgtatttaaggatattgtcaaataattaaaatttgaatcttaaataaaaaaatatcaggacaagcctgatattttttatttagcctaatttataattctaaggaaggactaaatattttaaaaaggtgatttcttattgaggataatattaaatattagcgcctatcggatcaagaaacctagaaaccttattatagtaaatcctccctctctctggtttgacatactataaaagtgtattataaacaacttttatataaattagagtaaaagatgaaaatattaggcgttgatttaggggttgcctcagttggctgggcgttggttgatgatgagaataatgaaattattgattctggggtgcgtatttttactcagtccatcaataaagacgggaaaactcttgctgctgttaggcgagaatttagaggcagcagaagagctttaagtcgtaaaaaacagcgacttattcaattaaagaaattatttattagcaataaattactttcaaagtcagaatttatgcacttgtttaatagtgaaaagcgtttagatatttggcaactacgagcaaaaggtttagagaggcaacttgataataaagaatgggcaagagttttgtatcatattgccaaaagacgagcttaccaatctaatcgaaaagcagaagaaagtggcaacactgataagaaaaaagttttatccgccattaaaacaaaccaagaaaagatggagcaaggaggctatcaaaccattggcgaaatgatatatagtgaaaccaaacacccgagtagcggtaggttagacgtaataaaaaagacaattatacttggtcagtatctcgtatttttttaaggaaggaaattgatgtgttgtttgaaaaacaagcagagcttggtaatcaatttaccaccgacgaattaaaacaaaaatataaacagattgtctttactcagcgtccaatacagtttaaagctgatttagtaggaaaatgcacttttgaacaagacaaatacagaggtgcaaaaaattgtttttcggcagagaaatcagttttacttaataaaataaacaacaccgatttaattgatgaaaatactggtgagattaagcggttatttgagttttcagcacttgataaattgcttgatattttttataaaacaaaagaagttaagtatgccactttaagaaaacaattagaaatatcgggtaattttgaatttaagcaattagactatcatcaaaattttgaatataaaaccaatattaaagccaaaatagttgatttttacaagttagaggattggttgacgccagagcaaaaagaaaaacttgaaaaacaagtgctagacgataaaaaagaaaaatttaaacgctataaatatagcagtattcgcagtattttatcattacaagattctcaaaaatttaagggcgttaaatatgatactaaagttgaggacactgtttttggcaaattaaatggttatcactctatcaaaaaagaattaaatcaaaaggtatttgatttattgtttaccaaaaagattaaatttaacaaaatagcagaaattattacctatcaaaaagacgatgaaagcgcgactcaagatttaaaagaacaggtttttaaaaatttagacttggacgaaattgctataaatgaggcgattgatggtttgttaaatatatctttttctgggtttaacaatctttctgtgcaggctcttgataagattatccctcatcaggaagaagggcttaaatatcataatgctattaaagaggtctatgagcatcactctcattttaaaaatactaatccgcagcaatacctacgaccactcaacaaaaaggagaattatcaaattactaatccaacaattaagcgtgttttttctcaatttagaaaggtactaaatgcggttattcgtaaacatggtagttttgatgtgatgcatattgaaatggcaagagaattaaaaaactctaaaaaaagaaagtttgaaattgtaacaggacaaaaagaatatcaacaagaaaaagcagaaattaaagcacaatttttagaaaattttcaccatgaaggaacaggaagggagcttttaaagtttagactttacgaacaacaacatggtaaatgtatttattctaaaaacgagattaaaatagataggttattagaagatggctatgttgaaattgaccatatcctaccatggagtagaacttttgataacagtttaaataataaagttttatgcttgaaagtagaaaatcaaaataaagccgatcaaacaccatttgaatatttagcaaatggcgaaaaaaataatagtgagtggcaagaatataaaaattatatcaacagttttgttaatattaaacaggcaaagaggaataaattactcaacactaacctccctaaaagacgaggcaatgatttaaccgataatgatattgaaaatccagaaagtggttttctagcacgcaatttaaatgataccgcttatgcgtctaaatttattaaaaactttgttgaacgaaatttagcattcttagaaaattcagaaatcaaacaaaaagtaaaaactaggaatggagcattgacaagccagttgcgttacaactggggcgttaaagaaaaaaatagaggtaataatctacatcatgctgaagatgcaattattctagctttttcaactcaaggagaagtgcaaagaatgtcaactatttccgccaacagagaagattttaaatatcaaaccactgatgaaagactagttaaattcactccgccttttgttaattttaaaaatgctttagatcaaagtattaacgatatttttgtctcttttgcaccaagacgaaaagtagctggagcagcacataaagctacaataaaatcaaaaaatataggtggaaaatataaattttccgttaatcaaggtgtggcagaaaatggtgtaattcaaagagttgacgtgtttaaaaatgcaaaaaataaatatcaatttgtagtattttatccagcagatttttataaagatgattttccaaaattggatttatcgggtaaggaaatagatgaagactctaagtttttattttctttgtttaaagatgatttgattgagtttaaaactaaaggtaataaaaaaaatccaagtagacatttgtcggcttactttaaatatattcaatcagatgggagaattgcttatcaacgacatgataaaacagaaatagagcgaaaaaaatctgataacaaaaaaggctttatagatattttacttgcaacaaaaagtgatttacaatctatcaaaaaatatcaagtgtctatattgggcgattgccaagaagtaattaatgaaaaacgcttgccactgatcaagcaaatgcgtaaaaacaaatcaaagcaacaaaaataataatgtcatggcaaactattttaattagcaatccttgtaaactttctattaagaataataatattttattaaggcgtttagatgaagaagatgttattgttgtcattagcgaagtttctgcagttgttgttgagaacccacaagttactttaactgcagtttttatggcacattgcgcaagttataatattgccgttattttttcagatgaaaagcatatgccaataggtgtatttcaacctttttatcagcatagtagaatgacaaaacatgcttttttacaaaacaattggtctaaatcttttaagaatagagtgtggcaaaaattagtaaaagccaaaatacacaatcaacaacaaacactggtaaaaataactcaacagcctaataagcaattaaatttaattgcatctaaagtgcaatcagcagataaaaccaatcgtgaggcgcacgctgctactatttattggcgcattctatttgaagattttaggcgcaacaatgtggatgacattagaaattcagcgttagattatggatacagtattgttcgtggcgttattgctagatgcgtaagtgctagcggatttattccagcatttggttttcatcataaaaatgaattgaatgcctttaatttagttgatgatttgattgaaccatttagaccatttgttgattatgaggtttacttactaaccaaggattataacaatagtggcaacaaattaagtcaacaagtgcgtatagagctagttagtattttaaataaacagattgcgtttgataaccaaaaaactactatgttgaatgccattcagaaattaatttttagtttgttaaaagctagcgaatgtggaagttctgatttcttattgttaccacaacatgttaaataaagatgaccgctttatgcgattaattgtattttttgacttgcctaccaaaactaaatatgataaaaaagtttacactgtatttaggcgatatcttttaaaggatggatttattatgttgcaattttcagtttattcaagggtctgtaaagggctagatagtgtagagtcccatttaaaatatctaaggtcaatattaccaactaagggcaatattcgaatgttgcaagtcaccgaaaaacaatatgcacgtatggaaatattgcttggaacggttagaaaaacggagaaaaatgcaggaaaacagttgttgttattttgaaaaatacacactacaaagccatacaagcctttatatataaggtttgtatggctttgtagtatatcagaccagagagagggagggggctataacaaatcagatgagcaaacattcactaaaagaagtatatcagaccagagagagggagggggctataacaagcaagttggtgcacccgatactggcagtatatcagaccagagagagggagggggctataacgactctaccgatatcctccgccatactgtaagtatatcagaccagagagagggagggggctataacctactaataacatgctaaacagcaacaaagagtatatcagaccagagagagggagggggctataacgcttgacatgcgtaaaccccttcttcccgagtatatcagaccagagagagggagggggctataactggatttagcgaggatggattaaaagcactagtatatcagaccagagagagggagggggctataacgattgtggttattgttgtgggctaaagacgagtatatcagaccagagagagggagggggctataacgcatcagttatggcggcatctgctatagttagtatatcagaccagagagagggagggggctataactcaggcccatcagaagtatcaatagaataaagtatatcagaccagagagagggagggggctataactttgactgaacagtgtcataaagatgcctgagtatatcagaccagagagagggagggggctataacacattatgttacctagacgaaatggtatcaagtatatcagaccagagagagggagggggctataacagacatatgtggacgccatggttcctgtgcagtatatcagaccagagagagggagggggctataactatgttgcccgctatgtgatgaaaaaagttagtatatcagaccagagagagggaggggctataaccttcttctggtagccttgacgcttggcatcagtatatcagaccagagagagggagggggctataacggaacgcgatatgcgtaagcctccttcctcagtatatcagaccagagagagggagggggctataacaatgactattgtgccggcaagtggtgtaaaagtatatcagaccagagagagggagggggctataacagaatgaaagcaccagcgaacgctgaccaaagtatatcagaccagagagagggagggggctataacacgattgcggggcgaacacgcattatttttagtatatcagaccagagagagggagggggctataacctaactgactgaagaaccacagacttagttagtatatcagaccagagagagggagggggctataacgaaggttcaaaactaaagaacatgtaagttagtatatcagaccagagagagggagggggctataacggaacggcatcgacagtgtacaattaaacgagtatatcagaccagagagagggaggggctataacggtactgccctctctgcgttcgctggttgaagtatatcagaccagagagagggaggggtctataacagtatcgttagcagcacccgccatccagtgagtatatcagaccagagagagggaggggtctataacatactcaataaccacacatagtatatcagaccagagagaggggtctataacaataagggaaatcattctatcgcctaaatgcaaatacaacaagattctaattgtggcatattcgccataaattacaaccaactaaagcacaaatcactattgccaacattggcacccaaaaaccccgaattaacggggttagtgggtataagtgttaattatctaaaattgatacttagcgactaatctggtatatccgttggcgttgccttcaattgtaacatgagtatttttattaaataaatgctgagcgttaagcgtgccacgaccattgacacttaacaatgttttcttgctcatcatgtaagataactcgatgttggtgctacggcgtaatttttccagtgcttgattcccagtgtatccataaccctgattgccagtggcaccaaatatgccaccaacccagctcaatgcgtcttcagccgcatctgcagtccaattccaagcgtcttttccagcgttgcctgtgtcatctattgcctgactcgtccagtgtccaccgtcttcaagggcttttccataccaagtaactgcttttgttgcggttgcacaaccaccggtgctaattgcctcaacccctttacaagagtcattcgcaacattttttatgtcttcggtttttgccatccagttccctgtgtcatcataagccccttttgaccaattgactccagtttttatccaagtttcatcgttcgaatcggtttctgtctgggcagatgctttatttgcactagtgctggcgttagtgtttttatcgttgcgtgtttgatttgggcaaaggtttttatttgcgacgaggttgtcgcagaatgttgcgccgtatctgtcttgcatcaatttttcaattgcgtcttcaacatctttatccctttggtcgaaatcaggatcagtgtctgttttcttagtaggcggtattggttctttatcggtattaaccgttgtgttggtgggcggttttggctcagcattaatcgttgtgctggttggtgctactagatttttttttatcattgacgagctatccccattttttttgaactctacagcccttaacaccaatgttgatgctgataatacgaattttccatactttgcactagcgtaaactgatcgggtttttaaaccgtccatcgcacttaaacccaccacaccagacaacccacttttagttttaaaatctttgttgatatcaaagcctgcgttgctattgctaaaccaaagcgaatagttatacttgcttaatgtgcctgaactgctaacaccaacgccattcacatgattttttttgtatgccacatttctttgcaaaaaggcggtattgttatttccaaatttaaagttttgttggcctgctttaaatctcatctcgtcattgccagcattagcactcaatgacagtaccagtgccactattaaaattatcttgttttttttcatattgagacttttgcataagtagggatgattagcaaaatgccgacttggtgattttatgaaaccaaagctatgactgtgtttcataaaattgtcaagttggtgaaaaatggcgttttgatgattattcatatttatgcaaaggtctcatattaatattctccatttttcagtcttgtttgtattgccagcattggcaccacaaaacccgaattaacggggttgttgaacactaattacttttatcgctgaacctaaatagccaacaactgaaactcctattaaacataaccctttacaagcgctattgtccagtacatcataacccattaaaccaatggcgggcttgctcattcttaaacagctagagaatctatctgatgagcgtatcgtcttaccgtttaaacgcaacccttattatcaatgcttctaaagataaaggggacgccacccttttattttttattttaatttctgttaaaataaacctataccaagacaagctagaatcgtatttcctaatactccccatcacattacccagcgaggtaatcgtcgtaatgatgttttcttttgcgataatgacaaaaattattatctagatttactacaagagacctttgcataacccaaccaaaaaaccaccaatctgctaaaataacacccatctaaaacaaccataaaacacccaaaatgtcttggaaaaacacccaacaaaattcatttgcagattctcttgttattgaacataaatctctatcagaactagacgatgtgcataacatcattaactggggcgagatagaacaaacactatcaaatcttatacctcaaaacaggtgcaagcgcctatccacccataatgatgtttaaattctaatcttgcaggcttggtatgcacttagcgatgagcttagaaaaacaaattgctagagatttaatgtttagacgcttcatgatttaagtctaagcgaagcagtgccagacaccaccatttggcgttttagacaattactcaatactgaaaatttgctagaaccactactagaacaaatcaatcatcatttggaacaaaacagcattattgtttctctcggttcaatcaacattattgatgccaccgtcattgaagctaagcaatcacgcaaacgcaagggtaggaatggcaataacactcaagatcctgaagccgactataatgtcaaaatagccgctgatggtaaacgaaaaaccacctatggctataaaatgcatgtcaacaccgatgaagatggttttgttaaaaagatgacttacacctctggcaatgttcacgactcaaaggagtttgacaaattgcttggtatcaataagcacaagcacaagaataaaataaaaacctgtggtgaagtttatgccgatagtgcttatactaacaagaaaaatgatgaaaaacttggtcaacaaaataacaaagttctacacagggcttacagaaatacaccactgacagacagacaaaaacaagagaataaacaacgatcatccattcgctatattgttgagcgcacttttggcttactcaaacaacatcatggattagccaaggcaagataccttggaatagaaagaaacaaaactagagcacaacttattgccatgagtcacaatcttaaaactgggatgaatatttttaaacaaatgcgaagtctaggggattgttacgcccaatgagtgggaggggctaaaaataggggaaataaagcaataaacagtcttagattcacatcataagtgcaacactcaattagtcggtcaaagggtatattaaccactctttaatccgacaagaaaaaggagtgaaacatgcaaaaatatacgcaattgacctacgaacaaagataccatgtttacctactgaacaaacaaggatataaccaaacctttattgccaaatcaatgggtagaaacaaatcaactatttctagagaattatctcgcaatactggcaaaagaggctatctcgccataagcaagccaacaggcttgctgacgaacgacatcaaaagaaaaataaagccatcaaactcacagattccgttaaaaattacattagtgaaaagctaaaagaatattggagtcctgaacaaatcatgggacgcttggaattagataaaagattaaaattagcactgaaaccgcctaccgctttgtcttgcaagacaaagcggtaggcggagcactttacaaatacctgcgccatcagcataagaaatatcgaaaacgctatggcaaaaatgattatcgaggtaggatgcctaatcgcattgacattgatgagcgccccagtattgttgatgctcgcactgcattggcgactgggaagttgacttggttattggtaaaggacacaaaggtggctttgccactcttgctgagtgtaagagtaggctatatcttgcactacccattgccaataaaaccgcacaaaatgcaaatgacgctatcaataaactactcactccacttaaacattgggtcaaaaccttgacttttgacaatggcagggagtttagttggcatgaaaagctagcagaaaatcttgactgtaacacttactttgccaaaccgtatcatagttgggaaaggggcttaaacgagaatcacaatggactgttaaggcaattcttccctaagcgaatggctttggataatgtgagtgagaaagaagcgtttagggcaacagatttaatgaataatagacctaggaaatgcttggggtacaagaccccatttgaggtctttgccaagatgactggcaaggactattttttaaatgga

SEQ ID NO: 3717 - DNA, 14545 bp, synthetic construct
  source 1..14545: mol_type = other DNA
  misc_feature 1..14545: note = Synthetic
taaaccattgcactcacaattgtaataagaattaaagcttgtttttttaggtttctgccgatttcctcataagcaaacaacacaccagcaataggtgcattaaacgctacaatcagtcctgcgctaccaccaatggcaatcagggcatgaattaaaaacttgcgattgagtttgataaaacgattaaagccataaaaaattgagccaccaatatgaatgctaggcccttcaatgccaatgggtgcaccccccaacatcgccaaaaaaatcaaacctatttttcccgctgccaccctaaaagaaagtaattgctcacgaatagatttattacgagagtcagtagcggcaatgagttgtggaataccgctaccctgcacaaagtgacaatactgtttggcaaaataaataatcaccacaaaagtaattggtgtaataataaaatttaaaataggatgttcaacaatgaaagttttaaaaacatgctgtgaaaatccactaacagataagaaaaaagtaacagccacgactgttaaaacactggcaagcgttagtaacgcataagtttttaactcattgggaaattggtgggtaatgtatcttttcattattaaaaatgcttttccataaatatatgtttatggaagatatgtataaaaaatgctttaattcaaggtttataaaagagttttactttttaggatcaattaaagcgtttttttttgtaagcaaatctttcatatcaatggaaggcaggttgtatatgccaaattgatatgattgggtcatacgctctaaatcccctcgtagtttggcaatagagattgagattgctgatagggtttttaaattattaatagcagtttcatctaacccaatatctgttatttgaaatatatagtctgtttttaatgaaataacataaccaggcatttttttacctttgttgttaatatctatttcaatgcgaaccataaattcattcgcctcattagcgtcttctaaaatatcaaaatttaaatctattacataatcagacattgaaagagattctttaataccctgtttagggacaaatgctttaactgataatgagtttaaaaaacttgcttgacattgtaagggtgaattttgtgttttcatattttatgctgcatacaattcaacattactaacgggaaattcttcattactaacgggaaattcttcattactaatggaaattttttctgttacaggaataatattattctcgtttctcacactatctgtaataggttgttttaattcaaagttaatgtctaatgccagctctatttttgccaatgttttgaaattaattaatttattaaaattaaaaaactgagaaatataactggcagatgtgccgattttatttgccaagtctttttgcgtcattgattgctggtctagtacttgctctatttgggttaagtattgccccatcaaatcataagctttagtgtcaattagtgcatcgcctgtgggattgaaaatatcatggaaaaaatcaattgcctcttggttggtatatttagtagtcatagtcatttaccttttttattaaactcttttctttgtatgtaagttttttttgttttttacttttcaataattcttggtttatttttaccataatctttgcaataaattcgtgcattgttaaagcttgttcctttaaatttaattgcggttacatctttaatatttttatcataattttcttgactatagacatcctttggtggttgttttccattacatattcttgaaaagatatggcgtaacttatccatacctttctcatctaagaagtctattatgttgtctttattttcctcgtcaatataaaattctatttcaccatcaccgaataattttaccttatttcttttcataattaacttataagttaatttttattaaataatccggtagaaagatagcgatcgcctcggtcgcaaacgatagtcacaatcaccgcattatccacttgcttagacagctcaatagcagcagacacggcacctccagacgatacgccagcaaaaataccttcttttgtgggcaaatcacgggtggtttgttcggcggcagtttgtgagacatccatgattgcatcaactttagcagcatcaaatattttaggtaaatatgcctttggccaacgacgaatgcctgcaatttttgccccgtcttcgggttgcaccccaataatttgaatggcttggttgtgctttttgagggtttcagacacccccataatcgtgccagtcgtccccatagccgagacaaaatgcgtaacctcgccattggtatcttgccatatttcttgtgcagtggtgttgatatgtgcacctgaattatctctattagagaattggtcaagttgcttgcccctgccttctttttccatggtgtcggctaaatctcgtgcaccttccatccccgctgcttcgctgaccaaaatcaactcagcaccatatgctaccatcgcatctctacgctcttgggagagattttcaggcataatcaatatcattttatagtctttaattgctgccaccattgccaaagcaatccctgtattgccactggtagcttcaatcaaggtatcaccgacactaatttcaccgcgcacctcagcttggctaatcatattcaatgcggcgcggtcttttaccgaacccgcaggattgttaccctcaagcttaagcaaaataacattagatggattaggattaaggcgctgtaggcgtaccagtggtgtgttgccgatggtttgctctatggttttgtgtattatcttttgtgacatagttgcttaaattgtatgttattcggtgcgtttattttaagaaaattgttggggctattattatttccttcatttaatatacttgttgaggtttttttatcaacaccgatgttataaatactaacaaaatagggattatagtccttcaaaaaagaatcgcattggtaaaatttttcaccaatactgcgacaatattctataacacattgtgcgccttgtaattgttgctcaacctcttttgtttgttttttagtagtagaaagttcaataaaaattaactttttgtcattactaataacaacaaaatctgcgcgcttacattgacccacattactagagcagtggaaaaagtgtcttaaatctggaaaactatctgttttaatggcaacgacattctcaggtacatttctaatacagatagagtagcaatcctcttcttgaagaattaattgaggtcttccatatccaccttcttctgcttgaattaatttatcgccaaataattgctgcaataattcaaaatcatccattttattgccaaataatgctttgttgaattttattcattttgtcgatagtgtcatcaaaaccactgtttccaattcccaatttatcgtctatttctaccgaggttagagtgttgtttttggtttttttgctgttgccatctaattttactaattcttttttagcgacatacattttaacttgttgtgcttttaataagtcatcagaacaataaccttcttgactggcaattgtttttaaataatcattttcagagtcagcgttaagcataattaaagtgctgaattccttgataatataatcactgtgggttgtgataaatactttgatacctatattgaccaagttggctaaaacctgagtaataaggcgttgattttcagggtgtaaatttaattctggctcatctataattaacaaatcattaggtttggcaatatgtttcatgtaaaaaccaagatctagcaatgagcgcaccgcactagagctttctcctatttctagttttacccttgatttttctggatgaaagtttaaattgtcgtctttatctaattggtatttaccaccaagaatacgattaaatttctttagaatctctgggtgttcttttgtgataaaactgtcttttttagatatacttgacaactttctttgaaattctacatttttttcaactggaagagcataatcatgataatttttaagcaataattccaatgggtcaatgtctttatttttatgcatttcttttaacaatcgagtgcgagcaaaatctagctcatctttaaaaattgccgcccctgttcgttctgcacttgcaataaagacattcggcaataaattatcaaataaaatttcaataataaaatttgcaataatatctttaataatgtgatgtggaaatgttattttctctttgctcaataaggaaatcaataagatattactattttcttctttggttaaagaaaacatttcaccctctccactaccaatagtttgtttaaattctttttctaaaggtggatttttagcaatttcaatgctaaatttagaagtttgaaacaaactcttttctgaggcaaaagtgattgctaattgtttgctgtattcttggcatgctatttgtaaaatatcatcaatttgagtggcgtaatgcattaaatcgatggatgtactgccgtcacgcaataaatcttcaacactggcatcaggaacagttattcgtaaaaattcgttttttaaatctaaaaagccaaataaagcataggttgtgtaagttttccccgtgttgtttttaccacaaatgatcgttaaatcacctatttcaaattctgcttgtttgattgccccaagattttttagtttaattttcataaaattacatattatctaaaattgcatttttaacttcttccatcacaggattaatattaatcattgtatctttgcattgtgtaatcgcagtatcagggtcttttaagccatgacctgttaaggtacaaacgattgtagagccttcaggaatcttgccacttttaatatcacgcatcgcacctgctagtgaggtggctgaggcgggttcacagaaaataccttctttttcagttaatagtttttgtgcgctcaaaatatcggtatcacttaatgcgtcaaaccagccattggattctttttcaacttcatgagccaaatcccaactttgcggatgaccaatacgaatagccgttgcaatggtttcaggattgtccaccattgccccttgtttaaaaggcgcagaaccttctgcttgataacctaccatggcaggtgttttggcggccttgccatcttggtggtattccttgtagcccatccagtgggcggaaatattacctgcattgcccacaggtaaacagtggtaatcaggggcatcgcccaattcttcaacaatctcaaatgccgctgttttttgaccttgcagacgaaacggattgattgaatttacaatggatacgggcgcatgctcagccacttcttttaccaagcgcatgccatcgtcaaaattacctttgatttggataatgacagcgccatgaatcatggcttgtgccaattttcctaaggcaatcttaccttctggaatgagtacgaatgctttaataccagcgcgcgctgcataagccgcagcagaggcagaggtattgcctgtagaggcgcaaataatggcttttgagcctgcttctaccgccttagttactgccatcgtcataccgcggtctttaaatgaaccggttggatttaagccttcgtatttcacataaatatccacttttttgcctagtagggtggggatattttctaagcgaattagtggtgtgttgccttcacctaagctgataaagtttgtgttttcatcaacaggtagtctgtctttataatggttaattaagccggtatatctcatcatattgtccttttaatcgagtgtttctacatgaatgattttaacctcttcttggatagaatcatgttgttggattgctgctgccgctgcattaatatctttggtttttacttggttggtgataatggcaatatgcgcattgtcttgtgcatcaatttgcttttgtatgactgcttctacactgatatggtgattggcaaaaattgcggtaatatctgccaatacgcctggtttgtcagtggctaataagcgtagataaaaaatgctctcaatatcatcttggttttgatagggggttgcttcaagtgactgccaacccaaaacatcacgactgagcgagcctttaattatgtcaaccaaatcagcaatcacggcactggcagtggcttcatcgcctgccccagcaccataatacagcgttggacccaccgcattgcctttgactaatacggcattcatgaccccatcaacatttgccaataggcgagtttttggaatgagtgttggatgtacacgcatttgaattttaccgttgagttttttggcaatgcctaagtgtttgatagaataacccagctctgtagcaaaagccacatcttcaccactgatttgactaatgccttgtgtggatactttgtcaaattgcaattcacaaccaaaagcaatggcggacaatatggctaatttgtgcgctgcatcaataccttcaacatcaaaagttgggtcagcttccgcatagcctaactcctgtgcttctttcaacacatcagcaaaatctctacccttatcacgcatctcagtcaggataaagttgcctgtaccgttgataataccagcgaccatttcaatttggttggcactcatcccttgctctaaagctttaaggattgggatgccaccagccactgccgcctcgaacaataaatgcgcgttgtggtcttttgccaaagccagtaattcattgccgtgtgtggcaatcaaggctttattggcagtaatcacatgcttgccatttttaagggctgtctctaccaattctttggccaaagtcgtaccacccattaattcgagcacaatatcaattgagttattgttgacgatgtcaaggggcgattgagtgagctgaatgccttttgtcgggcaaatacgagattgattaatatctctaactgcagcgtgcgttacttgtatttgtgcgcccgtgcgacgcataatttcggcttgattttttgccaagacattaaccacgccaccaccaacggtgcccagccctaaaattcctatattcataagtttagtcctatctatgaatgaacaaaggttggaattataccaatagaccactgcattagattatttgttgagtgtaattgccacgcatttaagtgaacgggaatattgtgcaggcactttatgttgattgtcaaacaacacaggggctaaagatttgagcatgtcttcataaattgactttttgaagtcaacgactgcttcgatagggtgccaataatccacccattgccaatcgtcaaactcaacatcagagtgtgtgtctagtttgatatcattctctttacccgtaagttttagcaaaaaccatatctgcttttgcccaatacaaagtggtttttgtctgtgtcttatgtgttgttttggtaaatcataacgcaaccattttggtgttttagcaaccaaatccacatgcttaggtaagagtccaatttcttcatttaattcacgaaacaatgcctcaagttcactctcacctttgttaatgccaccttgtggcaattgccaagcatcctgctggtggcgcttggctaagagtatctgctttttgtcattggtaataacgataccaatattggcacgatacccttctttatcaatcataagaaggggtggtttgttgttgagtgactaatcgtcgccaaaagcacctaaaatatgcagcaaactcgtaaacatattgtgtagtgctaaatatagaccaaccgttgctgagatgtaattagtctctccgccattaataatagcggacatttgtgaaagcataaatgcacccatgattaataccacagcaaatgaaatggccaagccaacaaaagaagattcaataaaaaatatattaactaaagacaaaacaataatgccaaccatagcaaaaaatatcatgccattgagaaaactaaaatcttttttggtattttgtacataaaagctaattgcaaagaaggaaacgccggtaccagtgagtgcttgcatgaccaaacttgcgccatttggcattgctaagtaatgtgttaacatcggaccaagggaatagcccaataggcctgcaactgaaaatgcagttaaaatccccatattgctattttgagttcttggtaagacaaaccaaatgaccgcaattgctgcaattaaactcacgattgccgagctaaaacctgcaccaatagagattgaaaaccaagaagacaaaccaccaaacaccagtgtgtatgataataatttcatggtatctgacaaaactttatttttaaccttggcaactctcattgttgccatatttgcaaatgtattcataatttatcctttgttgttaaccgtgtaaaatgatttaattttatactaaaaaaccaagatgaagctgattttaggcttaggaaaaacaggtgtttctattgcacggtttttaaccaaacaacaggttgcttttaggatagcggataatcgaaacgcccccccatttttattgccatttaaaagccaatttaacacagaaaatttatttttaggcgactggaagcccgagttgttaaataatattgatgaggttattattagccctggaatcgctcaaaacgaggctattgtggttttggctagggttaataacatccctgttattagtgatatagagttattttcacgccatgccaatgccccaattatcggcattaccggctctaatggcaaatcaagcgttacccaactactcggtgaaatgattgccaatgatggcaacagagtcgctattggcggcaatatcggcaagccagcattagagtgtttaagtgataaaattgattactatgtattagagttgtctagttaccaactagattacacacaaaatttaacactattaactggcgtggtgctcaacatcacccctgatcacctcgaccgataccccagttttgaacactatattaaatccaaactgagtctataccaatattgccaacatccagttattaacgcagatgagccactcaccccaacgctagacaatgccaaatattttggtatggatatgcctaagcaaggcagtgattttggcacggttacctgtcatggtagttgctatattctaaaaggcgatgacgcactgatggatgcagatgagttgccacttatcggacaacacaatatagtcaatgtattagcagcacttgctttgggtaggcaaattgggcttaacaccgattcaatgatgataaccatcaaaacctttaaaggcttggaacaccgcatagagtgggtcacaaaaaagcaaaatattgattattacaacgactccaaagccaccaacgccatagccactataaccgcaatcaaggcattaataaaccaatacgaaaacattgtactcattgcaggtggtatcaaaaagcaagaagactacaacgctttatttgcattgattgataaccatataccccatgttgttttaatcgggcaaagcgccaaagagctaggcaacaacatccacactgcaaaagttacctatgccaactctatggaagcagcggttaatgttgccagtaccttaattgacaagggtgcaattttgttatccccagcttgtgcgagttttgatatgtttgatgattttgaacagcgaggaaatgtatttaaggatattgtcaaataattaaaatttgaatcttaaataaaaaaatatcaggacaagcctgatattttttatttagcctaatttataattctaaggaaggactaaatattttaaaaaggtgatttcttattgaggataatattaaatattagcgcctatcggatcaagaaacctagaaaccttattatagtaaatcctccctctctctggtttgacacactataaaggtgtattataaacaactttttatgcaccggagtaaaagatgaaaatattaggcgttgatttaggaattgcttcagttggctgggcattggttgatgacaagaagaatgaaattattgactctggagtgcgtatttttactcagtctactaataaagatgggaaaactcttgcttccgttagacgagaatttagaggtggtagaagagctttaaatcgtaaaaaacagcgacttattcaattaaagaaattatttattagcaataaattactttcaaagtcagaatttatgcacttgtttaatagtgaaaagcgtttagatatttggcaactacgagcaaaaggtttagagaggcaacttgataataaagaatgggcaagagttttgtatcatattgccaaaagacgagcttaccaatctaatcgaaaagcagaagaaagtggcaacactgataagaaaaaagttttatccgccattaaaacaaaccaagaaaagatgaagcaaggaggctatcaaaccattggcgaaatgatatatagtgaaaccaaacacccgagtagcggtagagttagacgtaataaaaaagacaattatacttggtcagtatctcgtatttttttaagggaggaaattgatgtgttgtttgaaaaacaagcggagcttggtaatcaatttaccaccgacgaattaaaacaaaaatataaacagattgtctttactcagcgtccaatacagtttaaagctgatttagtaggaaaatgcacttttgaacaaggcaaatatagaggtgcaaaaaattgtttttcggcagagaaatcagttttacttaataaaataaacaacaccgatttaattgatgaaaatactggtgagattaagcggttatttgagttttcagcacttgataaattgcttgatattttttacaaaacaaaagaagttaagtatgccactttaagaaaacaattagaaatatcgggtaattttgaatttaagcaattagactatcatcaaaattttgaatataaaaccaatattaaagccaaaatagttgatttttacaagttagaggattggttgacgccagagcaaaaagaaaaacttgaaaaacaagtgctagacgataaaaaagaaaaatttaaacgctataaatatagcagtattcgcagtattttatcattacaagattctcaaaaatttaagggcgttaaatatgatactaaagttgaggacactgtttttggtaaattaaatggttatcactccatcaaaaaagaattaaatcaaaaggtatttgatttattgtttaccagtaagattaaatttaacaaaatagcagaaattattacctatcaaaaagacgataaaagcgcgactcaagatttagaagaacaagtttttaaaaatttagacttggacgaaattgctataaatgaggcgattgatggtttgttaaatatatctttttctgggtttaacaatctttctgtgcaggctcttgataagattatccctcatcaggaagaagggcttaaatatcataatgctattaaagaggtctatgagcatcactctcattttaaaaatactaatccgcagcaatacctacgaccactcaacaaggaggagaattatcaaattaccaatccaacaattaagcgtgttttttctcaatttagaaaggtactaaatgcggttattcgtaaacatggtagttttgatgtgatgcatattgaaatggcaagagaattaaaaaactctaaaaaaagaaagtttgaaattgtaacaggacaaaaagaatatcaacaagaaaaagcagcaattaaagcacaatttttagagatttttgtctatgaaggaacaggaagggagcttttaaagcttagactttacgaacaacagcacggcaaatgcatttactctagacaatctattgaaatagataggctattagaggatggatatgttgaaattgaccatatcttaccatggagtagaacttttgataacagtttaaataataaagttttatgcttgaaagtagaaaaccaaaataaaaccaatcaaacaccatttgaatatttggcaaatggcgaaaaaaataatagtgagtggcaagaatataaaaattatatcaacagctttgttaatattaaacaggcaaagaggaataaattactcaacactaacctccctaaaagacgaggcaatgatttaaccgataatgatattgaaaatccagaaagtggttttctagcacgcaatttaaatgataccgcttatgcttctaaatttattaaaaactttgttgaacgaaatttagcattcttagaaaattcagaaatcaaacaaaaagtaaaaactaggaatggagcattgacaagccagttgcgttataactggggcgttgaagcaaaaaatagagataataatctacatcatgctgaagatgcaattattctagctttttcaactcaaggagaagtgcaaagaatgtcaactatttccgccaaaagagaagattttaaatatcaaaccactgatgaaagactagttaaattcactccgccttttgttaattttaaaaatgctttagatcaaagtattaacgatatttttgtctcttttgcaccaagacgaaaagtagctggagcagcacataaagctacaataaaatcaaaaaatataggtggaaaatataaattttccgttaatcaaggtgtggcagaaaatggtgtaattcaaagagttgacgtgtttaaaaatgcaaaaaataaatatcaatttgtagtattttatccagcagatttttataaagatgattttccaaaattggatttatcgggtaaggaaatagatgaagactctaagtttttattttctttgtttaaagatgatttgattaagtttgaaactaaaggtaataaaaaaaatccaagtagagatttgttggcttattttaaatatattcaatcagatgggaaaattgcttatcaacgacataataaggcagaaatagagcgaaaaaaatctgataacaaaaaaggctttatagatattttacttgcaacaaaaagtgatttacaatctatcaaaaaatatcaagtgtctatattgggcgattaccaagaagtaattaatgaaaaacgcttgccactgatcaagcaaatgcgtaaaaacaaatcaaagcaacaaaaataataatgtcatggcaaactattttaattagcaatccttgtaaactttctattaagaataataatattttattaaggcgtttagatgaagaagatgttattgttgtcattagcgaagtttctgcagttgttattgagaacccacaagttactttaactgcagtttttatggcacattgcgcaagttataatattgccgttattttttcagatgaaaagcatatgccaataggtgtatttcaacctttttatcagcatagtagaatgacaaaacatgcttttttacaaaacaattggtctaaatcttttaagaatagagcgtggcaaaaattagtaaaagccaaaatacacaatcaacaacaaacactggtaaaaataactcaacagcctaataagcaattaaatttaattgcatctaaagtgcaatcagcagataaaaccaatcgtgaggcgcacgctgctactatttattggcgcattctatttgaagattttaggcgcaacaatgtggatgatattagaaattcagcgttagattatggatacagtattgttcgtggcgttattgctagatgcgtaagtgctagcggatttattccagcatttggttttcatcataaaaatgaattgaatgcctttaatttagttgatgatttgattgaaccatttagaccatttgttgattatgaggtttacttactaaccaaggattataacaatagtggcaacaaattaagtcaacaagtgcgtatagagctagttagtattttaaataaacagattgcgtttgataaccaaaaaactactatgttgaatgccattcagaaattaatttttagtttgttaaaagctagcgaatgtggaagttctgatttcttattgttaccacaacatgttaaataaagatgaccgctttatgcgattaattgtattttttgacttgcctaccaaaactaaatatgataaaaaagtttacactgtatttaggcgatatcttttaaaggatggatttattatgttgcaattttcagtttattcaagggtctgtaaaggactagatagtgtagagtcccatttaaaatatctaaggtcaatattaccaactaagggcaatattcgaatgttgcaagtcaccgaaaaacaatatgcacgtatggaaatattgcttggaacggttagaaaaacggagaaaaatgcaggaaaacagttgttgttattttgaaaaatacacactacaaagccatgcaagcctttatatataaggtttgtatggctttggagtatatcagaccagagagagggaggggtctataacaaaactagcacttgctcaatggggagatagtatatcagaccagagagagggaggggtctataacgaataaaa

SEQ ID NO: 3718 - DNA, 13108 bp, synthetic construct
  source 1..13108: mol_type = other DNA
  misc_feature 1..13108: note = Synthetic
cttcattattggatttagccgagcaagaatctagcactatattgcctggtttcacccatttacaagccgcacagcctgtcagttttggtcatcatatgatggcgtattttgagatgttatcgcgtgatgctcaacgcctgattgattgtcgccaacgcaccaacgcaatgccactcggtgccgctgcccttgcgggaaccacttatccaattaaccgagttcgtaccgcagaattattaggttttgaaagcatttgtggtaactcactcgatgcagtgagcgaccgtgattttgccattgaatttttaagtgccgccagtattattatgatgcacctttcgcgcttttcagaggaattaattttgtggtcaagtgcacaatttaattttattgaattgcaagacagtttctgcacaggctcatcgattatgccacaaaagaaaaaccccgatgtccccgaattggtgcgtggtaaaacagggcgtgtgtatggcaacttaaccgcaatgctaacgattatgaaatcccagccactcgcttacaacaaagacaatcaagaagacaaagaacccctatttgatacagttgaaacacttaaagcctgtttgcgtgtgtttgccgatatggtgcctgccattcaagtcaacggagaaataatgctcgaatccaccaaaaaaggctacaccacagcaacagatttagccgattatttggtcaaaaaaggtctgccatttcgggatgcacacgaagtagtaggtaaatcagtcgcctatggcattcaacagcaaaaagatttaagtgcgttaagtttaaaagaattacaaacatttgacccacgaattgaaagcgatgtatttgttgtgctttctttggaaggctcactctgtgcgcgagaccacttcggtggcactgcgccaaatcaagtcaaacaagccattgaaaccgctcgaagaaatcttaaatgaagataatttttgcaggtacccctgatttttcagtcggtgttttatcggcattaatcaacgctgagcacgatattgtcggtgtctattgtcagcctgatcgccctaaaggtcgtggtcgcgtgatgaccgcctgccccgttaaagatgtagcattaaaacataatctcactgtttttcaacccgaaagtttgagaaatgaagacgcacaacaagtcctatctaatctcaatgccgatgtaatggtcgtggtcgcttatggtcaattattgcccaaagtcatattaaacgccccccaatacggctgcctcaatattcacgcctctctactccctcgctggagaggggcagcccctattcaacgagctattctcgcaggcgataaaaccacaggcattggtattatgcaaatgaatgaaggtttggatacaggagcaattttattggaaaaaacctgtgaaattatccacacagatactgcacaattcctacatgacaaactggcaaacttaggtgctagagcaataattgaagccctagaaaatattgaagcactaacacccacaacacaaaatgaagtagaaattacctacgcaaaaaaactcaaaaaagacgaagcatggatagattggacgcaaactagtgaacaaatcaaccgccaaattagagcattcaatccttaccctatcgcccaaacttacgcaaacagtaaaaaatttaacgacaagatattgcgtatcctatctgccaccctcatcaccaattataaagacaaggtctctataaaaaatccaggagaagtcgttgaatttactaaaaaaacttgccttgtagcaacaggcgatggaatattaagcttagaaaccgtgcaactttcaggcaaaaaagcactcaatatcaaagacttcaataatgcccaccaacttactcggctattttagggtcaacccactgcatactataccaataatatcgacccttttgcttactcggcatcgtgcagttatacttgttacgacggtgagttaagcgttttttcgccgtaactttaacactttcactgccctgccaaatcatatccacaccgccgttagcaaagcaattaagattagctttttgatgtttattcaaaggttttaaaaaattcaaggttagagtcggaggattttgagtaaatactgggttaataatatcgtctttaatcagcatcggcaaggtgttaattttggttttaaagctggacattttggcatagtgcgccgccatcggaaaacgcgggaaattctgccgatgactcgtagttgatactacgccagattgctgtccaaatgcgctataccccatatgtttaacttgctttagaatctctaaactcgcctccccataggggtaggcaaagattttattgcgttgccccaattcttgcacaaggcgtttttgtgcgtgtgtaatttgtgctttaatttgctttttattcaactccaataaatgtgcatggtctttggtatgattataaaactgcatcgtttcaccttgaatgtccctcattgtttgccacgacatcatcgccttatattttttatccaccgcattggttgagacaaaaacactgagtgacatttgatattttttcaacaaaggataagcactctccgcaatagatttgtaagcatcatccgccgtcaacaccacacatttattcggcaaatccttatccaaactctcaagcatcgtttccaacttcaacacttgaaagtcattctcctgcaaatattgcaaatgttgctcaaataatttcggactaacgctagtggattttggcgtgctatcagaaaaatgatgatacaacaaaaccacgcaactgttcgcacttgccaccgaagtaaataacagaaaaaataaaaatttaagcattaacaagttccaattttgaatttttaactcgcttattctatcagagacctttgcacaaatatgaataatcatcaaaaatccatttttcaccaacttggcaattttttaaactctgccttagccctgctaggactgggtttaagaaaatcaccaatttggcaaaaactgaattttgctaatcatccctatttatgcaaaggtctctataaataattatattaaccaacattaagacattataattacctctgaagttggtcggatagtcgctggtggtttttccatcagaggaaagtccgggctccatagagcaaagtgctggctaacagccaggtatggtgacataatggaaagtgctacagagatttagactacccattattgggaaaaggtgagaaggtgcggtaagagcgcaccgcacaattggtgacaattgtggcaaggtaaaccccacttggagcaagctcaaataggctaccatcggtgctgctcgcacaaggtagcgggtagagtgctaaagtgtattggtaacaatccacatagatgaatgattatcgacaacagaacccggcttatagaccaacttcactaattttacgacagttgcatatctaatgcaaaggtctcaagttgaattaattttttcgttttttatccttgcaagcttatttaagttgtgccaagacagcacgattgttagaattataatcttgaaaggttttaatatgagtgaatttttgttttaataactcaataatcattttttgctgattatatccgtgttccaaaagtaaaaatccgtgtttatttaggtgagtgggcgtttggttgataataattttaatatcatccaacccatcttttccagcagtcagtgccgtaataggttcgtgggttaaatcatctaaatatgcatcaccttcctcaatataaggtggattagaaataataaaatcaaaggtttgattaggcacagcctcaaaccaactgccttgttgaaaattgatttcattggcaataatcgtggcattttcttttgctacttcaagcgcatcttcagaaaaatctgttgctgttattttccactgtggatttttgtccgccaaagtaacggcaataatcccactacccgtgcctaaatctaataaattacaagatttgttcttaaataaatccagagcaatatcaatcaataattctgtttcagggcgagggatgagcgtatcgggtgtcactttaaagtccaaatggtaaaagccctttgtgccactcaagtaggcgaagggcgtgccactttctcgctgttcaatcagtatgtttaatgccgttttttcttcgtcattcagcacatagtctttatgagtgattaaccatgcgtgatttttttgcaatgccaactctaacagtggcgtgatgtcggtaaattgacgagtcaaataatcgccgacactacgaagtttttgcatcaatccaatttttgatagcaacaatcaagcctaaaccaatgaaagcacccggtggtaaaatggctagtagcgtaccttgataatcttcaaatacggtaacactgagtgtattgcccaactcacccaagagtaaagaagactggttaaatagggtgccagagccgataagttcacgcattgcaccgagaataatcagcacgatagaaaaaccaatccccatcatcaagccatctaatgccgatttaccccaagtgtttttactggcgaaggcttcggctctacccaaaatggcacaattagttacaattaatggcacgaaaataccgagtattaaatacaaatcataaaaatatgactgcattgccaactcaacaatcgtcacaaatgaggcgatgagtaggacaaaaacggggatacgaatttctttacgaatgttatttctaaaaatagaaattgttgtgttcgacgccaccaacacaaaagtcgtcgccaaaccaagcccaatcgcattcacaatattattagtcaccgctaacaacggacacaagcccaataacgcaactaaggcttggttgttattccataagccatttttggtaattttgatgtaatcttccatagggttgattatatcaatgaatacctacaaaaacacaatttcgttattagatacactaccgtgaattgttgaattgggcaaaaattcaccagagagtattttttgcgacagtggattttctaataattgctgaatcgtgcgttttaatggtcttgcaccgaacatagggtcgtagcctttatcgacaattagggtcatcgcctcatcgctcaattcaagttttaggtctaaatttgccaaacgcgactgtaaagtttctacttgtattttggcaatgcctttgatttgttctttttcaaggctattgaaaactacgatttcatcaatacgattgacgaattcaggacgaaaatgttcgccgacaatttgcatcagttcgctggtcatatctttgcccggattttcttgaatcaagtgtgaaccaagatttgaagtcattacaatcaccgtattcttaaaatcaacagtgcgaccttgtccatcggtcaaccgcccatcatcaagcacctgtaaaagaatgttaaaaacatcaggatgtgccttttccacttcatccaacaggacgatagaataaggtttgcgacgcacagcttcggtcaacataccgccttgctcatagccaacatagcctgggggtgcgccaatcaaacgggcaacagaatgtttctccataaattcactcatatccacacgcacaatcgcttgctcagtgtcgaataaaaagtctgcaagtgccttagtgagttcagttttacccacccctgtcggacccatgaataaaaatgaaccatcgggacgattagggtcagacaatcctgcatgagaacgacgcacagcatcggcaatggctttcacagccttgtcttgaccgactagacgctgatgaataattgactccatttgtaaaagtttgtctttttcaccttccatcattttatccacaggaatccccgtccaacgcgcgacaatatgggcgatttcatcttcggtaactttgttacgaagcagtgtcatttcttcaatatctgcggattcagcctcggtaattttagcttctaattcaggaattttgccatattgcaattcactcatttttgccaaatcattgttacgatgtgcggcttcaaggtcagtttttgcttgctctaattcctctttaagatgttgtgcaccttgcaccacagatttttctttcttccaaacttcttcaaaatcagcgtattctttttcaagggtagcaatgtgtttttcaagctctttgaatcgttcttttgacgctttatctttctcttttttcaacgccattctctcgattttgagttgcaccaatttacggtcaagtttgtccatcgactcaggctttgaatcaatttccatccgaatttgtgatgccgcctcatcaattaaatcaatggctttatcgggtaattgcctgtcagtaatatagcgttgagaataagttacagcagcgataatcgcagggtcagtgatttccactccgtgatgcacctcatatttttctttcaaaccacgcaaaatagcaatagtatcttcttcagtcggttcatccaccaatactttttgaaaacgccgttccatcgctgaatctttttcaatatattgacgatattcatccagcgtcgttgcccccatgcaatgtaggtcgccacgcgcaagagcaggcttgagcatattgcccgcatccatcgaaccttcgcctttgcccgcacccatcatcgtgtgcaattcatcgatgaacaaaatcacttgtccattttccgcttcaagatctttgagcacggctttcattctttcctcaaattcgcctttgtattttgcacccgccaccaacgccgccatatctaaggacaatagacgcttgcctttaaccccttctggcacttcgttattgataatgcgttgtgccaagccttcagcaatcgccgttttacccacgcctggctcaccaattaaaacagggttatttttagtgcgtcgttgcaacacttgaatggcacgacgaatttcactatcgcgtccgataacagggtcaagtttgccatcttgtgcttgttgcgttaggtcaagtgtgtatttattcaaagcatctctttgagtttctgcattttggtcattcacggtttctcctcctcttaggttatccacggcagccgacagattttgcttgtcaacgccagatttctttaataattttgtcgtcgtatcgttaccattaataatggccaataaaaataactcggtggacaaataagtatcacctttatctgtggctaatttttccgtggtattcatcagtcgcaataaattttgcgaaattcccacatcgccattcggattattcataactgccaactcatcaatagcattatccacttgggttttaagttgcttagtattcacattcagcgttctaatcacattactaacactcgacgcataatcacccagcatcgcactcaatacatgtgcagcctcaattgtagtgtgatttttactcaccgcaattgactgtgcagtgcccaaatcttgttgaaattgtgaagttagtttattaatatccataatcgtataaattttcctgagttacgctctatttatgggatgatattgccaacttcaaggacaaatctacaatcattatgttaaatttagtattattcgaaccagaaatccccaacaacaccggcagccttattcgcctaagcgctaatatgggtgcgaatttgcacctgattaaacccttcggctttgaaataaccgacaaacgcctaaggcgggcagggcttgactataaagaattagcccaagtcttcgaatacgagaattttgaagattacctccaacgcgccaaacccgagcgcatttttgcagtcagttcaaaagtaaaaaccaattatgcaagcgttaaatatcaagcaagcgactctttcttattcggcccagaaacacgaggactaccacaagagatattggacaaatttacaggcattaccttgccaatgcaagacggctctcgcagcctcaatctgtcaaattgtgtgtctatcgtggcttacgaagcatggcgacaagtagggtttgttggggcaaaagaataatttgaacgccaaactgacatcacgcaaactgctgtcgatattgctagtcatgcagattaagaagccgtgctattcttcccagcctgtgtcagttttgatatatttgatgattttgaacggcgtgagcgagtgtttaaagactgcatctaaacaatgtagatataaaaaaaccctacacaataacattgtgtagggtttttaaaaaaagtgtgatttcttattgaggataatataaatattagtgcctttcggatcaagaaacctagaaaccttattatagcaatcctccctctctcttggtatgacatactattaaagggtattatatataactttttacatagtagagaaatatatgagaatactaggtgttgatttgggggttgcttcggttggttgggcgctggttgatgacgagaataatgaaattattgattcaggggtgcgtatttttacccaatctaccaataaagatgggaaaacgcttgcctctgttagacgagagtttaggggaagtagacgaggtttaaatcgtaaaaaacaacgacttaaccaactaaaaaagctgtttatcgctcataaattactttcaaagtcagagtttaagcacttgtttgatagtaagaaccgcttagatatttggcaattacgggcaaagggtttggatcgacaacttaataatcaagagtgggcaagagttttatatcatattgccaaaaggagagcttatcaatctaatcgcaaatctgaaagtaacggagatgatagcaagaagaaagttttatctgcaattaatatcaatcaagcaaaaatgaatcaaggtggttatcagactattggtgaaatgatatataaggaaaacaaacacccaggcgatggcaaaatcaagcgtaacaaaaaagacaagtatacaaattcaatatcccgtgatttattaagggatgaaatagatatattatttgaaaagcaaaatgagtttggcaatcaatatacggacgcaacatttagagacggttataaacaaattgcatttacacaacgcccaatacaatttaacactgatttagttggaaaatgtacttttgaaaaagatgagtacagaggggcaaaaaactgtttttcaacggaaaaatcaaccatactcagtaaaataaacaatactgatttaattgataaagatactggcgaaattgtgcgtttgtttgaatatgcaacccttgaaagtttgcttgatgttttttatagcactaaagaagtgaaatacacaactttaagaaaacagttaaaaatatcggataattttgagtttaagcaattgaattatcatcaaaattttgaatacaaaaccaatattaaggctaagatagttgatttttatcagttagaagattggctatcattagaacaaaaagttttattggaaaaacaagttttagatgacaaaaaagaaaagtttaagcgttataaatatagcagtattcgtagtattttgtcattgccagattcgcaaaaatttaacggtgttaaatatgatactaaagtcgaggatactgcttttggtaaattgaacggctattattctattaaaaaagaattaagtaaagatgtttttgaattgttatttgttgataaagataaatttaataaaattgctgagattttaagttatcaaaaagatgacgatagtgccactaatgacttgaagtcccaagtttttaatggtttaaatttagatgaaaatattatagatgaagcaattaacggcttattaaatatatccttttctgggtttaataatttatctattaaagcacttgataaaattttaccttatcaagagcagggttttaaatatcatgatgctgttgcagaagtttataaacaccattctcaatttaaagccaccaacccacaacaatatttacgacctctcaataaagaggaaaattaccaaattactaatccaacagttaagcgtgttttttcacaatttagaaaagtgttaaatgcagttattcgtaaacacggcagttttgatgcgatgcatattgaaatggcaagagagttaaaaaattctaaaaaaaggaaatctgaaattgaaacgggacaaaaagaatatcagcaagaaaaagaagcactcaaagcaaagtttttagaaaattttggatatgaaggttcgggcagagacttgttaaaattaagactgtatgaacaacagcatggaaaatgtatctattctaaaaaagaaattaaaacaaatagactgctagaagatggatatgtagaaattgaccatattttgccatggagcaggacttttgataatagtttgaataataaggctttgtgtttgtctgctgaaaatcagaataaaggcaacaaaacaccatttgaatatttgacaaatagcgataaagacagtgaaaaatggcaagaatataaaaattatgtgggtagttttgccaatattaaacaggcaaagagaaataaactacttaacaccacattacccaaaagacgaggcaatgatttatctggtgatgatattgaaaacccagaaagtggttttttagcacgcaatctaaacgatactgcttatgcttcaaaatttattaaaagctttgttgagaaaaatttaatatttgctgaaaattcagaaattaaacaaaaagttaaggttagatcgggtgcattaaccaaccagttgcgttataactgggacattgaagagaaaaatagaggcaataatctgcatcatgctgaagatgccattattttggcatttgccacacaaggtgaagtgcaaagaatgtcaaccatttctgccaaaagagcagacttcaaatatcaaactgccgacgaaagaaaaattaaatttacgccaccttttagtaattttagggatattgttgatgagagtattgataagatttttgtttcatttgcaccaagacgaaaaattgcaggagcagcacataaggcaactattaagccaaaagatactagtgggaaatataaatttccagtcaatgatggtatggcagaaaatggagtcatccaacgagtagatgtgtttgttaataataaaaacaagtatcaattcgtagtgttttatccagctgatttttataaagatgattttccacaattggatttgaacggtaatgaaatagatgaaaatcctcagtttttattttctttgtttaaagatgatttgattgagtttaaaaccaaaaaaaccaaaaacaaagacagtaaacatcttttggcttattttaaatatattcagtcagatgggaaaattgcctttcaacagaattataaggctaaagctgaaagaaaaaaatctgataataaaaaaggatatacagatgttttgcttgcaactggatttgggctagtgtctttaaaaaaatatcaagtatcggtattaggggataaagtagaagtaaaaaatgaaaaacgcctacctttgattaaacaaatgcgtaaaaataaggcgaaaaaataaaatgtcgtggcaaacgctattaatcagtaacccttgtaaattatccattaaaaatggtaatattttgctgaggcgtttagaggatgaagatgcaaatattgccattagcgaagtatctgctattgttattgaaaatcctcaagtaacgatgactgctgtttttatgtcgtgttgtgccgataataatattgttgttattttttcagatgaaaaatacacacctattggcgtgtttcaccctttctatcaacatagtagaatgacaaaacacgcatttttacaaaataactggtcgcaatcttttaaaaatagagcgtggcaaaaaattgttaaatcaaagatattgaaccaacaacaaactttaataaaaattactaaacaacctaataagcaacttagtttaatcgcatctaaagtgcaatcagcagataaaaccaatagagaggcatatgcggcgacaatttattggagaacattgtttgaaaattttaagcgcaataatactaatgatattagaaactcagccttagattacggctatagtattgtgcgttctgcgattgctaggagtatcagtgctagtggttttgttccagcgtttggttttcatcataaaaatgaattaaatgcttttaatctggcggatgatttaatagaaccttttagagcgtttattgattttgaagtgtatttgctcaatccatctaagacaagcattaagctaacctctaaaatgcgtgctgatttggttaatatattaaataaacaggttgtgtttaagcaagaaaaaacaacgctattaaacgctattcagatgacggtatttggtttgttaagtgctagcgaacataaaaatattgatttattatcattgccaaaacatgtccaataaaaatgatcgttttatgcgattaattgtattttttgacttaccaaccaaaacaaaacaagataaaagagtttataccgttttcaggcgatacctattaaaagatggatttattatgttgcaattttctgtatattcaagggtttgcaagggattggatagcgtagaatcacatttaaaatacttaaaatctatattaccacccaagggaaatattagaatgttacaagttaccgaaaaacaatatgcacgcatggaaatattacttggagcagttaaaaaaacagagaaaatcgcaggcaaacaactattattattttgaaaaacgcacactacaaagccacacaatccttatgtaccaaggattgtgtggctttgtagtatatcagaccagagagagggaggggtctataacaaaccttagtagatggcgacaccgttaataagtatatcagaccagagagagggaggggtctataactttgtgtgccttgccagtcatacacatctgagtatatcagaccagagagagggaggggtctataaccagacattgtcctgtatggtggctctgctgagtatatcagaccagagagagggaggggtctataacgaggcaaacggaggt

SEQ ID NO: 3719 - DNA, 11661 bp, synthetic construct
  source 1..11661: mol_type = other DNA
  misc_feature 1..11661: note = Synthetic
tatgcagtcatcgcatcacggcgttcttgtgagagattttcaggcataatcagcaccattttgtaacctttaatcgctgccaccattgccaatgcaatccccgtattgccactggttgcttcaatcagcgtatcacccactttaatattacctcgtttttcagtttgggtaatcatattaaaggctgcacggtctttcaccgaacccgcgggattgttgccttccagtttgagcaaaatggtattagatgggttagggttaaggcgttgtaaacgcactaagggcgtgttgccgatggtttgttctatggttttgtagtgcataattttgtaataccagagagtaaaaagttaaaacttgttgatttattgctaccgtctaattttaaataagggctgattaattttgagcctgaaattggttgataaattttgttagtatattttattaattcttctttggcattggctaaattatcaggatttctatattttctgttcgcctgattcggcactttgcttaattttaaaccttgtttgactgcctgccagtcacctaaataaaaactttctaattctcgacaggcgattcttactaaagacacatctttctttccagcgtggtttatcttggttaataaatcttgtttgattgtttggcaatcgccagaatcttggtctctagtgattaaaaaaacagtatctggtgtgcaccaattttttagtttcagtccgatatttttttctagatcttgcttaccttcaaagtgaatgatttgataagaggtgcctgatattaactttggtaagataatgtctaacatctcttttgcagattgttcttcggtaaagcaaactaaattcattgttgacccaaagattcaaaaaaaccttgtttccataaatagcccattttatcgccatcatccatataggctttaatttgcttatcatttgaggcgcgtttaatgcttgtatagcctttgtttttgaccagaaaaaatacctcgtcaacctcgacggcatttaaaaaatcaggcgaatgcgtagaaacaaaaacttgctcaccacgattggcatacgctctaaattcttcagccaactcccccaacaaatgtggataaagttgattttcaggttcttcaacacataacagtggatagggttttggatcatagagcagcaccaaataagccaacatttttatcgttccatcggaaatatagcgtactagaaatggcttgtcaaaagattcgtcttgaatttttaataacacttgccctgtttctatggtttttgcttctactttggaagttcctggaattctttgttttaaaatttcaataattttatccagtgtttctttgtgattattgtataaatactcaataacatttgataaattttcacctaaagtagataaatgttcagcgtaatctgcttgctggatattacgcgcttcattgacatgaatatcagaaacatgccaattatcaattaattcactcagtgcaataacagctggaaatttttcaaactgtgccaaacctttaatggctaaaatatctggagattttaaagtttgctcttctcgttctaaatctgcttctttagtagaatcaagcatttgttcattaataacagcattacccacacctttgctaaattttaaaaattcccaaggttgtccttttgcacctcgacgatactttaaaatttctttatcaataattgctttgccattttcttgcgaaatacttaaaatataagtaataataggattgtttttaaaggtgtcttttgctctaaattttatctcaaattcaatgtttcccgtgcaatttcgactaataacttcattaaaaccccctcgtttattaaaagcagtattaacatcggtagtcagcgcatcttttaaaaaaccaaagacattaaaaagcgtagtttttccagaaccgttgctaccaacaatcacgcaaaatctaggaatctttttcatttcaacatttttaaatgctttaaagtttctgatttttatagattctatcttcataacagcattacatgttacttagaattgcattcttaacttcgtccataaccggatcaattaaaatcatctcacccttacattgtgcaatcgccgtatcagggtcttttaagccgtgtccagttaaggtgcagacgatttttgatcctgctgggattttgccatttttaatgtcaatcatggcgccagcaagtgaggtagcagaggcaggctcacagaaaataccttcttgttcggtgagtaatttttgtgccgctagaattgcttcatcagtgatagcatcaaaccagccgttagactctttttctactttatgagccagatcccaactttgtgggtgtccgatacgaatggcagttgcaatggtttcgggattatcgaccatttcacctttagcaaagggggcagcacctgccgcttgataacccaccattgctggtgttttttgcgcttttccctcttctttatattctttatatcccatccaatgggcagaaatattgccagcattgccaacaggtaagcagtgataatctggggcgtcgcctaattcttcaacaatctcaaatgcggcggttttttgtccttgcaggcggaatggattgattgaattgacgatagagacgggtgcatggtcagccacttcttttaccaaacgcatgccatcatcaaaattacctttaatttgaataatcaccgcaccgtgcatcatcgcctgtgctaacttacccagtgcaattttgccctcagggattagcacaaatgccttaatgccagcacgcgctgcataggctgctgctgaggcagaagtattgcctgttgaagcacaaataatggccttagagccagcctcaactgctttggttactgccatggtcatcccacggtctttaaatgagcctgttggatttaagccttcatatttcacataaatatccacctctttgccgagtagggcagggatattttctaagcgaatgaggggcgtgttgccctcgcctaaactgataaatttggtattttcatcaacgggcaatctgtctttatagtggttaattagtcctgtatatctcatggtattctccctttaatctaatgtttctacatggatgattttaactgcttcttggataaaatctttgttttgaattgctgcaacagcagcattgatatctttcgtttttactaagttggtaatgatcgcaatgtgtgcattattctgtgcgtcaatttgcttttgcactacggattctacgctgatattatgttgtgcaagaatggcggtaatatctgccagcacgccagtttcatcggttgccaataaacgcacataaaacacgctttcaatctcatcttgatgctgattttgcattgattcaagtgatttccagccaaacacatcgccactcaccgtgcctttaatcacatccaccaaatctgcaatcactgcacttgccgtggcttcatcgccagcacctgcaccgtaataaagggttgctccaactgcattgcctttcaccaataccgcattcatcaccccatcaacattggctaataattgtgcctttggaatgagggtagggtgcacacgcatctgcatttgaccctcaacatttttagcaataccaaggtgtttgatagaataacccaattcagtggcaaatgccacatcctcgccactcactgcactaatgcctacggtagatacttgttcaaattgcaattcacaaccaaaagcaatcgatgccaaaatggctaatttatgtgctgcatcaataccatcaacatcaaatgacgggtcagcctccgcataacccaacgcctgtgcttctttcaaaacatcggcaaaatctctgcctttatcccgcatttccgtcaaaataaagttacccgtgccattaataatccctgccaccatctcaatttggttagcacacaagccttgttccaaagatttaagaatgggaataccgcctgccactgccgcctcaaacagcaaatgcaccttattagactgagccaaagccaataattcattgccatgggttgcaatcaacgccttattcgccgtaatcacatgtttgccatttttaagcgcaacttcaaccaattcttttgccaaacccgtgccacccatcaactctaacaccacttcaatagaagcgtcattaaccactgtaaaagggtcttgcgttagttgaatttgctcggttgggcaaatgcgagactgattaatctccctaaccgcagcgtgcgttacttgaatttgtactcccgtgcgtctaaacaattcagcctgattttttgccaaaacattaacaacgccaccaccaaccgtacccagtcctaaaattccgatgttcataataattatatagagtgcttaaaaaaaggctaaattataccgattattgtttgtttaatgtgattgccatacatttaagtgggcgagaatattgtgctgggattttatgctgattgtcaaatacaacaggtgctaatgctttgagcatatcctcataaactggtttcttaaaatcaatgattgcctcaataggataccaataatccacccacttccaatcttcaaattcaatttttgtatgcgtatccagcttaatgttactttctgcacccgtcaattttaacaaaaaccaaacctgtttttgccctatgaaaaacttatttttcttattatccggcaaatcataacgcaaccatttcggcgttttagcaatcacttccacatgctcagaagtcaaaccaacttcttcttccagctcacgaaacaaagcctcaagttcattttcacctttgtcaataccaccttgcggtaactgccaccccacttgctgatagcgtttagccaaaagtatttgattgctggcattggtaataacgatgccaacattcgcacgatacccttctttatcagtcatcgccaccaaaagcacccaaaatatgcaacaaactggcaaacatattatgcaatgctaaatacaaaccaaccgttgcagcgatgtaattggtttcacccccattgataatagatgacatttgcgacaacatataagcccccattaacaaaaccacagcaaatgaaatcgccaaactgacaaacgaagactcaatcaaaaatgcattaaccagcgacaaaacaatgatacctatcatcgcaaaaaatatcattccgtttaaaaaactgaaatcttttttggtattttgcgcataaaaactaatggcaaaaaacgagataccagtgccagttaacgcctgcataaccaactcagcaccattcggcatcgccaaataataagtcaacatcggacccaacgaataccccagcaaacctgccactgcaaaagcagtaacaatacctttattactattttgcgtttttggcaacacaaaccaaatcaccgcaagtgccgcgagtgatgccaccatcgccgagccaaaacccgcaccagatgccaccgcaaaccacgaagacaaaccaccaaacaccaatgtgtatgataataatcgcatagtatctgataaaactttgttcttaacccgaacactactcaatgttgctgttgttgaaaatgtacgcataacttactccttataattaacggtaaaatgattttattttataccaaaaagcaaatagcaggtcaaatatgaaactaattttaggtaacggcaaaacagcacactcaattgcacaatttttagacaagcaaaacaccgcatttacactcatcaaagacaccagaaaagtcaaagacagcacccctctaaaagatatcgacgagatttttatcagcccaggcatcgcccaaactgacgcaatcgtcgtctgggcaagcgcacaaaaaatccccgttactagcgacattgaactgttttcacgccacgccaaagcccccatcatcggcatcactggctccaacggcaaatcaaccgttacccaactactcggtgaaatgatagccaatgacggcaaaaaagttgccatcggcggcaacattggcacccccgccctcaactgcctaaatgacgccatcgaatactatgtattagaactctccagctaccaactcgactacactcaaaacctaaacttattaacaggcgtagtcctcaacatcacccccgaccacctagaccgataccccagttttgcacactacacacactccaaactcagcctctaccaatactgccaacacccaataatacccgtcgatgaccccctaattcccacacaaacacccgccaaatatttcggcatagatatgcccaaacaacccaccgattttggcacagttacctgtcaccaaagccgctattttttaaaaggcgacgactcactaatgtgtgctgacgctatgcaactcatcggcgaacacaacctcaaaaacaccctagcagccctcgcactcggcgaccaaatcggactgagcataacctcaatgattaacaccatcaaaaccttcaaaggcctagcccaccgcctagaatgggttacaaaaaaagacaacatcacctactacaacgactcaaaagccaccaacagcctatccaccatcaccgccatccaagccctaatccccacccaacaagacatcatcctcatcatgggcggcatcgccaaacaagaagactacacccctctattcaccctcatcaacaaacacattaaaagcgtcatcctaatcggcaaagccaccccccaattcacccaaaaaatcacccacaccactcacgccaaaaccctgcaagaagctgtaactatcgcccaatcaatgattagtaatggtattgttctattatctccagcttgtgcgagttttgatatgtttgatgattttgagcagcggggggaagtgtttaaggatgctgtgaatagtgcccattaaaaaacccttcataataatttattatgaagggtttaaaataatatggtttcttgattaggataatataaatattagagcctttcggattaagaaacctagaaatccattattatagtgatttcctccctctctcttggtcagacatactataagagtgtattatatacacttttttacacaatggatagtaacatgaaaatactgggtattgatttaggtattgcctcagttggctgggcgctagttgacgacaaagataataaaattattgattctggggtgcgtatttttacccagtccaccaataaagatggaaagactcttgcttctattagaagggggtttagaggcacaagaagagttttgagtcgtaaaaaacaacgacttaaccaactacaaaaactgtttattgataacagcctactttcaaaatcagaatttaagcatttgttcagtagtaaaaatcgtacagatgtttggcaactacgggcaaagggtttagagcaacctctcaataatgaagaatgggcaagggttttgtatcatatcgctaaaagacgagcttaccaatctaatcgtaaatctgagaatagtggtgatgatgataagaaaaaagttttatccgccattaatatcaatcaaaaaaaaacagaccaaggcggctatcaaactattggagaaatgatatatagtgaaaccaaacatccaggtgacggcagaattagacgcaataaaaaagataactacacttggtcaatttctcgtgacatgttaagacaagaggtaggtattttatttaaaaaacaggtggcatttggtaatcaatttgcaggtgatgatctaaagcaaaactacaaagaaattgtttttactcaaagacctgtgcagtttaaggctgatttagttggaaaatgcatttttgaaacagacgaatatagaggggcaaagcattgtttttcaacagaaaaatcagttttactacaaaagataaataacaccgatttaattaatgaagagactggtgaaattaggcgtttgtttgaatgtgttaatattgacagtatatttgatattttttataccgttaaagaagttaaatatactgctttaagaaaacaactaaaaatatctaataattttaaatttaaacaattagattatcagcaaaattttgaatacaaaactaatattaaagccaaagtaagtgatttttataagtcggaagattggctcacttcagagcaaaaaacaatacttgaaaaacaagtattagacgataaaagggaaaattttaaacgctataagtatagcagtattcgcagtattttatccttaccagagtcgcaaaaatttaatggcgttaaatacaataccaaggttgaagcaacaacaatttttggtaaattggtaggctatcatagcattaaaaatgaattagattcagaagtatttagcttgctgtttgctaataagaataaatttaataaaatagcggaaattatcacttatcaaaaagatgataaaagtgcgactaaagacctagaggatatggtttttaataatttaaaattagataaaattatcacaaataaagcgattcaagatttattaaatatatctttttctgggtttaacagtttatccattaaagcacttgataatatcttaccttatcaggaacaagggcttaaatatcataatgctattaaagaggtttatgagcatcactctcattttaaagccaataatttgcaacaatatttgcgaccacttaacgaaaaagaaaactatcagattactaatccaacagtaaaacgcactttttctcaatttagaaaagtgctgaatgcagttattcgcaaatatggtagttttgatgctatgcatattgaaatggcaagagagttaaaaaattctaaaaaaatgaagtttgaaattcaaacgggacaaaaagagtataaacaagaaaaagaggcgattcaaataaaatttttagaaaattttggagataaaggttcgggcagagatttattaaagttaaggctttatgagcagcagcatggtaagtgtatttattctgccaatgaacttaaaatcaatagattgcttgaagatggttatgtagaaattgatcatattttgccttggagtagaacttttgacaatagtttgaataataaagcactgtgtctatcaaaagaaaatcaaaataaatctagtcaaacaccatttgaatatttggcaaatagcgataaagagagtcaaaaatggcaagaatataaaaattatattggcagttttatcagtgttaaacaagcaaaaaagaataaattactcaataccacattgcctaaaagacgaggtaatgatttgaattctgatgatattgaaaactcagaaagtggttttttagcacgcaatctaaatgatactgcctatgcctcaaaatttattaaaaaatttgttgaacagaatttagtattctctgataactcaaaaattaagcaaaaagttaaggttaggagtggtgcattgacaaatcagttgcgctataactgggggattgaagaaaaaaacagaggtaacaatttacatcacgcagaagatgcgattattttggccttttcaacgcaaggtgaagtgcaaagaatgtcaactatttccgctcaaagagaagatttcaaataccaaactgctgatgaaagaagagtaaagttcaccccaccttttactaattttaaaaatgctctggatgaaagtattgataatatttttgtttcatttgcaccaagacggaaaatagcaggggcagcacataaggctacgattaaaccaaaggatacgggtggaaaatacaagtttttagttaataatggtgcggcagaaaacggcacaattcagcgtgttgatgtatttgttaatgataaaaacaaataccagtttatcgtattttatccggctgatttttataaaaaggactttcctaagttagatttatcgggcaataaaattgataaaagtagtcaatttttattttctttgtttaaagatgatttgattgaatttgaaacaaaaaagaccaaagccaaagatagcaagcattttttagcttattttaagtatattcaatcagatgggaaaattgcctatcaacaacactacaaagcagaaatagagcgtaaaaaatctaataataaaaaaggttttacagatattttacttgctacagggggtggtttagtatggcttaaaaaataccaagtatcagtattaggtgattatgttgaagtaattaatgaaaagcgcctaccattgattaaaaaaatgcgtacaaacaagtctaaaaaacaaaaataattatgtcttggcagacgctgttaatcagcaacccttgtaaattatccatcaaaaatggcaatattttacttaagcgtttaaatgatgaagatgcactaatcgccattagtgaggtatctgctattgttattgaaaacccccaagttaccttaactgcggtttttatggtaagttgtgcaagtcaaaatattgcggttattttttcagataaaaaatatacgccaataggcgtatttcaacctttttatcagcacagtcgaatgacaaaacatgcttttttacaaagaggttggtctgaatcttttaaaaacagagcgtggcaaaaattagtgaaagccaaaatacataatcaacagcaaacattagtaaaaataactaaacaacctaataagcaattaaatttaattgcatccaaagtacagtcggctgataaaaccaatagagaagcacatgcagccactgtttattggcgaattttgtttgaaaactttagacgcaataatgctaatgacattagaaattcagcactagactatggttatagtattgttcgttcagctattgctagaagtgttagtgccagtggttttgtcccagcatttggttttcatcataaaaatgaacttaatgcctttaatttagttgatgatttgatagagccttttaggccttttattgatcacgaagtctatttacttaatcagtcaaatgaaagcactaaattgacctatcaaatgcgtactaatttagttaacattctaaataagaaaattatgtttaagcaaaagaaaacaaccttattgaatgccattcaacaaatggtttttagcttgttgaaggctagtgaagtcaaagatattgattttttattattgccagaacatgtccaaccaaaatgatcgcttcatgcgacttattgtattttttgatttacccactaaaaccaaacatgatagaaaggtttatactgtatttagacgatatctcttaaaagatgggtttattatgttacagttttcagtttattcaagggtgtgcaagggcttagatagtgtagaatcgcacttaaattatttaaaatcaatactaccaactaaaggcaatattcgaatgttgcaagttactgaaaaacaatatgcacgcatggaaatattgcttggaacggttaaaaaaatagaaaaaaacgcaggaaaacaattgctattattttgaaaaacacacgctacaaaaccacacacccctttactataaaggggtgtgtggttttgtagtataccagaccagagagagggaggggtctataacaaagttattgctatcatgtatgagtgatgaagtataccag

SEQ ID NO: 3720 - DNA, 6319 bp, synthetic construct
  source 1..6319: mol_type = other DNA
  misc_feature 1..6319: note = Synthetic
gctaagatgttaaatcgcatcctgcctgacagggtgtttcaaaatacatttacttgagtgtgttttgaaacactaatatttaaaaattgagaccgtagtactaacgctgaattgaagtggatggtaaaactaaaaaccacatagtgagccatttaagcaaaactaaaaacaacatagttagccatttaaaaacccctgtctatatacgggcatatctgccaaactaccaccctaatttagagggaagattaagggtttgagttttagttttttgtacttttgcaagtaagaactcaaacccttaaaatggcgattatgagtggactggaacaacatggtggatggagatggacagctaaatatttaaaaaaaggtggtttcttattgaggataatatgaatattagtgcctatcggatcaagaaacctagaaaccttattatagtaaatcctccctctctctggtctgacatactataaaagtgtattataaacaactttttatacaaaaaagtaaaagatgagaatattaggtgttgatttagggatcgcctcagttggttgggcattagttgatgataaaaaacaagaaattattgattctggagtgcgtatttttacccagtctactaataaagatggaaaaactctcgcatccgttaggcgagagtttagaagcggtagaaaagtcttaagtcgtaaaaaacaacgacttacccaattaaaaaaactatttattggtcataaattactttcaaagtcagagtttaaatatctatttaatagtaaggatcgtttagatgtttggcaactacgggcaaaaggtttagagcgacaacttaataataaagaatgggcgagggttttatatcatattgccaaaagacgagcttaccaatctaatcgcaagtcagaagaaagtggtaatattgataagaaaaaagttttatctgctattaaaacgaatcaagataggatcaatcaaggtggctatcagactattggtgaaatgatatacaaagagactaaacacccaagtagtggcagaattagacgcaacaaaaaagatgactatgcttggtcaatttctcgagattttctaaggcaagaggttgataaattgttcgaagttcaaagaagcttcggcaataaatttgctactgacgaattaaagcaagaatatgaatatattgcatttaaacaactccgtataaaatttaaggctgatttagtaggaaagtgtacttttgaagaagatgaatatagaggggcaaaaaattgtttttcagcggaaaaatcggttttacttagcaaaataagtaatactgatttagttgataaagatactggtgaaattatgcgtttgtttgaatatgcgactcttgagagtttgctagatgttttttataacaccaaagaagttaaatataccactttaagaaaacaattaaaaatatctgataattttgaatttaaacaattagattatcagcaaaattttgaatataaaaccaatattaaagccaaaatagaagatttttataaactggaatactggctaagtcccgaacaaaaagaaatacttgaaaggcaagtactagacgataaaaaagaaaaatttaaacgttataaatacagtagtattcgtagcattctatccttatcagagtcgcaaaattttaagggcgttaaatataatactaatgttgaggcaacaatttttggaaaattgacaggttatcacactatcaaagacgaattaaattcagaaatgtttaatttattattttctaacaaggacgaatttaacaaaatagcagaaattatcacttaccaaaaagatgataaaagtgcaacgcaagacttaagaaagcaagtttttaataatttaaatttaaatgaaagtattatagataaggcgattagtggcttgttaaacatatctttttcgggatttaatcatttatctattgaggcacttgataagatcttaccttatcaacaacaaggactcaaatatcatgaggctgttgaaaaggtctatggacaccactctaattttaaaaacaccaagctgcaacaatacctacgaccacttagcaaagaggagaattaccaaattaccaacccaacagttaagcgcactttttctcaatttagaaaggtactaaatgcagttattcgtaaacacggtagttttgatgcgatgcacattgagttagcacgagaattaaaaaactctaaaaaaaggaaatttgaaattgaaacaggacaaaaagaatatcaacaagaaaaagaagcaattaagacaaaatttttagaaaattttggttatgaaggaacaggtggagatttgttaaaattaagactttacgagcaacagcatagtaaatgtatctattctaaacaagaaataaagataaataggttgctagaagatggttatgttgaaattgaccatatattaccttggagcagaacttttgataacagtttaaataataaagttttgtgtttagcagaagaaaatcaaaataaaaccaatcaaacaccatttgaatatttagcaaatagcgataaaaacagtgaagcgtggcaagaatttaaacaatatgtcaatagtgttcatggtattaaaattgccaaaagaaataaattattcaataccaccctccctgaaagacgaggtaatgatttgagtacagatgatattgaaaatccagaaagcggttttctggcgcgtaatttaaacgatactgcttatgcatcaaggttcattaaaaaatttgttgaacaaaatttagtattttctgaaaacacagaaatcaaacaaaaagtcaaaaccagaagtggggcgttgacagaccagttgcgttataactggggtattaaggagaaaaatagaggtaataacttgcatcatgcagaggatgcaattattttagctttttcaacccaaagtgaagtgcaaagaatgtcaactatttctgctaaaagagaagatattagatatcaaacggcaggcgaaagaccgattaaatttaccccaccttttgttgactttaaaaatgctttagataaaagtattaagaatatttttgtttcatttgcacctaggaggaaaatagcgggggcagcgcataaagcaactatcaaaccaagtaatacaggtggaaaatataaatttcctgttaataagggcgtagctgagaatggcataattcaaagggttgatgtatttgttaatgataaaaataaatataaatatcaattcatggcactttatccagccgacttttataaagataattttccagagttagatttatcaggcaataaaattgatgaaaatagtcagtttctgttctctttatttaaagatgacttgattgagtttgaaactaaaggaaataaaagaaataaaagcaggcatttaaaatcttattttaaatatatccaatccgatgggaaaatcgcttatcaacaacactataaagcagaaatagaacgaaaaaaatctaataataaaaaaggctttgtagatgttttacttgcaacaaaaagtgatttacagtttatcaaaaaataccaagtttcagtattgggagacatccaagaagtaatcaatgaaaagcgcctaccactgattaagcaaatgcgtaaagacaaatttaaaaagaaaaaataacgatgtcgtggcaaacgctattaatcagtaatccttgtaaattgtctattaaaaatggcaatattttactcaggcgtttaaatgatgaagatgcactgattgctatcagtgaagtatctgctatcgttattgaaaatccacagattactttaacttcggttttcatggcgtgttgtgcaagccataatattgccgttattttttcagatgaaaagcatatgccaataggtgtgtttcaacctttttatcaacatagccgaatgacaaagcatgcttttttacagaataattggtctaaatcctttacaaatagagcgtggcaaaaattagtaaaagccaaaatacacaatcagcagcaaacactggtaaaaataaccaaacaaccaaacaggcaattaaatttaattgcatctaaagtgcagtcagcagataaaactaatcgtgaggcgcatgccgctattatttactggcgtattctatttaaaaactttagacgcaataatgtggatgacattagaaattcagcattagattatggatacagtattgttcgtggcgctattgctagaagtgtaagtgctagtggatttattccagcatttggcttccatcacaaaaatgaactcaatgcttttaatttggttgatgatttgattgaaccatttagaccgtttattgattatgaagtttacttattaaccaaggattgtagcaataacagcaataaattaagtcagcaagtgcgcatagaactggtcggtattttaaataaacagattgtattcgataatcaaaaaaccaccatattgaacgccattcagcaattaatttttagcttgttaaaggccagtgaatgtaaaagtattgatttcttattattaccacaatatgttaaataaagatgaccgctttatgcgattaattgtattttttgatttgcctaccaaaaccaaacatgataaaaaagtttacaccgtgtttaggcggtatcttttaaaagatggatttattatgttgcaattttcagtttattcaagggtttgcaaagggttggatagtatagagtctcatttgaaatatttaaggtcaatattaccaactaagggcaatattcgaatgttgcaagttaccgaaaagcaatatgcacgcatggaaatattacttggaacggtcagaaaaacggagaaaaacgcaggaaagcagttgttattattttgaaaacgcacactacaaaaccacacaagtcttatatataaaggtttgtgtggttttgtagtatatcagaccagagagagggaggggtctataacattaatattgtttgtatttcataattttaagtatatcagaccagagagagggaggggtctataacgaaaagttagtaatgctcataagataaggaagtatatcagaccagagagagggaggggtctataactcgcaaaactcgttatgactattattggccagtatatcagaccagagagagggaggggtctataacgcggataaaatcgttatgattaatatcggcaagtatatcagaccagagagagggaggggtctataactattacccgtaagttctagatgaagttttagtatatcagaccagagagagggaggggtctataactcgatattcctcaggtgatttttctgagtatatcagaccagagagagggaggggtctataacggctattgaaatgtgcacaaagtttttagtatatcagaccagagagagggaggggtctataacataagtgccaaggtgataccaccagccaccagtatatcagaccagagagagggaggggtctataacgttcttttcgtcctcctaaatattatgataagtatatcagaccagagagagggaggggtctataacactgttctgttggtgctcttacttttgagaagtatatcagaccagagagagggaggggtctataacatctatgagacatcgtcgttttaagcgtcgagtatatcagaccagagagagggaggggtctataacgttaatactgaacttatgcaaaattataaagtatatcagaccagagagagggaggggtctataaccaatggatagcttctaatgggcggctggatagtatatcagaccagagagagggaggggtctataacaaagtggtcaaacttgccatactccaatctagtatatcagaccagagagagggaggggtctataactcgtaaaactcgttatgattattattggccagtatatcagaccagagagagggagggatctataacacttatcccaacgagacagaattagaagtaagtatatcagataagaaaaactaagtaaacgtctgtgtttattgccacccttcattgggtaactgtgcaaaattgtcataaaaatttcatcactgtgcaagttttttttgattagaaaattccaaagaacccaagccagaattcgccattatattgggttaatgcagtggtctttaactgataaaaaacccactttagtgggtttttttattacctaaaatttagcacaccacctgttggtgtgctaaatcaatgattttttaaaaaaaatggcataattgtaataatgaaaataaacaaaattattattg

SEQ ID NO: 3721 - DNA, 24389 bp, synthetic construct
  source 1..24389: mol_type = other DNA
  misc_feature 1..24389: note = Synthetic
ttttgagattttctgtattggtcaatattttcttcaatttttttattgagttctttgtcggtaagtccagttgtatttcctagaatttctttggtaatatctttaatatctgttacgaaatctaccaccatacctggattggtgagttcgcctttattgtctttagcccaaaaaccattagaaagcaagtcgttttctaccgtagaatgactttgaatggcactataaccgcaatggtgattggtcaataaaagacctttcggagagataatttcgccagtgcaacctctgttaaattgtaccacagcatcttttatgcttggtttttgagtactccaaatatcagtggcatttattttcattcctagagatttcatctctttttcattgatttcagtaggaatccacattccgccgtattgttgagaaaaaaacgcaacagcttggaataatgatgctataataattgttttctttagcattgtattgaattatttgtttaaaaaattaggaatgctaaaattagggaaatttatttcaatgagcaattattaaaggtcagagtcaagaatttaatgagcactggctgcggtttctaccgtttttatgttgattaactctaattgaatgtgtctgtcgtgagctttaaccacaaaatccgagataatttctaaaacatcgtggtctataaaatgaatgttagttccatctataattaatgaagaatagggaggtactttgtctagtgtatttttaatttctactttgtttaggaaagtcacgttgctgtgtaatttcagaatatattggtcaatgccttgataatgagttttttctaagtcataactttctttgaaattctctttaatgatgtagtaaatagaaattaatagaccgatgcttaccccaattaataaatctgttgccaaaataataacgatggtaataatgaaaggaacaaattgtttccagccgaggttgaataagcttttgtagattttaatttttgtcagtccaaaaccagtgaggataagaatagcagatagcgaagcataaggaattagattaatcaaaaacggaattagaagtaccgatagcaataaaaatacaccgtgtacaaatgatgaaaccttggttttagcgccagcttgtatattggcagaacctctaacaacaacagcagttaaaggaatagcacccaataatccacagaaaaaattacctactccttgcgccattaactctctatttactggtgtaattctgttgtgtttatccagtttgtccattgcttcaatactgagtaaggtttctagagtagctagagttccgattaataaaccatttttccaaatttcaatattgcttagaattttagtgaaatcagggaatttaagttctgcaaaaatattagaagggatattgaccaattgattggatttcagtgcgtaagaagaaccgaaataagtcaaaagataattaatagcaatcccgaaaatcaccaccactaatgaagcaggaagaatgttgtacttcttatttttgggttgttttaggaaaataagaatcgccaaagagataaaagaaataaagaccgcacctctggtaatatttgcattgaattcttttaagtttcctaagaaattcgttgaggtgaaaatctgtatgaaaccactgctccaaaagtctggttgattataacctaacgctagcggaatttgttttgaaattagaataataccaatggcagccatcattcctttaatcaccgaactggggaaataacttgcgaaaacgcctaatttaagtaccccaagtaatatttggaaaactccggcaatcattactgctaaaagaaaagtttcaaaattaccaaggcttataatcgctgccgaaaccagtgtagtaagaccagcagcaggaccagaaaccgccaattgagaaccgctaattacagaaactacaactccaccaatgattcctgataaaatcccagaatagagtggtgcaccagaagccaaagcaacacctaaacaaagaggaagtgccaccaaaaaaaccgtaagacctgctgctaaatcgtgttttttgaacattaaccaataatacttgaatgttcggtctaggtgcaactccattttttctaattttttacaaatttagggaataattgagcggtgaataggagtttttgctaaaaattataatgatttacctcatccaaccttcgatgatgtagtttttgggaattattgaaccacaagaaacgtaagtttataagaatcttttccgaatttttcttcttgatagttttctattttagtgatttttaacctacaagtaatatttttgtttgaagaaaatacagttagcagatcttttttaactttataattgtatttaatttttgcaatcgaaatactaggtggttcattacattcatctccataattgattgtaagaaaattctttggataaaagatgaataatttacttttacaaaatggaagattcgatgtagtataaaaagatatggtatcattttctttaaaaggctcgatattgtccgtccataatttattatcaataccatattctgttattttggcatttgctcttttttcagtttctgtaattattttctttaattgtttattcaaagagctttgtccaaaaccaaaattgaacattaaaattaaaaccaaaaatattctatttctcattatcaattctccattttcatctttcaatcaaatccaaaaactgttgttcgtctaaaatctcaatggttccgatgtcttgtgcttttttcagtttgctacctgctttttcgcctacaaccagatagttcaggtttttagaaacagccgaaatgttttttccgccgtgtttttctaccatttcttctgcttgttcacgagtgaaaagtgaaagttttcctgtgaaaaggaaggtttttccttccagagcattgcttaaaacttcattggtattttctcctttttctaattgaacgccgtaagattttaaacgctctatcatttccaagttttcagaatttttgaaaaattctgtaatggaaatcgcgattttttcgccaatgtcttctacttgacaaagttcttctaccgatgcgtttcttagttcctcaatggtattgaaattctttaccaattttttggcaacggtttcgccaacgtgttttatgccaattccgtagagcactttttcaaacggaatttgtttagaattttctacaccatcaataatattttgcgctgatttttcagccattctctccaaaggaaggagttgttctttggttaaagtgtagaaatctgcacaattttctattaatttttctcggtagagttgttcgatggtttcgcttcctaaattttcaatatttagagcttttctagagacataatgtatcatttttcctaccacttgcggtggacaatgcgtttcgttcggacaaaaatgaatggcttgatcttctagttttacgagttctgttccgcattctggacagtttttgatgtattctatcggttgttgaagtagtgttcttttctctaaattgacccctacaattttcggaattatttctccgcctttttctacatacacaaaatcgccatcgtgtaaatctagttttttgatgatgtcttcgttgtgcaaacttgctctttttactgtagttcccgccaaaagtacaggttttagatttgctactggagtgatggcacccgttcttcccacttggtaagaaacgcttaataattcggtttctactttttcggctttgaatttataagccattgcccaacgtggagatttcgcagtgtaacccaattgtctctgttgtttcaaagaattgactttcaatacgattccgtcaatttcgaaagggaggttatggcgctctttatcccaataattgataaagtttttaacctcgtctagagatttgcaaagcttagcttggtcttccgaaactttaaagccccattttttagcattggcgagtaaatcccagtgtgtttctgctgggaaatcatcggagatgtattgatacaaaaccgcagagaggccgcgttttcttacttctgcagaatcttgcatttttaagcttccagaagcagtatttcttgggttcataaaaaggtctaagccttcttcttctctggatttattgattttatcaaagtttttctttgtgagatagatttcaccacggataaagaatctatcagggaagttgccttttaattttaggggaacatccgaaatagttcgaacattgttggtaatttcatctccttggaagccatcgcctctggttacggcctcttttagttctccattttcgtagaggatagaaatagaagcgccgtcgtattttagttctgctacaaactctacttgttcgtcttctatggtttttagaatgcggttttcccaatcttctaaatcattaaaatcataagagttgtctagagagtacattctaaattggtgctgtactgtagggaaatttttggtaacaccaccaccaacacgccaactaggggagttggcatcgtggaattctggatgtgctaattctaagtcttgcaattcttttaatttcacatcgaattcaaaatctgagatggtaggttcgtctaagatgtaataattatagttatgttgatgaagctcttcgcggagtgcttctattttttgttggatagttgagggcattttgttctgatgatttagagcaaaaataaggaaatttgttgatttttattagggttttctaggattgaaggagattgaatttttgagcgtcttatcatgatggttatgtgtggattgacattgggaaataggtgagtaaagttgggttttcttttttcatacatgattcatacatcagctatacttcagccatacatgagctatgtgtttgccatgcatttttcatacactatccatacaccatccatacactatctatgctttatctatagactttctatacctttggtaagctgtaggattttcataaattttttagttttggagtataaaaaaaggcggtctcataggaggccgcctttccattttatagaaaatactcgtgtattagttcgctaacttaacgtttactgcgtttaatcctttttttccttgggtaacttcataagttactttgtcattttcacggatggttcttgtagccaaacctgaggtatgaacaaaaatgtcttctccaccgttagatggagtaataaatccgaaacctttggtttcgttgaagaattttacggtgccttcttgcatagtaatgtgaatataaattgttattattttactaattgaatgttgatggctgaaaagcctttagcggatttttctttttcaaaagaaactttgtttccttttttcaaaggaacaggacagttgttttggtggaaaaaaacgttttctttagagcggtcttcggtaatgaatccatagcctttttcgctaaagaaagtgatgatacccgttttggtagtttcttcagcttcaataggagcggctcctaattggatgtcttctagagagatttcgtctcttttttcaggaggtgtattggtaattctcccgaattcatctacataggaaaacatttcttctaaattttttcctttgttgttgttttctttacgctcttctcttctgagcgctttttctttttgtttttgaagttttttcttaaaattttctttttttgaaaaagaatctgccataaataatgctctttttgttttaaaattaaaggtataaccaaatggtattggtgtagtttttcataaggagaattgtttcaatctgcatttaaacgaggtttcagcttatgtaatgtcttactctgaatatcgataaagaggttttatttgttcttgccctccgttatgtttatcaataatgattgaaactaaaaaagaggttgctctgagcaaaaactgaaaaagaaataaagaatattctaaacagtaacagcatggcaagatacttacctaagtattaataattgacaaaggtaagttaaataattgagatgacctaattgggggagggtgatgagtggatgagtggtagagtggaagaggtgaagttgtaaagttgtgaagttgtaaagttgtaaagttgtgaagttgtgaagttgtgaagttgtaaagttgtaaagttgtaaagttgttaagaggtgaagttgtgaagattttattgtcctaggtcctaaaggaagtaaaatcttccatttttttcttgagttatttttgaaatttttgaaatttctacaggtaggtttattagatttttttaacgcaaagattcatttttgtggatggatattttaaggaagcaaaggcataaatgcttgtggaggttatttctaatcatagtgttcttagtgaaaccttagtgctctttgtgtttaaataaatttttaacgcaaagattcatttttgtggatggatattttaagggagcaaaggcataaatgcttcgcgaagggtgtggaggttaggaggtgaagttgaggagtggtagagtggtagagtggtagagtggtagagtggaagaggttaggaggtgaagaggtgaagttgtgaagttgaggaggtgaaaaaaaagttgagggtggagttgtttaatttagtaattttaaggattgaaaaatataaaaccaataataacctaaaaaagtcttcttttatgaaggcactaccgctatgaacagaaattttattctctttttattccttgtttttaatttgagttttgggcagaatacgcctgttttgatacccggaacctcttactctatggttccaccagagggttttgtggtgtctgctaatttttcggggttccagaataatgaaacaggttcttctattattgtggctgattttccggcttcctatgaagaattggtaaagggttttacgaaggaagctttgaaaacaaaaggaatggaattgatttctaaagaaactgtgtcttaccaacaaaaagaggccatgctctacaaggtaagtcagatagctaatgggataacctatctcaagcagatattattgtttggagaccttaagaatacggttatggtcaatggcatctatcccgagttgtttagtgctcaagaaaaagcaatgcgcacgagtttgttttccataaaaatgaacgaaaaacaaattgccaaccctctagaagctgccccttacgccatagatgtcagtggtacaagttatgtttttgtgaaatcaatggctggttctttgctgtatagtgaagatggtcaactgcctagtaaaaaaggaatgcttatcataagtaattctctcggcaacaaagtctatactgatgaaaagcaacaagctatagaaagattaaaaaaactacccaatgccagtaaagccatcattcaaaaagttgaaaaggtcaatatttcggatatgcaagggtacgaaattgtggctcaaggagataaggggcaattgctctacgaggtgatgctttttaattctgaacgtgaatattacctgattgtaggagaagccaacgaaaataaagtcaaaaacctagaagtatttcagaaagtagccagaacttttcgggtaaaataaatgtaggttaggaggttaagaggtgaagttgaggagtggtagagtgaagagtggtagagttaagagtggaagaggtgaagttgtgaagttgtaaagttgtgaagttgtgaagttgtgaagaggttagagagttagtgttatctatagtctcatctctatcaatcatcagtcatcaattgtcaattattagtcatttatatcgataatcaaaaaccaataaaatcatcagttatgaaaaatgtaaaaacattattcttttttcttttctttttaccatttgttatttttggacaagaaacggtttacacgacattgaccaccaatgctggagaagtgaaaattcctggggaatggaaacagcacaataccatggatgattctgggcaaacttatctaagcaatcaagagcacgtcattattgctattgccagaaatccacaaaaagcctacccattttataaaagtacttattctgattttgaaaatgtaaaggccttttaccaatgggatccagactaccgaagagaaaaccattataaaacccagcatttaaaagacaatacagaattgcagtatgtcatttggaaataccatgatgggaaactggataatatttttttatttggggtttctaagaaagatttcttgaacttaatggtttataccgataagtggagtgaagaggaacaaattaagtttctggaaaatttatttaagctgaataagtaggtagttggcgtttgaacggagaactggtagagtgggttggtgaaggggttaggaggtgaagttgtaaagatgtaaagatgtaaagatgtgaagatgtgaagatgtgaagttgaggagtggtagagtgaagaatggtagagtggaagagtgtaagagtgtaagagtggaagattgaagaggtatatgcttcgcaaagggtggttggtattttttatttcatggtattttcttttggtgttctttcagttttgttttggttttcttcggaaaaagagacgtttttccgaaggactcccgaagaagtctcgaaggagactcgaaggattgtaggagaggggtggtcaaatctggacattactggacattagtggacaaataaggacaatagtggacaaaactggacattagcggacaaaggtggacatttttattttctgttttgtttccattggccttttgattatatttgatggaaatacatgaaagtaaattctaccatgaaaaaatacatcatacttaccccagagggacaaaccctagcgcctaatgcagaagtggaggtagagaatttgcaagtgctgggcgtggtagagggcgtaagagacgagaatgaagccattatcaaactgttgcaagaaaatagttggattatcgatgcggaatataatgtggcagaatttattgtctatgaattactttagtctgatgaattttccttcgatatgggcttgttctagcaggtctgcattttctttgccataggctatcaaaatactgggagcaccgggagtacctttttgttcgccatctgtgttatagaattttattctgccttttacaaataataccgcgtgggcatcgttccagatgtgattaaagaagcatttggtttctgttctagcgaagattagggcaatgccgttgccatgtattttcagtttttccatccatttttccattcctttgccatagggcggattcatgtaaactctgccgaaccattgtttttgcagtccatcatcattgatattgaagttggttttagcatgtacgaaaggcggattgacgggagtgcaaggatctaaatcaaaatcgcctaattttttgactaaatcagggggtgtcaaccattctatggtggtgtttattgatttttcgaagcttacattcattgattttttttggcaaatatgtgatcaatttttcaattatgcaagtgtaaatagatctaaatcaataagttgcgtgaaataagtatcatttttattggattggaattttgtaagtttttctatggcaggaggttaggggataaaataaaaaataaaaaaagtcttattgtataatttattaaaataaagttataaaaaaaatataataaaaatcggggaacccgtattttcatgtgaagtattttttttaaatttataaattattaaaaactgataattatgaatagactatgactagaattctagttcttactaatgaaaataaaaatcccacggaagtacgcaggattaagtttttctacggcttaaaagccttgttagaaaaagtatctcagaatttattaaaacaaatttataaaaatatttaatatgagcaataaaaaatttggaattgatttaggaacaaattcatatggttgggcaattagaaattttgatttggaagaaaatcagatagaaaaagctggagtaatcagatttggtagtggtgtaggaattgataaatctggaagtgtttttacttttgcttcagtaagaacaaagggaagaggagtaagaaatagatataaatctgaaaaaaatagaaaatttgagttattaaaatatcttattaagtataaatacgtgccattaacagaaaatgaattaaaatcttggaaaaattatgtacatcctaatttaagaactaacgaaattatttcacgtaaatttccaaaagaaaatattaaatttctaaattggttacaaaatgatttttcttatttagattttgatgagaaattaaatatatacgagatcagagcaaaattagtaaatgaaaaaattgaagatgaaattttaagaaagcatcttcttgggagagttttatatcatattgctaatcatagaggattcaaaagtagtaaaaaagtaaaagaaaatatagaagatgataatgcggaagatgatatttctttaaatagaaaaaatcctattggtgcagaaagaaaaaaagctagtaaaattgaagaaatagctttaaaatataatgtaaaaaccataggggaagcttttgctaaagaaatttctttcggaaatagagtaagacaagagttacaacaatatgcaatcagaataaaacaagaggaggaggtaaaacttatttttgaaaagcaaggttatgtattggaaagtgaggaatttaaaaatctattcaaatctgttttttttcaaaaaaaacttaagtcacaaaaaggaaatgttggaaactgtacattagagaaaaacaaaacaagatgttatttaagtcattatgattttgaggaattttctgttagagagtttttaaataatgttcgaattaatagaaagcctttgactaaaaatataaaagatattttgtggaatgattttttcttaaaaagagtaaaaagtaattttaagttttctgaaattaaagagtttctctatgtaaatttttattgtaaagaaactgattattttaattatagagataaacaaactattggaggatgtcctatatcaagttacttttttaagatctttggtgagaattggcgtgatttaagaattgagactaatcttcaaaaagcaaatgcaaaaagaaaagataaaagaatcatttacaatattgaagatgtatggcatttacttttagatgaagaggatgacgaaaatctaaaaacaatttttctgaataaatataatttttctgaaaaacagataattgatttattaaaatgtagcagaaagtttgaacagggttttgcttctttatctcttaatgcaattagaaaaattctagttttcttaagagaagattttgacaatgtgagtgcaaaacttttagcaaatgtaccaatagttataggaaaagagcaatatgaatcaaatagaaaaaaaataatagagtttttaataaatatacaagatgaagtgaactttgagaagttaacatctaatatcgttaatgaacttatttatgaatggaaaaatgaagaacaaaagagaggttatagagacgtagaatataaactttcaaataatgttgaaggaaaagatattttgaacaaactacaaatacgttttggaaaagatacctggactgattattctgaagaaataaaaaagaaatactataatacatgttttaataaatttcaattttttttcaaaacaagtaagcgtgagtttataaaattaccaactttaaaagatacgtttaaggggtatttgaaaaataattttttgagtcatttttcagaagatacaattaacaaaaaattagaaagaatataccatccatcagagacaattatatatcaaaaacctgaaaactctgatgttattcttcaattaggaagtccaaaacatcctgcattgaagcagccaaaggcacttaaatctttacatattttaaaaaatcatctcaatcaacttttgaaagaagagattattgatagtgatacagaaattattattgagattgcaagagaattaaatgatattaatagagcgtgggcaattgaacaatatcagaagaagcaagaacaagaaagggaagaaataaaagtattattagaagaatattttctttcaaatggattaaatgtaaatcctcaaagtgaggatgataatgataaaatgagattggcaattgagcaaatcgaaatggaagaaaaagattatgattattctataaaagaaaactcaaaaacgaaagaaaaaaagtgggattatttcataaaacaagagaaatcaaaaatagaaaagtatgttgataaaataaaactatggaaagaacaaaatttcaggtgtatttatacaaacaaaagtatttcttttaaagatttgtttaatgatagaattgttgattttgagcatacaattccctatgaaatttcacaagataattctttacgaaataaaaccctttgttattcacattacaatactaatataaaaaaagcaaaaattccaacagaactgattgatgattatgaaactataagaaataatatagaacattgggttcaaaaagttaaatttattgaagatagaatagaattttggaagttagaatctaaaaaagctgtaggagataaagagagaaaagattcagcaattagagaaagacatttatggagtttagaattgaattattggaaaggaaaagtagaagggtttttagtaaaagaaataacagaaaagtggttgaattctcaattagttgatactcaaataatgacaaaatatgcctatcattttttgaaaacaatatttaataaagtaagagttgtaaaaggaaatgatacaaaagaatttagaaaaatattacaagtacaaccaaaagaagagctagaaaaaaacagaacacaccactcccatcatgcaatagatgctgctgttttaacactaatacccccaagtccagaaaaagaaagaataaaagttatagcagaagaatttcgtaaaaaatacaaaaaacaatatcatgattatgtgccttatcgaaattatagttcggaacatgttttaaaaattaaagacgaaataataattaattataaagaaaaagataagattttttcatcttttgtgaaaaatttaaaaaagaatgggaaaagaattcctttagaaatatataacaaacaaactaataaaaaagagattgtttatcaaaaaaatgaaaaaggtgaaattgaatttagaaaatatgaggatggcaactttataattaagaaagatcaatttggcaatccgataaaagatcagtttggcggaaaaattcctattcctgaatataaaaaaatgaaaggggatggttttagaggttctatttttcaagactctttttatagtgaattaagttattttgaaagagatgagaatggtaattttaaatttgataaggaaggtaatcatattttgaaaaaaaatgtgatagcaaaacgaattcctatagatgatgccaagaaaaaaatagatgcaataattgattttcaagtaaaagaaaatgtaaaaaaagaaatagaacgtataaaagaagaagaaaatttattgaaagataataaacttgaattagttgataaaaaaatataccaattaaacagaaaaggagaaagggtaaaagatcagtttgggaaatttattacttatagacatgtgagatgtgcaattccaaatactaaagtagttccaataaaaaatcatttatatggagataatagacattatcttgcgcaacatgaagaggtgagtttagcagcaatctatgaaattaaaacaaaaaataaaataaagagagaattaaagacactaaatcctatacacattgcagaattgaaaaataatctgaacatacttgacaaaaaagatttttttgaatatttaattgatgaaaaaacaggtgaaattatttatccaaaatatgttttctctaaaaaaactaaggtactattctatggtaatgaaactatagaagatttgaaaagaatttataatgaaggaaatattgaagatattcaaaaaagattttttatgatttcaggtattgaagaaaataaagcaggaaaaaaaattattttccagaattgttttatggcaggagatgctttaaaaagtctaccaaaaaatttatcagaattaaatctaaatgagaatgtagaaacttataaactttcacaagggaattggaattttattatggagggttatgattttaaaattaatgcattaggtgaaatagaattcaaataaaacgcaatatgttatttcgctccatttacatcggcaatcccgcttatcttaaactcaaagacgagcaaatgaaaattctttgtccggaaaccaaaaccgaaaagggcagtgttcctgtggaagatttggggttgttgatgttagaccactttcaaattactatttctcatcaattgatacagaaaatgatgggaaataatgttgtggtggtgagttgtgatgcgcatcatcttccgcatggaatgatgcttcccttgtttggtcacactgaacattcagaccgagtaaaagaccaattggaagccagtgaacctctcaaaaaacaactttggaaacaaaccgtagaatgcaagattgaaaaccagaaaagtgtcctgatgaaactgggaaattattacgaacctatgattgaatatcaaagaaacgtaaagtctggagatataacgaatatggaagggattgcggcacagcattactggaaatatctcatcagtcttgattttttgagacaacgtttcggagattctcccaatcaattttttaattttggttatgcggttcttagaagtattgttgccagagccattgtagaaacgggtttgcttccagtgttgggcatttttcataaaaataaatacaatccttattgtctggcagatgatttaatggaaccttaccgtccttttgtagattggttggtaatggattggcttacccaacatccaaattctgaagaattgaccaaagagttcaaagcccacctattacaaattgccaccaaagatgtaaaaatagacggaaaaacaagacccttgttggttgctgttaaaatgacagcttcatcgctttataaatgttatacaggagaaaaacgattgatttcttatcctgaatggttatgaataccgaaaggtttaacgcttaccgaattatgtgggtactcgttttgtatgatttaccaaccgaaactaaaaccaatatgagagatgcaagtctattcagaaagcgactattggatgatggtttttcactttttcagttttctatgtacgttcgacattgtccaagtagagaaaatgcagaggtgcatatcaagagggttaagtcaatgttgccaaaggctggaaaagtggcgataatgtgtattaccgacaagcaatttggtgagattgaaatctttttcgctagaaataaagaagagccgccaccaacctttcaacaattagaattgttctaaattttgaatcctaaaaatgaaaataatccactgtaattcagtggattaaattttgaggttgtgctttatcacaaagctaataaattctgaaagctttttctaactataggagatcctagaaagatgcaacacccgttgtgctttatcacaaagctaataaattctgaaagctttttctaaccttaaaaaagatcaagagccactgttctctgttgtgctttatcacaaagctaataaattctgaaagctttttctaactaaatctagttcctaagtgccacattctaggttgtgctttatcacaaagctaataaattctgaaagctttttctaacttaagagaagaattatatcaaaacctagatgttgtgctttatcacaaagctaataaattctgaaagctttttctaacagttcccagatttgtttgcagaaaagtttggttgtgctttatcacaaagctaataaattctgaaagctttttctaactactacattacctattacgagtttttatatgttgtgctttatcacaaagctaataaattctgaaagctttttctaaccattaatgcgagttgctcttccctagttaagttgtgctttatcacaaagctaataaattctgaaagctttttctaacgcaaaagatgcgcaaaaagcacaagaagatgttgtgctttatcacaaagctaataaattctgaaagctttttctaactttaacattaaagtggtttttttggtggttgttgtgctttatcacaaagctaataaattctgaaagctttttctaacttcacaacgaacgtcgtgaaatgcttcttggttgtgctttatcacaaagctaataaattctgaaagctttttctaactttcttctgtgagtgggattttttcaaaatgttgtgctttatcacaaagctaataaattctgaaagctttttctaaccatatatctaacttcggaattcaagaattcgttgtgctttatcacaaagctaataaattctgaaagctttttctaaccataaaaaagaagtaaatgaagaaacaacagttgtgctttatcacaaagctaataaattctgaaagctttttctaactaattaagaataacaatgtagaacggaaaagttgtgctttatcacaaagctaataaattctgaaagctttttctaactagcggtcaagtttgatgtttttacggtaagttgtgctttatcacaaagctaataaattctgaaagctttttctaaccataatcattgtatttataacctaattgttgttgtgctttatcacaaagctaataaattctgaaagctttttctaacaaactttcttttttcatcaaaaaagaaattgttgtgctttatcacaaagctaataaattctgaaagctttttctaaccaccgccgactgcgtatatatcttttgatagttgtgctttatcacaaagctaataaattctgaaagctttttctaacttcaatcaacgtactattacattttgcactgttgtgctttatcacaaagctaataaattctgaaagctttttctaactaccagaaccgtctatgtaatttctacgcagttgtgctttatcacaaagctaataaattctgaaagctttttctaactaccaagtatttctttcagtatcagattttgttgtgctttatcacaaagctaataaattctgaaagctttttctaacttttaaaggcttgggttaaattaggagttagttgtgctttatcacaaagctaataaattctgaaagctttttctaacagtcttactgaacccgatcattcattaactgttgtgctttatcacaaagctaataaattctgaaagctttttctaacattataaattctggccttcaagattgggttgttgtgctttatcacaaagctaataaattctgaaagctttttctaacatttctagaaatacctagtatttgtgaaaagttgtgctttatcacaaagctaataaattctgaaagctttttctaacgtcagcattatcaattattttttgcgcttcgttgtgctttatcacaaagctaataaattctgaaagctttttctaacctgaattgaattataaagtagaattgctttgttgtgctttatcacaaagctaataaattctgaaagctttttctaactatctttaacatctttatttgttagagattgttgtgctttatcacaaagctaataaattctgaaagctttttctaacttggttgctgctcatcctaatttaccaattgttgtgctttatcacaaagctaataaattctgaaagctttttctaactattggtagatgatgaccgatatgtagaacgttgtgctttatcacaaagctaataaattctgaaagctttttctaactatgaaggacttgatcttacaattttagacgttgtgctttatcacaaagctaataaattctgaaagctttttctaactcgaaagtggttatcaatctgcagaattctgttgtgctttatcacaaagctaataaattctgaaagctttttctaaccagcggctattttgccatattggaccacttgttgtgctttatcacaaagctaataaattctgaaagctttttctaactgtcacgtttgacaaaatttcaaattgcatgttgtgctttatcacaaagctaataaattctgaaagctttttctaacctttgaagttttcatcagacttagcgctccgttgtgctttatcacaaagctaataaattctgaaagctttttctaacaataaagaagtagatgctacacctacatctgttgtgctttatcacaaagctaataaattctgaaagctttttctaactctaattgcttttggtcagtattataagaagttgtgctttatcacaaagctaataaattctgaaagctttttctaactatgaaaatcaccaaagaatttaaagacaagttgtgctttatcacaaagctaataaattctgaaagctttttctaactattttggtctcaattcctttggggggtttgttgtgctttatcacaaagctaataaattctgaaagctttttctaactggaagagagagaaaaaattgcacttaacagttgtgctttatcacaaagctaataaattctgaaagctttttctaacgatgatagcacgtctactaatgaaaatgatgttgtgctttatcacaaagctaataaattctgaaagctttttctaaccgtgaagttctgaagaatctgtggcggtaagttgtgctttatcacaaagctaataaattctgaaagctttttctaactgaagtgttatagcaaaaagaatctgcgttgttgtgctttatcacaaagctaataaattctgaaagctttttctaaccttctatactatcaaatcttgcttctattcgttgtgctttatcacaaagctaataaattctgaaagctttttctaaccaaattttagataaataccaagagctttgcgttgtgctttatcacaaagctaataaattctgaaagctttttctaacttacccaagaagtagataaggctttcgtaggttgtgctttatcacaaagctaataaattctgaaagctttttctaacaattcatgttgagctctatagaaagaaccggttgtgctttatcacaaagctaataaattctgaaagctttttctaacaataaagattttggagttgatggagaaatagttgtgctttatcacaaagctaataaattctgaaagctttttctaactaacattatcatttacattctcattaacagttgtgctttatcacaaagctaataaattctgaaagctttttctaactagaagcagaaaagcaaatggagctacaaagttgtgctttatcacaaagctaataaattctgaaagctttttctaacattgagagaattaagcaagaagctctgattgttgtgctttatcacaaagctaataaattctgaaagctttttctaacatttaattttatatatttctcgaattcaaagttgtgctttatcacaaagctaataaattctgaaagctttttctaaccttactgaggctcaatctacagagaataaagttgtgctttatcacaaagctaataaattctgaaagctttttctaactatgagaaagtaggtgctgagattggtaagttgtgctttatcacaaagctaataaattctgaaagctttttctaactgcaacggaattgaaaaagtgatatttgtcgttgtgctttatcacaaagctaataaattctgaaagctttttctaacatttcccttgacttttcgtaatttttgtaagttgtgctttatcacaaagctaataaattctgaaagctttttctaacctgcaggttatgaaggtgagatagatagttgttgtgctttatcacaaagctaataaattctgaaagctttttctaaccttgaagcttttgaatttctggttctattagttgtgctttatcacaaagctaataaattctgaaagctttttctaactttaaaaggttttaaacgttttttttaaatgttgtgctttatcacaaagctaataaattctgaaagctttttctaacttcacgcgttgtatttctctcatgtattctgttgtgctttatcacaaagctaataaattctgaaagctttttctaactcgttgatgttttgttttagaaattctgcagttgtgctttatcacaaagctaataaattctgaaagctttttctaactagctgctgtaagtgatgttcaaaagcaaagttgtgctttatcacaaagctaataaattctgaaagctttttctaacctttgggaattgctggaattggtaatttatgttgtgctttatcacaaagctaataaattctgaaagctttttctaacgtgtagatttgcagggaatttacccgaaatgttgtgctttatcacaaagctaataaattctgaaagctttttctaacttagattaagaacagatatttttattgaaagttgtgctttatcacaaagctaataaattctgaaagctttttctaactagccaaacttcaacgattgaaatgtccgtgttgtgctttatcacaaagctaataaattctgaaagctttttctaaccgaaattaacatcgccatccaaatgaccgagttgtgctttatcacaaagctaataaattctgaaagctttttctaacttacgttttattttagatggttatccagacgttgtgctttatcacaaagctaataaattctgaaagctttttctaactagagcagattaaaatgatttttttcataggttgtgctttatcacaaagctaataaattctgaaagctttttctaacaaaggtatttgtggtccattttaaaataatgttgtgctttatcacaaagctaataaattctgaaagctttttctaaccagaaattctaattccaccagcataatatggttgtgctttatcacaaagctaataaattctgaaagctttttctaacaagaagctacaatcacctttattatatttggttgtgctttatcacaaagctaataaattctgaaagcaattgactcactacgttcgtcgaagcttcgctttcacaacaaataagtcagagaaagaatcgataagttttagatattaaatgaattatgagaacaattgactcactacgttcgtcgaagctttgctttcacaacaaagaagtcagagaaagaatcaataagttttagatattaaatgaattctgaaagcaatttacttacaacgttcgtcgaagcttcgctttcacaacaaagaagtcagagaaagaatcgataagttttagatattaaatgcattatgaaagaaatttgcttacaacgttcgtcgaagcttcgctttcacaacaaataagtcagagaaagaatcaataagttttagatattaaatgaattatgagaacaattgactcactgcgttcgtcgaagcttcgctttcacaacaaagaagtcagagaaagaatcaataagttttagatattaaatgatttctaagagcaattgaaacattatgttcttcgaagcttcgttttcaccagattatatttttaaaacattgataagcattagatagggaatgatttcaatagtactttagataaaatagggcatgtagactttactttttatatgatttgtttgaaaaatcttgttttcattgatcaactaaaatggtatatttacggtatgaaatacagattaagattgttgattttatgttttgcttttttaagcatttataaaatttatgcacaaaatagcactaatcccatccatatcgtagataaggagttgggttttaaaatggatttgccgagaggttttacgaaaatggacagtaaggaagtgggtgctgcattgcagatgggtaagaagcagattgataaaatatatgataccgattttaatatcaatggtttagagcctaatttgtttaaaaaagatgataataattattttatcatcaatattaaggatttccctgactctgaggaagcctatcaaaaagaagtagccaaatataataggttgatgtatactacttatcaaaaatcttttcccaatgttgagcttactgagtctacagaaactaaaaaaatagggaatgaggtctttacgaaatattctttgaaggctgtagtatcaaaggctttgactatgaaagtttttaattttaattctttgtataaaggcaaagatgttactttggctgcggtgtacgtggatgatgaggtagggcaagaaattctaaaagctgtagaaagtgccagttttaaataaaacggaaggtttatctacgataaaaaggagggctgcagagtattgtagctcttttttttggttaaagtaagcaagagtttttgatagaatgcaagaaatgggtagctataaaaatcccccctctatcaagtggtataataggggggggagagaaatatagtggtaatacaaaaattctattttttggtatagatggctttgccttctttgatggtttgtagtacggagatgtctttaatttttagggggtctattttaagagggttttggtctaggatgacaaggtctgccaatttaccttttttgatagagcctttaaggttttcttctttaaattcataagctccccagatggtgatagcttttaaagcttgataaggggtcaatctttcttctttacccatgatgtcaccacttctgctttgtctattgatggaggtccatagaatcatcatcatatttgggagtgcaacgggagcatcggtatgggtgttgatgtgtactccttttttgagtgcagattgcacggggcttatttctctggctgctttgtccccgatgattttcttgtaccagtctccccaatagaaggtgtgcatagggaagaaagagccaaagatttggtattttgcaaggctgtctatttggtcttttctaatgagttgaccatggatgaatatatgtctacggtcttgttttgggaattttttttcagcgttatgaatggctttgatgaattggtctccagcagcatcgccattgcaatgggctttaatttgtaaatttctttggtatgctaggtcaaccgcactttgtacctgttcgtcagtcatttgtgcataacctttatacccagttttttgaccatcaggaggaattaaatacgggatagttctccaagcagttctaccttgtggtgaaccgtctagagttatttttaagcctccaattctatagtggttggtgtattttgtgctattccattcgctatcaaggaatttagccatgctagggtcaagaaaagacaaaaggtctaattttagttttccttttttggcgtattctacaaattgcaagtggttttcataggttttaccttcgtttagggtggtgtatccatagcttagagccatttcttgtcctttatccatgtaatattctgcatatttactttcaggaaagaatagtttaaaaataacgggcgtagccgtgttttcctctaaaacgccattaggttcttgagaattaggcagtcttctaatgactccaccaggaacagctttcgtttgagcatttatattcattacttctaagcctttgctgtttaagacacagaaatgaccagaaatgtgcaatacacaaatggggatatctttagaaactttatcgaggtcttctctggtagggaatctattttctttaagaacggcatcgtcaaatcccattcctagaatccatcctttggttttgtcggtaccatttttggtatgccaatcttttaattcggcaattaaatcattcatggaattgcatttgccgtcagggcttgctaaaagattagccgtaacggcctgagcaccgaagccggcgaaatgggcatgtccatcgataaaacctggggtcatggtttttccgttgaggtcaactctttctgcatcagggcttagtttttcggcctcttttaggtttccaacaaaagctattttaccatcttttacccaaacagcttctgcatattctggggtctcgcctccttcggcagtgatgatgtctcccccgtaatataaagttccgtttttgccttcttgggttacttcggtgaagttttttccgggtttagcacaggcgatgattgcagtaacaagaatga

SEQ ID NO: 3722 - DNA, 5239 bp, synthetic construct
  source 1..5239: mol_type = other DNA
  misc_feature 1..5239: note = Synthetic
agccggcgaaagtttcgtgaggcgatgcgcatggttgcattgggctgcacgaagccccgccggaatcacgcaactgattgaaaaatcaagatgaacgtggtagcgctaacgggattcgaacgtgctaaccgccagtctgatccagtctaacccgtgctaagtctttgaaaatacgttcccggtgtctgcccacactgctggaaagtgcgccacagttcgccgtggtgcgcactttgtgcgcactttgtgcgcacttttacttggtctgttggcttcacaatggcgggtatcaagattggcgggaatcccgccgcgaagattgaatcggaaatgagaagggcccgcagcgcgggccctttaagggtgccatcgagtggcaaaccttgcgaacacgagaaactcgtgcttgctaagacaagccgagagtcccggcttcgatacaccgttgtaattttaagcggaaatagtattctggtcaagagatattttttgccggaaggaatgccatggcgcttgtacttggtctcgatctcggagcccgctcggtgggatgggcattgctcgaaaaacaaggcgacaactggacgcggatcgtgcgcgccggagtgcgcgtttttgaagctggcacggagggtaatattgagcaggggcgggatcaatcccgcggagcaacgcgccgcatcgcgcggttggctcgtcggcaaatccgccgccgccggcagcgtgcccgcgcgctctaccgcgagttggccagtgctggactccttcccgaggtcacgccctcgcccggcagcccgctggccgtattgatccaacaggcaatcaatgacctcgatgaacacttgcggcaaaaatatgcgcaggagagtgctgtaagtcagcttccgtatttcctgcgcgcccgcgcgctcgaccaccgcctggagccccacgaattgggtcgggtcatttatcacctcggccagcgccgaggtttcaaaagcaaccgaaaggctgaggcgagggaaaaagccgacggggatcctttgaaggagcagaaagataagagcgtcgtctatcgagagatagaagagctgaaggcgcaaatccaggataccggggcgcgcacgctgggcgagtatctgtcccgcgtggatccggcggtggaaaggattcggcatcgctacacccaacgaaggatgtatgaggaagagttcgaggcgatctgggaggcgcaaaggccgcaccacgcggctctgacccgtgaattgaaggaccgcctgtgggatattttattcaagcaacgtccattgcgggcaacggacgatctagtaggtgagtgtgattggattccgggcgaaaaacgggcgcctgtctggtccatggattaccaacggttccgtttgctccaagctgtcaatcacctccgggtcagtgaaaatcattctgctccgcgacctctcagctcagaagagcggctgcgtttgttggatgtgttagaaacgcagtccaaaatctcctttgctcaggccaagaaaatcctcggactgaggaaagccgagttcacgatcgaagagggcggcgagaagaacctgccaggcaacgcggtcgctgctcagttttacgaaaagctggggcaagactggatacggctcaaacctgaagatcggcaagcgctggtcgagtgcgtggccgttgcggaatccgacgagcagttgctggaggctttgaagcagcaatgggggttgtctgaggatcaggcgaggagaattgtccaggaggtaagtcttccgtccggctatgcgcggctgtccctgaaggcgatccgggccgtcatgccctacctcgaagaaggatgggacgtgcagcgggctcggatcgaagccggaattccgctgcatcgcccggtggaattgcatgaccttctcccgcctctggctgacagcggcgtggcagtgtacaacccagccgttaagcgcgtcctcacggaaatgcgcaaggttgtgaacgccatcatcactcactatggcaaacccgacgaaatccatctggaaacggcacgtgagttgcgtaagtcgcgggaggagcgtgagaaggattccaagcgcatgcgggaacacgaaaaggagcgcgaggccatcatccggaggatttgtgaggaaataggcattcctgaaaccagaatcagtcgggatgatgttcgcaaagccatgctgtgggaagagtgcaacgggatgtgcccgtattctggacggagtcttggcggcttcgcctcgttattcagcggcaattcaccagctcagatcgagcacatcatcccttttagccgctcactggataactcctttgtcaatctgacgctcgcccatgtctccgagaacgcctataagggtgacaaaacgccctgggaggcctatggggcgaatcctgaacagtgggaccggatccttcagcgcgtcgctctctttaagggctcttacaagaaggcaaagctgaaccgctttaaaatggatagtaacgctgtcggcgagttcctggagcaattcagcagccgcgccttaaacgacacccgcgccgcagccgtagccgccgcccgttacttggccttgctttttggcggggaaaccgtgggcggcaagctgaaaatcctgaaaatcactggccaggtgaccgcacacttgcgcgatgcatgggatctgaacgggttaatcccgtcgattcaccgagagacgcgcggcgaggcggcagacaaggaaccgaagacgccgcctttgaaaagccgggatgatcaccgccaccatgcggtggatgcggtggttgtggcgctctgcgaccagggatcgatccatcgtctgagtgaagccagcaaaacagcggtcgcggcccgccggcgcctattggcaccgatggcaccgccatgggtaggatttagggagcaattgaaggacattctcaaatcgatgaatatcagcttccgtccggaccatagggtgactggagcgctacacaaagaaacgttttacacaaagctcggccaaaaccaaaaaggcggcgatatggtccgattgcgcgtgcccgtcacatccctgagtagcaaggatatcgagaatattgctgacccgaccgttcgggagatcgtgcgcgccaagctcgaggaagtcgggggcgacgccgctaagttggaaaagaactggccgctcctacccaatcgcaacgggaacccggttcctatcaagaaagtccgcgtgaacctaaatcgggccgtcgtgagcgttggcaaaggccgctggcaaagatgggcggagccttcggaaacgcatcacatagagatttatgaagtcactgccaacggcaagacgacttggtcaggagatgtcgtaacaatgcgtgatgcgatcagccgcgcttcacgcggagagctcgtggttcgtaggagcagggaaccaaactcacgtttcctgtttagcctcgccaaggaagatatgctcaggctccaaggtgacaagtcgggcatctgggtagtcaagaagattaaaagtaatactcaaattgttctcgtaccacagcacgatgccagaaaagaaaaggaaaaggacaagtcgaatgggcgggagacgttgaacccgacggctagcggattgcggaagtactatgcagaaaaagtggtggttctgccgataggagatgtagtcgtatgccatgaataaccgcgtgctcgacctcacggagacacccgcccgcctgcgtgccgagaacggcctcctacatatagagcttgacggcaacggcagaagaacggtccctttgaaccaggtggccgcggttgtgtgcagccatccacagatcactttgactgaagccgtattggccgaactggctgctgcgaaggcgattctgatcgcctgcgatcgcaaacgaatgccggtcgccatgctcttgccgctgaccgcacacagtacccagaccgagaggtttcaactccaatcggaagctgcgctcacattgcgaaaacggctttggaaggagatcgtgcgagcgaaaatccgcgcccaggctgccgtaatcaagagcctgtatcgcgaggatgccgtactgttgcggctcgcttcctttgtgtctgtttctaatgcggctgccatcgaagcgcaagccagccgcctgtattggtcccggctctttgcggacgccaaataccgccgctctaatgaagaggacccgcgcaacgctttgctcaattacgggtatgccgtgatccgcgcggtctgtgcacgcgccctttgcagcgcaggtttgcacccagcgctcccgctgcatcatcacaaccgttatgatccattccctctggccaatgacctgatggagccattccgcccgcttgttgacgtctgcgttgtccagtggtggaacgttcacggcaatggcctaaccaaagaagccaagcatgccattcttgctcggttgagcgggcgcttctccaatggtgtcgagagccgaactctcttcgactgggcccagattctatctgaccgccttacacggtgtcttgatcgttcgctcgaccgcatggatatcccgcttctggagcccgcgcgcgatgaaccgcaggaagggcgagaagaacaaggtcccgagtgaataccgggccatgtggctgctagccatgttcgatctgcctgtcgacacgcaggagcaccggcgcgagtacgctcagttccggaaacatctacttaaggaaggtttcgtacaactgcaatatagcgtttacgcccggtttgcggcgagtgaggaaagcgtcgaagccgcccggcaacgcgtcaggggagctatcccgccccacggacacgtccggctaatggctgtaacggatcgccagtacgcaaagatggaggtttactttgggaaaaaacgcaagcgggtggaagatccacccgctcaatacgagcttttctgaacgggagcgggccgccaacctccgtcgcaacagaaggttagcgacccactagtgtatcgaagccgtgattctcggcaagccatagcttccgcttctgcttccgctttgggctcgcagtgtatcgaagccgtgattctcggcaagccatagcggcggaggggttgtccgcaacgtccttcccagtgtatcgaagccgtgattctcggcaagccatagcctggacccgccgctacgagagcggggaacaagtgtatcgaagccgtgattctcggcaagccatagcggtctacgttgatgttgttcgtccac

SEQ ID NO: 3723 - DNA, 23177 bp, synthetic construct
  source 1..23177: mol_type = other DNA
  misc_feature 1..23177: note = Synthetic
  variation 17040..17050: note = note, n is a, c, g, or t
cacgccgccgaaccgcccaccagcggcgttctccgcgccgaagtgcggtgcgagatggacacggtgggcttcatcgaagcccccggcggattcgacgcgggcgtgctgaatgctcacgccgcctggctgagcgcctggctgacgcttgaagcccgctatcgcgaacaacgcatcgaggccctgaccgatccgctgaccggcgcctggaaccggcgctactttgagcggtacctgtccatggccatcgagcaggccaagcaggctcgcctcaccgtcaccgtcctcgtcttcgacatcgacgagttcaagcagtacaacgacgccttcggacacgccgccggggacgagattcttcgtgaaaccgtgcggatgctgcggagcgtgatccgcccgtctgaccgggtgtgccgcatcgggggcgacgagttcgcggtgatcttctacgagccgcgcgggccccgcgtaccgaccagcaagccgccagaatccatctatcgcctggccaaacggttccaatcacagatctccgggcaccgcttccccaaactggggcgcgaggcgccaggcacgctgaccatctccggagggctggcaacctatccgtgggacgggcaagacccgcgcaccttgctcgatcgagccgacgaactggcgatccacagcaagaaggccggcaagaacgtcatcacgctcggtcccggcgccctgcgcgaatgtgtcgacccgctggacgagtgagagcaacttgtgatttgcatcgcgctggtgcgtccggctgacgggctttcgacggtgcacgccgaacctgagccatcgaaggctcggatcgtcccactttcgggccccggaagcaccctgcccgcggcctttcaccggcgctactgaatcggcctggtcgtcagccttgcccgcagcccgaaactgcacagccagacggccaggaagcacgcgatgaagaactcgcgcgcctccgacccgcccagttgatacagcaacgaatgcatctcgctctccgggcgaaacccgcgatacgccgcgtcaaagccccgccccaccaggttcatcgaggccgccgcgatgcccgcgttcgtcggccagaaccagtcgaccggcctggtcacgtcagaccgccaacgcttgttgcggatccttcgcgcgatcggaaccacgatgccgcccacgagcatccacaactccaccgccgagcgcggctgcatgttcagcatcgggtgcgtattgtgcaggttggtctctgcctgcttgttcacgcccgccagtgcctcgggcgtgccccagccgaagtagtgctgcccccacgaggcctcttcgcccgcaaaatagatgcacgccagcgcccacatcagaatccaccagcggatccagcgccgcggaaaccgcccccgagccgccgcgtagagcgcagccgcaatccccggcagcagcaccaccaccgtcgcgtgctcgaagaatcccgattcaggtgagagccaccagtcggccgcatccacgttgaccagcacggacacaatgaacgcgagcatgagcccgacaggcagcgcggccgcaaacgcccacgggagatcatgcctcccggcacgcggcgcaatgccggattccgtgctcacgggctcattgctcgtcgatccgctcatgcgcccctcacagcgggccaagtctagccaaatcggcgcggcgacgaggttcccggccacgaccaatgccgccagggcacatgggaggctgcactcgtcgctggcctggcgcgttcacgccggtggggtagatggccgacggctgacgtgccgatgggaggcctgccgatgggggcttgcgcacagaggtgccaccgacttgcgtcttggcaagtcggtgcgagccaggggtctcaccgagttcgcaatgccgaactcggtggcacaaaactcggtgccacctgccgttgcgcacagaggtgccaccgacttgcgtcttggcaagtcggtgcgggccggtcaggggtctcaccgatggagtggcgcgccgaggagatatgcggattccgtttcgagatgaagtaccccccgatgccgatgtcggtggtcgtgctgcgcgatccggccgactcggacgtgaagtgagggatgggctacttgcccgtggtgggtgcgctgcgccggcgacggcggggaacgcccgcgatcaccccgccgtagacgtagtgaggattgtcctcgctcagtttggcctggcagacggcgcaggcgagttcccactgcccgttggcgcggcacttgatgcggtacagtttgcgcgtagggtgggcgcacatcggacacaccctgaccggaacgggtggtttttcaggttgtccgggtgtgcccttctgcattacgagagatccatcacgccagcgtggatgttcaaccactctaacgccgtcgcgattccgatgtttctgacaccgaacgagcgaagcggaagattgtttggattgtcagcccgggcatttcgcccgatcatcctcggctgaggaactatcgggaaagcgcgggtgattgcgtgagcggagagaagaatcgaggctcgtgatcgcctgttcggctggcagaagtgatccgaagcgcacaaaataccccgacgaggggggtcgtcggggctggtaaaactggaacgggccgccgcgcggggggcacgtgtgtcttctctggctgggcgaaggggttgagcaccgcagcggggcggcgatcccggtcgccccgtgccggcgttatccgccgttgctcaggcgggtggctttttcgatcatcacgggctcgaccggcacgtcctggtgtccggcccgggaggtggtggcgaccttggcgatcgcgtctacgacctcggtgccttccacgaccctcccgaacaccgcatatccggcgccgtcgcggggctgatcgaggaacccgttatcggcgacgttgatgaagaactggctggtcgccgagtcggcctgcccgccgaggcgggccatcgcgacggtgtaccgcgtgttggacagcccgttctgccattcgttgcggatgggcgcattggtgcggcgctggctcatggcggtggtgaagcccccgccctgaatcatgaacccgtcgatgacgcgatggaagatggtgccgtcgtaggaaccggcgtcgacgtaggcgaggaagttctcggtggagatcggcgccttgtccttgtcgagttcgaggacgatgtctcccatggtggtgtcgagtttgacctgcacgacgttctccttgacgggcgtgggtgtgggatcgggcgatgtgttcttcgtggatgtggaaccggactcggtggacgcctcctgcctggaggactcctggttcgtgcatgcgggcagcgcacacgcggcgcccagcgcgagcgccagggcaagcctgacgccgagagaacgatgactcatggattcatctcctgcgggttgtcttcaacaggcggctgctcggcccggaaatcgggcagacgctcttccgtgatttcgggcaggtcgtcgggcgggacgatccagccgtcgcgtccgatgcgcagttgcccgctctggagcaggtagttgagcacggccacctggaggtcggaccgcgcctggtcgcgattgttgcgcgcgttgttcagttcgatttcggtgtcgacgcgagactgcggttcgagttcgtcggcccgcgcaatctgctcctcgagccgtcgctcgttgatgccgacctgctgctcagccagcatgaggcggaagcgggccagttcgatgttgcgcagcgcctgccgtgcctcgacgatcaccgtgtcgcgcgtctgctcgtacgcacgcaactggcgctcgtaactgatgagcgcctgccgcagcccgagccgctcgatgcgccggtccagcggccagccgaaggtcatggcggcggcgtactcgacttcgtccggatcgagcccgaagccgccctcgttcaggtcggggtcggtcggcacgcccacgtcgccggtcagattgaggtcgggcagcaactggttgcgtgccacctgcacggctcgcttctggtcttcaaccgaatcacgctggttctgaaggtcgaggcggtagttgagggccgccaaggtggcctcttccagcgtcgcatcgggctcgggaaggttgagcgtcatcttggccacgcggaccggctgctcgatcggaagcccgaggcggatgcggaagcgatcaagttggaagcggaacgattcctcctggctggccaggctggattgggcgctgagaacctggctgcgggtcagttcttcctggaaagcgcggagttgcccggcctgcacgagtgcggccgtctgttgctggagcccctggagaccggcgatctgctcgcgctgattctcaatgcgctgcatggacgcgaccaggtcaaagtagtccgacgcgatgccgaccagcagttctcggcggaagcgttcaaacgtgcgggccgcgtacaccaggtcgcgctcgctctggatcagtggttcgcgcgccacacgcccggccccgcgcagcagcgggatgtcggccgaaagcgccatttcggacgactggcgatagcgccgcgtggcgatgtcgcgcagttgctcggtggcgttccagacgatgcgtgcctcgacctcgccgccatacggcaggcgcttggtcgcgcgaagcgtattcacaatgtccagcgcgtggtcaaactccccgtcgtcaccggcgcccgaggcacgcaatgatgaatcggcaaagaaacgcgggccccagcggtgctgctcaatcagcaggttgatggccgcgagaatgtaatcttcctcggcgcggcggtactcacgcgaatattgctgggccaagcggaaggactcgaccagcgtgagttcgatggcgtcggcgtgcgcggactgatcggtgtacgccgccagccgactgctcacgtcgcgggcttcgtcggccacggtgtagtggaggtctgaggccgccgggttgatggtgtcgggcgtgcggtagtcgtcgggcgacggtcgggactcggaaaaaggcagatactcagagcgcgggacaaccgactcggcaccgagcaaacgggagcgctcttcgagcagtttctgggtgcgagcgtcaaccttggagagggagcctgcacacccggtcaggagccccagaagggccagcgaagagcccatgttcaggcggcagatcacccggggaggggagaggtgggaagggtgcgggcctgggggcatcggatctccgacaaagcgtcaaaggacgagggttggagtgtaggacgcgttgccgaacaggaaaggggctcctactatcttggtccaagccgaacgcgatgtatttacccccgaaataagtgggaatcgctgaacaatgggaccggttggccagaaacggtgcgggaaccgtttgggtggtcaacgaaccagggagcaacgctgcatgccttccgtgacctacgacggacggagtttcatgatcgacggccgtcggatctggatcgtcagtgccagcattccgttcagcgccataccgcggtcaagttgggaagaccgaatccacgcggccaaactggcgggcttcaacacgattgaagcgccggtggtctggtcgcgggtggagcctcgcccggggcagtttgatttctcaggcgacggggacgtcaagcacttcgtacaactggtgtccaaggcggggatgtggtgcatcctgcgtccgggtccgtacatcggaggctcatgggaactgggcgggattccggcgtggatccagagcaaccccgacatgaagttgcgggcgcccagccagccgttcctcgaggcgtgcagtcgttacatcagcgcgctggcgcatcagttgagcgacctgcaggtcacggcggcgggcaagggcgggccgattcttctgatccaggtggaatcgcagtgggcgtgcagccacgacgacatggccgcgtcgtacctgggcgagttgaaccgctacttccgcgagtcgggattcaacgtgccgacgatcaacgccaacaacctgtggcagggagtggagagcgagatcgactgctgggtgggcgagaaggaaatgctcgcgacgatgcgccagttgacgacggtgctgccggatcagccgcggctggtgatcgatttcgggcccaaggcgccggggcgcgtgggcgagccggccgggcaggcgatcgacgcgctggtggtgcagcgagagatgggggagattctggccgggggggcgcagttcaacctggtgccgtttgcggccgcgcaggtgccgggtttctggggcgggcagtcgcacacgggcaaagcgcgcttcttgacgccgctgagcgatctgcacgcgccgatcgacgtgctcggcaggccgacggagcggtatcacgcggtgcgtgcggtggcgacttttgcctcgcagttcggcaaggtgtttgcccacttcgatccgacggggcacagcgtggtgctggatccgacgcatccggggggatcgaagcagggacgggcggattttgggcccacggtggtacatcgtcgcgggtcacagggttcggtggtgttcattttctccgacgcggagcgcgggacgagccgttcgcgggggagtttgtcgctgctgctgtcggacgggtctcgcctgccggtggagttgaacggtgggttggtgcactggtgcgcgtttgacatgcatctggcggggcgctcggtgctgacgtattcgagtttgtgcgtgctgggcatgtgcggacaggtgctggtggtgttcggcggggccgggacggtgggacacgtggcaatcaacggctcgccgctggaagtcgaggttccgggcgccaggacgccgctggtgatcaagcacgagaatgtgcacatcgtggtggtgagcgacgcgttgctgaacgagacctacatcgggcaggacgcggtgtatgtcggcgtgcagtcgatcagcgcgcagggtcaggcgatcgcgacgggaaagtacacgcggatcgcaccggacgggcaggtgagcacggggagcaagggatcgaagaaggcacgggtgagcaagttgaacgtgggcgcgtgggaggccgcccaggcgatcaaccacgccgatgggaccaacccgcggtacgcgacgattccgggtccgggcaaactggccgaactgggcgcgacccaggggtacgggtggtatcgcgcgacggccaagatgggcagcgccaagaaggtgaaagtcatggcgccgggcagcgaggatcgattccaggtgattgtcgacggcgctccggccggcgtgatgggcgcaggccccggcgccgagccgcagttgtcgctgccgatgaagaagggcgaccggaccatcgtggtgctggccgacaacatggggcacgcgtgcgagggttcgaacgtcgagtggcgcaaggggctgtgcggggcgttgtgggaagtgagcccggtgaaactgggcaagccgaaactggtggaaggcgcgccgatgcagcccctgtcattccgtgcgccgctgttcgggattcgcgatgacgatcagacgcatccgaagcgtgcgtcgtggacgatcgcccatcggcggaagacgccgttgttcatggtgatggacggcgtgccggcgcgggggctggtgcttgtgaacgacgtgccggtgcggttcctcgacgcgggcgagagcgcgacgattacgctggagagcgagtcgctcaaacgcggcaacaacgtgctggagtttgcgccggtgcatgagttcggcgacgaggaagcggccgagcgcgtggtggcgcacgtggccgaggaactcggctcgtcggtgagtctgtgggaaggcgtggacgaactgacgagtcggagcgggtgggcgtttgccaagtgggagcgtccggcggacagcgcgtatggtccggcgcccaaggccggtgaatgggcggggccgacgtggtggcgcgtgacgtttgaccgttccgacgcaggcgactcggtggtgctgcacctgtcggggctgacgaagggattcgtgtacgtgaatgatcgaccggtggggcggtactttgtcgccaacgcggacgggactccggtgccgccgcaggagtcgctggtgctgcacgcgtcgatgctggctgacggagccaatgatctggtgatcttcgacgagcacgggggcaacccgggcaagtgcagactgacgccggagcggccggaggatgcgatcttcgcggcggggtgagatgagacttgaatcacagcgggcacagtgaacacagagagggttttgagattcagtgagttgagatttcgcaatctgtagtctgttgttctgctgcgttcctgtcctgctgctttgttgcgttgctgttttgccttgctgtcttcctctgtgccctctgtactcggtggttgcaacgaaaggagtgcccgtggaagcgtctctctggcagcgggcggcgagttttgcggcaagggcgcacgcgggcgggctgcgcaaggacgggcgcacgccgtatgttgcccatcccttccgcgtggcctttacagtgcggcatgtcttcgggtgcgaggatgaaatcgccatcgcggcggccctgctgcacgacaccatcgaggacacctcggccgattatgacgagatcgaagagtgcttcgggcgggacgtggccgactgcgtcagtgcgctgaccaagtccaaggccatgcgtgaggatgagcgcgagattgagtacgaccagcgcctgggtcgcgcgccgtggcaggtgcggctggtcaaactggccgacgtgtacgacaacgcgatcgacctgaccccgcgggacgccaagcacgtgcgcaagtcgatccgacgctgtgagcgtgcgagcagcctggccgagcaggacaagcaccgccccgaggtggcgcgggcgctggcatgcgtggcacaggtgcgtgagcagcagatcagggaactgggtgccctggggctgtagaagcggcgcttttccaacggcgacatacgtacgcggaggatccggggacgcggagaaggcggaggccgcggagaggtcacaggcgtgctcgtaccgtgagcctgcccgacaatcgtgcacgtgtgcggaagtatttggcagggccgccggactttccggcagcggtgcagcattcttcggcggggctgcggaactcttcggcagcggtgcagcactcttcggcagggctgcggaactcttcggccgggccgcccagctcttcggccgcggcaaaacactctccggcatcgcgcaggtatcgcgcggccacccgtctggaacgctggaaacgcggatacagctctatattcggaacccggtcgggactgcctgcagaaccgggcctagcaccgccggtcgccgactgaagatcccgcggagcggcgtgcttcttgatacgaagccccgcgatgtcgctggagaccgtcgtcagttacacaatcatgtccatgcttctgttttatcagagccgtctctggaggcggcgaggatggacaggccagcgcccgcggccgacaccgggcaagagacttccgccggcgatgccgtccgctgcgctgcgggcatcgccgacggggagattgtattgaaaggcggagaacccatcacccgactctcatctgacctggaccagcgatggggtcaagaccaatacgcgccccgccgagaacggtttcgggatagcctctagtgcatccacccccaccatttgtgctccctcactaggggaaagcaccgtctcttgccgccaaactggtctacgtggcgcggtccgcctcggccgcggtgacgggtcgtcggctggatttgaagacggcaagttgtggacctcgttcgacaaaccgcgtgcccagcacggcgggcggggtaaaaacaagaaacgcccactggtgggcgttcggggtgcccgagggcatggcccggcgcggatttccttaccgtgataacggagaagggccgctcaagtacacttgtggtattctacagaaatcatggaatccgtcaagcactcgtcagggaatcccgtccctgccccccttgttcttgggctcgacatcggcgtggcttcggtcgggtgggccgttgtgcgcttgccaaccggcgactcgtccggctcggtcctggccttgggctcccacctgttcgagccggggactgcgggcaccgacgccgaccgccagcgcggtgcggatgaacctcgcaacaccgcacgccgcacggctcggctcacacggcgtcagatctggcgtcgcgctcggcggaaacgcaagttgctcctgctcctgcaagagcatgatctgttgccgcgttccacgcctgcattgcgcacgcccgcggagatcgaccagtatctcaagagcgtcgatgcggcgctgcgcccaaagtgggccaagacgcacgaggatcagcagcggtggccgtacctaattcgcgcggcggcggccactgaacccgtggaacggcacgaacttggccgagcgatctaccacctcgcgcagcggcgcggcttcctgtccaaccggcgggcggacgcggggcgacgagatgaagaccaaagcgagatgaagagggagattggcgagctggcggatcgcatcgcggcccacgacccgccgacgcttggcgctctgctcggttcgctcgaccctgaccaggagcggctgcgtgcccgctggacgagccgcgccatgtacgtggacgagttcaacgcgatctggttgcggcaggctgccgatcacgggctgagcgaggaggcccgcgaagaagtattcgaggcggtcttctggcaacggccgctcaagagccagaagaatctcgtcggccgttgcagtttggagccgggcgagcgccgcgcgccgttggcccaccgcagggcgcagcgcttccgcgtacttcaggcagtgaacaatttgacggtggccgctgaaggcgaacttccccgcccgctgacggacgaggagcgcgccactttgcttgacgcgctctgccgaaagggcgatcacacgtgggcagcggcgcgccgcgcctgcggccttggacgggcggcccacttcaacctcgaagacggcggcgaccccaaactcatcgggcaccgcaccgatgcgaaactcatcgatgtcttcggcccggcgttcgatcgactcagcgaggacgaccgggaccgcgtcgtggaagacctgcgttcgtttcgcctgcccgaagcgctcgaacggcgcggccgctcgcgatggggcctcagcaacgaacaagcgatcgcgtttgcggggatcgagttggaggaggcctacgcctccctcagcctcaaggcgatgcggcggctgcttcccgccatggaacggggcgttccttatgcgacggcgcggcgtgagttgtatcccgagtcgtttgcttcgtccgagccgcacgacctgctcccgccggtggccgcgtcgatgccggaactgcgcaacccagccgtcgcgcgggccctgaccgaagtccgcaaggttgtcaacgaagtggtccgacgctacggcacgcccgatcaggtccgtatcgaactggcccgcgacgtcaagaacccgcgttccctgcgtgagcgtctcagccggcaaaaccgcgagcgtcagcgcgagcgcgacgatgcgaaagcccgcatcctgaaggagatgggctaccagaacccttcgcgtgacgacgtcgatcgcgtgctgctggccgatgagtgcggctggcgctgcccgtacacggaccggcagatcgaatggagcacgctgctcggaccgcaatcgcagtttgacgtcgagcacatttggccgcggtcgcgctcgctcgatgatagtttcgtgaacaagaccctgtgctaccacgaggaaaaccgcgctcgcaagcgcgggcgcacgcccttcgaggcctacagcggtgaccgtgaagcgtggaacgcgatgctggcgagggtggcacggttcaagggcgatctgcgcacgcgccgcgagaagatgcggcgtttcatggcagagtcgatcgatgccgatttcacgaatcggcacctgtcggatgcacgctacatcggcagcgcggcggccgattaccttggcgcgctctacggcgggcaggttgatgcaaacgggatccggcgggtctacatccgaaccggcggtctgaccgcctggctgcgcacgggctgggggcttgccgatctgctcggctcgaacgaggacgggagcaagagccgcgacgatcaccgccaccacgccatcgacgcgctggtggtcgcgctgaccgacgagcggtccgtgcagcagttggcccgggccgctgaagccgccgacgcacgttgggcgcggcgggcctttgacaccgtcgatgagccctggccgggcttcctgcgcgaagtcggtgagaagatccagtcggttgttgtctcgcatcggcagagtcgccgcgtgagcgggcctctgcacaatgaaaccatctacagccaaccgatcaacggacggcaccgcgtgagcaaggagttgcagagcctcacaccggcggaaatccgcgacgggcgcgttgtggacaagcgagccctccgcgccattgtggataagttggcgtccgccggactcgactcgccgacgccgcagcaactgagcaagttcttcgccgatccggccagcgctccgatggtgcgcgggcacggcgggaagcctgttcgcctccgcagggtccgcgttgaggtcggcggccaaaaggcagcgataggccgcgaggcggcggtccggcatgtggaaaccgccagcaaccaccacacagtggtctggggcgtgtgcggcgccgacggcagcgaagaacgctgggaggatcagcccgtgacactgatggaagcgtacgggcgcgtcgcggagggcaagcccgttgtctgccgcgatggggggcccaaccggcggttccagttctcgctggtcatcggagagcacgtcgaaatcgacgtgcctggcggcgagggggagcgagacatttaccgtgttctgtcgatcagtcatcgcgacatggaactggcgcgcacctccgacgcccgcacgtcgacgcagcggaaggaggccaaggaccggctgcgagtttcgggtgagaagttgcggacattgcacgctcgcaaggttcgggtcacgcacttgggcgaactgcgaccggcgagagactagttgtgggcggctccagcgctgatcgcgtgattgacttctcgatggggcaggctcatctgtcggtgcggtacgatcaactcgtcatcgagcgtaaggatcaaccgctcgtctcgacacctatcgacgaaattgccgtccttgtgctggccaatcgtcgggtcacgctcacgcaggcggtgctgtccaaactcatggacgccggaggtgcggtcctgatcgctgatgaagccatgctgcccagcggcatgatgctcccgctcaatgcccacacgacgcagacgcagcggatgatcgcgcaggccaacgccagccagccgatctgcaagcgcatctggcagcagatcgtcatcgccaagattcgggcgcaggcggccgcattgcagttgcgcaccggcgatagtgccgggctcggcgaaatggcccagaccgtgcgatcgggcgacccggagaacatggaggcacaagccgcacaacggtactggccgctcctctttgaagatcccgactttcgccgcaggcgcgagcgggacgaccagaacaaacttctcaactacggatacgcggtcctgcgcgctgccgtgggtcgggccatctgtgcgtccggcctgcatccgtcgctgggcgtgcatcatcgcagccgcaacaacccgttctgcctggccgacgacctgatggagccgtggcggccgctcattgacctggaagtggcagagatggtcggcgaactgggctccgatgcgccgctcgacagccgggccaagcagcgcctggtcggggtgctgcacgaacgtctgagcgactcaggcgagtctcgcacagtggtggagtggatttcccgcagcgccgcgtcactggctcgggcactgaccgaggacatggcagcgggggagattcgactgttcttcccagaggggctcactcgaccatgagacgccgcaagaacaggcgggccaaggagcagcggccccggtttaccgagtggggtgaccatccgagcctttcggggtaccgatccatgtggctcttcgcgatgttcgatctgcccgtcaccagcaaagcggcccggaagcgggccgccaagtttcgcagggatttgctcagccgggggtttacgatgctccagttctcggtgtacgcccggcactgcgccggggaagagtttgccagcggagtggccaaggatgtgcgctcggtgctgcccaacgacgggcaggtgaggctggtgcgggtgaccgaccggcagttcggcaagatggaggtgtattacggaaaaaagcggcgtccaacggaggaaccacctccgcaactcatgcttttttgagaggggtttgctcgcaaatccctgcctgatcgggatttgcgagcagggtagtgtacttgagcggcccctctcatgagaccacggcacggagagtacgccggccacggcgaggctgagtgtacttgagcggcccctctcatgagaccacggcgtcatagtcacagcatccaccccctcaggcagtgtacttgagcggcccctctcatgagaccacggctcgcggtcgtcagaaccgttccgtcaggcaagtgtacttgagcggcccctctcatgagaccacggcccaacaacgccgccacatacacttccgactagtgtacttgagcggcccctctcatgagaccacggctgacggcctcatacccggccgatcagcgagagtgtacttgagcggcccctctcatgagaccacggcagcggatcgagaccatccgacagtggttcgagtgtacttgagcggcccctctcatgagaccacggcgtctcttcgagcaccaccatttgcccgtgaagtgtacttgagcggcccctctcatgagaccacggcgcgctcaagcgagcggtattcgcgggtgatagtgtacttgagcggcccctctcatgagaccacggctgtcggtccagttgttttcatacacactgtagtgtacttgagcggcccctctcatgagaccacggcaagttgctgatctgggcgaacgccaacatcagtgtacttgagcggcccctctcatgagaccacggcggttgttctggacgggcgcaacgtcggcgtagtgtacttgagcggcccctctcatgagaccacggcctcactcttcgtcctccacagcgccgccgtagtgtacttgagcggcccctctcatgagaccacggcaccatcgatgacgcgatcgccgacggcctgagtgtacttgagcggcccctctcatgagaccacggcgtgccccccttcaaggtgtgtccgtgcctagtgtacttgagcggcccctctcatgagaccacggcgtacccgcttccacacgtcgtactgctcgaagtgtacttgagcggcccctctcatgagaccacggcatctgatctgtcgtgcttacgcggcgcaggagtgtacttgagcggcccctctcatgagaccacggccagcgccacctggccgagatcatggggtggagtgtacttgagcggcccctctcatgagaccacggcgacatcctccgggagcaggtgctcgagcgcagtgtacttgagcggcccctctcatgagaccacggcccttatgaatccccccttccggagaggccagtgtacttgagcggcccctctcatgagaccacggcatctggcggagttggtcggtgatggtcaaaagtgtacttgagcggcccctctcatgagaccacggccgaagtcgttggccagcgggcggtccttggagtgtacttgagcggcccctctcatgagaccacggcgcggttcgaacccaacgttcgggtccacctagtgtacttgagcggcccctctcatgagaccacggctgagcgtggaggagtatgagttcgttcgcaagtgtacttgagcggcccctctcatgagaccacggcgcggcgcagacgcggatgcccgcggggatgagtgtacttgagcggcccctctcatgagaccacggcccacggtcggcgctcagatcggcgaccgcaagtgtacttgagcggcccctctcatgagaccacggccgctgtacagcgccaccagttcgccgccgcagtgtacttgagcggcccctctcatgagaccacggccatatagcgaggctgtggcgctggcggccgagtgtacttgagcggcccctctcatgagaccacggcctcggcgtcatcgaacgggatgcacgcgaaagtgtacttgagcggcccctctcatgagaccacggctcaagaagttcgacgccgacccgaagggcagtgtacttgagcggcccctctcatgagaccacgggcccctctcatgagaccacggctgtccgcactgatcagcaaacatccgatcgagtgtacttgagcggcccctctcatgagaccacggcgagttgccggcggttccgtcaggtgttcgcagtgtacttgagcggcccctctcatgagaccacggcgtgcggcggcgagcattgaacttgtctacgagtgtacttgagcggcccctctcatgagaccacggccaatgcctcggccagccccgcccacgcccgagtgtacttgagcggcccctctcatgagaccacggccagatgcgcacccctacgaccttgtgcccgagtgtacttgagcggcccctctcatgagaccacggcctgccggcagatggggagacgatcaccatcagtgtacttgagcggcccctctcatgagaccacggccggcgggctacggacggcccgccgaggtcagtgtacttgagcggcccctctcatgagaccacggctcaagaagttcgacgccgacccgaagggcagtgtacttgagcggcccctctcatgagaccacgnnnnnnnnnnncttgagcggcccctctcatgagaccacggcgagacgggcggcaccgaaatcgtcagcgagagtgtacttgagcggcccctctcatgagaccacggctggcgggctacgcctcatacacgaaggcggagtgtacttgagcggcccctctcatgagaccacggcctgccgacagatggggagacgatcaccatcagtgtacttgagcggcccctctcatgagaccacggcgaatactccgagcgtacgcaagggagttcgagtgtacttgagcggcccctctcatgagaccacggcccaacatcggcaccaccgccgagaccttccagtgtacttgagcggcccctctcatgagaccacggctacggtcataccatccggcgtagtctacccagtgtacttgagcggcccctctcatgagaccacggcgagacgggcggcaccgaaatcgtcagcgagagtgtacttgagcggcccctctcatgagaccacggctggttggtatggaatgacgcgacgaagtgtacttgagcggcccctctcatgagaccacggcccgagaatctcggcctgagcgcgcacggcgagtgtacttgagcggcccctctcatgagaccacggccacttcgcggagcgggtaacgcaatcgtccagtgtacttgagcggcccctctcatgagaccacggcatcggcgtcatcgagcgggatgcacgcgaaagtgtacttgagcggcccctctcatgagaccacggccacatcgcagtattccgcaagggtctgcgtagtgtacttgagcggcccctctcatgagaccacggcatagaggccggccacagagattccgtcaggagtgtacttgagcggcccctctcatgagaccacggcaattccaccaccacccgataccgtccaggcagtgtacttgagcggcccctctcatgagaccacggcctgacacaccgatgacctgcggccaaaccgagtgtacttgagcggcccctctcatgagaccacggcaagggcctcgtcgaaagcgtcaccgcgatgagtgtacttgagcggcccctctcatgagaccacggcgcactccggtcgtgaccgacgacgggcgtcagccactcccgcaccacgcccgccgtgaactcggcgccgttatcgctgcggacgtgctcgggtacaccgcgtgtggccatcagccacgccagccgctccagcacgtcgtcgctgctgaggttcctcgccacgtcgatgctcaggcactcccgcgtgaactcgtccaccatcaccagcatcctgaacggtcgtccgtcgtgcgtcactccgctcacgaagtcgtacgcccacacgtggtccttgtgctcgggccgcaggcggatgcagcttccgtcgttgagccacagccgcacgcgtttgggctggcgtttgggcaccttcagcccctctctccgccagatccgttcgacgcgtttgtggttcacgtgccatccttcgcttctgagcatcgcgttgatcctgggcgtgccgtaccgaccgtacaccgccgccagttccacgatccgtcccgtcagccgatcctcgtcgtcccgcttcacaggcgtgtgccgctgcaccgctctggcctggcccagcaccttgcacgcacgccgctcgctcacgcccagttcggtctgaacgtgctcgacggcgatgcgccgacgtgccgggctcagaagtttgggcgggccgcctcccgcaggatcgccttgtccagctccgcatcggccagcagacgcttgagccgcgcgttctcctgctcaagctccttgaaccgcctggcctgatcgaccttgagcccgccgtactccttccgccatcggaagtacgtctgctccgtcacgcccagcagcttgcacacgcccgcgacggtgttgcccttgccgagctccacgtccgcctgccgcagcttgttgatcacttcctccgccgaatgacgcttcctgcccatcgccttgatcctcctgatccaggccgaagtctaaaactccgcctggactgtgttcagggggaaaggtcacattttgtttcgggttttcctttagatcacgctgcatccggccgaaacagcctcatccgggccgcatggggcggcccgcagccgcgcgccgtcacgcaggagaccggcatgtccaccgttcccaagaccatcgctgatcgactcgccttctatgagcagcacgcacccgtgtgggccgcggccgcgaccaccatcgggctgtcggtgacgcaggtcaccgcgctggccgcgctggtcaacgacgcccgcgtcgccttcgacgatgcgcaggccgcccgcaacgcgtcgaaagccgccaccgtcctgcaggccaacgccatgagcacactgagcgacttcggggccgacctcatcaagaccatccgcgcctacgccgaaaccaacaacaatcccgacgtctacgcgacggcgcagatcccgccgcccgccccgccgacacccgccggtccgcccgacatgcccaccgacctggcggcctcgtttctcttcccctggggcatccggctgacatggaaagggtctgtggcgcagggcgcctacttcggcgtcttccggcgactgcgcggcgagagcaacttcaccttcgtgcagaccaccaaggagaagtcgttcgacgacaccagcctgcccgcgggcgtcgccagcgtcgattattacatcgccgccttccgcgaccagtaccaggtcaactcggcggccatcgccctccaattcgcccccgcggccggcggcggaacgaccgtgaccagcctggggttggcggcgtaagggaagggaccagggattggggattgggcattgggattaggggaatgcacgaggggcggcacggagccgcccctcttttcgtttctccccgattgccgtgtgccgattcccgtttgccgagcatcggctcggagagccgatcgacccgacgcgcctgtgcgcatcacaccccgacatagcgagcatagatcgcccgcgcccgctcgggcgttcgcacgcctcgcaccagcgcccgcccgtcagcgaaaaccgtcagcccgatcgcttcgccgtcctcgccgcgttcttcgccgagagttccggtcacgagaaactcggtcatgcgaaacgagcccacgccggccagatgctcctgcaacttcccaagttcgatcgtcgtctcccgcggcggactgacctgcaccgccccctgcccgcacagagaggccacggtccccgcgtcgctcgcgttcagataatcgaactcccggtgcacgcagcagcggcagtcggggtcgcgctgcggctcgatgcgcgtgcgcctccccagccacaggtcgaaactcagcagtgatcgcagcacgcggtcgtgcagcccgagcaggatcttcatcgcctcgcccgcctggtagcccgccacgatcgacacagccggccccagcacaccggccgtgtcgcacgtcggctgcgaacctgccggcggaggctcggcgaacacgcagcgcagacaggccgtctgcccgggaacgaccggcagcgccatcccgccggccgcgaccacgccggcatacacgaacgggataccgtgcttgacggccgcatcgttgatcaggaagcgcgtctcgaagttgtcggtgccgtcgaggatgatgtcgggccggtgctcggcgatgattcggtcggcgttgcgcggcgagagatcgcccaccagcgcatgcacgtcgacgtgcgagttcacgtttctgagacggcgctgtgcggcgacggccttgggcgccccctcgcgtgcatcgcgctcgtcatagagcgtctgacgctggagattggtccattccaccacgtcgcggtcgatgagcaccagccgcccgatgcccgcacgacagagcagatcggccgaggcgctgcccagcgccccgcagccgacgatcagcgcgcaactttggcgcagtcgccgctgcccctcgggccccacgcccgacagcaactcctgcctgtgatagcgactcgggtcgggcatgaaaggtccacctgccggagaatgcagacgccggatctttgcccgccttcgggcacacatccgggcaaagcgttccggcgtgtcggcccccggacctgtgggcgcggacacccgaaggtccggcgactctccgattccctcagttcccggcgaacacaccctcgatccggtccagacccgcgcccagcacttgcttggcgattgcatccagggaggcccgatcgccctcaaagtgcatcacccgctcgatgtgcaccgcccgctcgccgggcttgagcgccagggccgggctcgacgtctcgatctcgtagaacgggcccagcggcggctgcccgggccccgtcggcccgtcgttgtaactgttcaccacgtcgcccgcgtacggatcatcctgctcacgccattccgagttcacgtagtcgctcgcgccggccggcttgttgaactgcacgaacgtcagcactccgcgcgccgcgtcccaactgcccgcggtcggcctgacccgactgggcttgatcccgatcttcgtgcggtactccccgtcgcagcggaagtagatcacaccgtcatcaaccaccagccggtccgccggcgccttgccgaagtatgaatcgttgtacaccgggccgagttggctctcatcaccttcgacgaacggaatcacgacggtcgtctgcgggccgggcgtgaacatgcacagcatccacacgctgagcaggcccgtctccttcttccacgcctggcgcccgcggttggtcacgccgttgacgctctcgtacgcgacggcgcgaacgccctcgggcacgcgcacgccgagcatggaactcatctcgatcgggctgagcagacgcaccgtgcgatcgacgcccaccaggaagcgcgtgcccgaccagttggtcaggtcggccgagccggcaaacgtcgcgctgcggtcgctgtgcgaggtcagagtgaacggctcggtgtcaataaacgccggaacctgccagtgctcaaactcgaacggcttgccctcggggaagtagatcgaaaactgcccgccctccggtcccatccagaatcgctcctcgccgccgaacacgttcatgtgcggcacgagttcgcccttctcgatgaaggagcggttgatccacccgtaactggttccggcgtcgcccccggcggtgctggtcatcacgcggccctgccactcgggcacgatcacgacgcgcgcgtcgccgtcctcaagcacgaccgtgccgacgtgtccatcaaggaatcgcacgtcatcgccgaacgatccggcgccgaccctttccgaagcatgattgttccgcgtcacgcctgagcaccctgccagaaacgcacaagccgccaacccgcccacgagccatctgttcatcgtgcacctccgcgatcaggcagtgtaccagcctgcgccgggacacgttcaccgtcgggacatctccgtcgccaggtcgcccacgtcctgcccgtcgttcaacttgcgcatcgacaaatagagcacggacgatgccgacccgacgtaactgaccacgaacgaagcgacggtcagcgccagcagcgagcgccagaactccagcaccagggcggccgccgcccgcgtgccctccagcggcggatcgccctcgctgagcgtcacgactcccgcctgatcggaggccagcagcaggcacatgctccgcgtggccagttcgtgcccggcgtgcagcaccagttccaccaccgcggtcagcagcacaccgacgatcaccagaatggccacgtagatcacgtagcgcagcgggcgtccgagcacatacgccatcgatcgctgaatggcgtcgaatgcgtcggggccctcacacgccagcgccgggggcaccagcagcagtccggctgcccacagcgccgccacaaacgccgtgaccacgcacaggatcagccccagtccccagaacacggccgccagcacatcaagcacggggaagggcatgagcagccagcccataccggcgatgacgaccagcaggacgccgcacaccatcggcacgccgaacacgccgagcatcatcgagcccagacgctgcaccccgcgcgccacgctgactgt

SEQ ID NO: 3724 - DNA, 4549 bp, synthetic construct
  misc_feature 1..4549: note = Synthetic
  source 1..4549: mol_type = other DNA
cgagcttggcgacgtcgttcgccttggccttggggtcggccgccagcaggggggcggcgagcaggacgagcaggggggtgaggagcggggtaaacttcatcccctccggtgtgccagcccagcaccccgccggcaagggggcaaaatcacccacgcccgcggccggtcccgcgggcgggaccaggccgggacggcggggagttcctcaggacagcttgatgccgcgggcggcggcctatatgcccaagtggggcgcgtcccacgccgcccggcaactctggccgtacatgatgcgccgtgatgctgcggcaggacgcgagctcacagcccatgagatcgggcgggcgatctatcacctcgctcagcggcgtgggtttctgtccaaccgccggacggaaggcaaggccaaagccgatgaagacaagagcgtcgtcaagagcggcatcggcgaactgcaggcggcgatcgatgcgatgccggacgagccccgcacgctgggggcgtatcttgcgtcactggacccggccgagcaccgtgcccgcgggcggtacacggctcggtcgatgtaccttgctgagttcgaccggatgtggtctgcgcagtcggcgcggtggccgtcgctgctgaccgccaaggcccgggcggacatcgagcacgccatcttcttccagcggccgctcaaggatcaatcgcacctcatcggcaagtgctcgctgattccggaccagcggcgggccccgatcgcgtaccggatctatcagcggtttcgcgtgctccagaccgtcaacgccgtggaagtcagcatgccggatgagccggtgcgccggttgacggacgacgcgcgccggatgctcaccgccgcgctctgccgcgagggggatctcacgttcgcggcggtgaagaagctgctgggcatcaagaaggccacgctgaacttcgaagccgcaaagaccaagggcctcatcggtcaccggacggacgcgacgctgcgcgaggcgttcggtgagcggttcgacacgctgcccgagccagagcgcgacctcctagtgcagacgatgcggtcgtttcggtctcccgacgcgctcgttgttcggctcaaggagcgatgggggctgagcccggaacaggccgcgtggctggctgacccccggcaagcactcgaggaagcgcgggggtcgatctcgctggctgcggtccgccggctgctgccgcacatggaggttgggggggtgggtgggggcgggctggactatgcgacggcccgcaaggcggagttcggcgtgcgtgacgcacaatccgacgagccgtttgacgaactgccgccgttggcgtgcttcacggatcggcacaattcggaaaagtgctacgcaaagcgatgcgggagcaccgctcgggcgagcgcggccctgagcacgctgcgcaacccctccgtcgcacgcgcgttgaccgaggtgcgcacgcttgtgaacgcgatcgtgcggcggcacggaaagcccgcgatcgtccgaatcgaactcgcccgcgacctgaagaacccccggggcgtccgcgagaggatgacgcggcagaaccgagaccgcgaagacgtgcgtaaggcggcataccagcgcgtcgtccaaaaggcggacattccgcgcccaagccgcgaggacgtcgacaaggcgctgctgtttgaggagtgcggcggcatctgcccgtacacgggcaggcccatcgacttccggtccatgttcggccgccatccggaggttgatgtcgagcacatctggccgcggtcgcgatgtcttgatgacagcatgctcaacaagaccctgtgctacgccgacgagaaccggtcccgcaagcgcgggcggacgccgttcgaggcctatggcggcgggagcggtgccgacaacgagcggtacgcgcagatgctcgaccgtgtgctccgcttcaagggcgacgggtatgcgcggcgggaaaagcaccggcgttttgccgcgaccgagatcgacgcgggctttgagaaccgccacctgtccgatacccgcttcatcgcccgggcctgcgctgattacctggcgctgctgttcggcggcaacacgcagatgcgcgtggacgaagagggaacgcgccgcgtcgagacaccgacgggcggtctgacggcgtggctgcgcagcggatggggtctgtcgcggctgctcggcgaaacaccggagaagaaccgggccgaccaccggcaccacgccatcgatgcgatcgtggtggcgctgacggatcagggcgcaatcaagcgtctggccgacgcggccaaacgcgccgagacaaagcgcgagcgccgtgcgttcgaggatgtcgaggagccgtttgcgggctttcgcgaccgggcgaaggaactgatcgacggaatggttgtggcccaccgccagagccggaaggtgcggggaccgctgcacgcggcgtcaatctacagtcgaccgctcggtgctccaactgaccccgagcaccggatccggaaggaactcgaaaaactcagccccaccgagatcgcgaagggcctgatcgtggacaaacgggcgctcaaggcgatccgcgacaagctcaaggaactcaagatcaccaagccggaccagaagaccattgggcaggtgttcggcaaccctgcgaatgcgccgttggtcatggggcatggcgggaagatggtccggcttcggaaggtgcgggtggtggtgacaaagacaccacaacggatcggccgcaagcacccgaagcacattctgaccgcgggcaaccaccacacggtcatcgtggaggagaaggacgctcaaggcaaggtgaggtgggtcgacgaaccggtgacgctcgtcgacgtggtgcgccgcctcgacgcaaaggcggcgagcgttcagcgggtgcagccggaggggcgacggtttgttttctcgctcgcaaagaatgactttgtggagatcgacaatccgatccgaggtgggcgtgggcgacgtgtgtatcgggtgagctacctttccgaggggctgaccggacttcggttgcaccaggatggtcggcctgccggaaagctccgcggcagccgggcggagggacgcgccgacgagcgggtcatcgtggatggtgagaaactgcgcaaactgaatgctcgcaaagtccgtgtgacctatctcggagaaatcttgccagcgaacgattaggcggcacacttgaccgggacgtcgagggccgtgtgtatgccgaccccgctgaccggtcgcgtgctggatttctcgctcgggcaggcccacctctgcctgcggtaccgccaactcatggtcaggcgggacggcctccccgaagcgactgtgcccatggacgagatcgccgtggtgatcctgtgctcgcgccgggtcacgatctcggtcgctgcactcgatgggctgacgtccagcggtgcggcggtggtcgtctgcgacgaacggtcgctgccaagcgggatgatgctcccgctggggcaggcggggcactttgcacaagcgcagcgcatgcgcgcccaacttgatgcgtcgctgcccacctgcaaacgcgtttggcaggaaattgtccgggccaaggtgcgggcgcaggcctcgctgctcgcggtgtaccggggtgacgaccacggtatcggcggactggcggtccgggtgcgctccggcgatcccgacaatatcgaggcccaggccgcccagcggtactggcccgcgctcttcggcgacgactttcgaaggcgctttgaccactccgccccggaccagaacgcgctcttgaactacggatacgccgtgctccgcgcaagcgtcggccgcgcggtctgtgcgtcggggctgcacccgtcgctgggcgtgcatcaccacggccgaacaaacccgttctgtctggccgacgacctgatggagccgtaccgcccggtcgtggacggcgaggtggcggagatcgtcggcgcaaccgggcattgtgccgcggagctggacccgctgaccaaggcccggctcgtgggcgtgctgcacgaggggctggaacatgacggggaagtccgcccagtcatggactggatcggtcggtcggccgcgagtctggcccggcggttgtgcggggagagcgacgagcccatcttctttccgagcgggctggtgcagccgtgagcgcgggccgggcgcagcgtgcgggccgatcaacgcgagcgcggtcgcggcgtgccgaggaggagggcgacacggaggacatgccgcgatacaccgccgacgaagaccgtcccgcgctctcggggtaccgatccatgtggctctttgcgatgttcgatctgcccgtgcacgacaaggcgctgcggaagaagtacgcgcgtttccgcaaggacctgctcagcgaggggttcaccatgctgcagtacagcgtgtatgctcggcactgcgcgagcgaagagagagccacggccatccggcgtcgcgtcgaatgctgccttcccgacgagggacaggttcggctgatcggcatcaccgaccggcagttcgggaagatggaggtgtactttggaaaatcg

SEQ ID NO: 3725 - DNA, 23372 bp, synthetic construct
  misc_feature 1..23372: note = Synthetic
  source 1..23372: mol_type = other DNA
ttatcatctaaatatttaactttaaaaacgcctgcatcttataatactatgatgggactttctcttacaattaataatcagttaaatcctgaaactgaaatttttgtaatggaaatgggagctttttttgtaggtgaaattgaacaaatgagtagggcttttagacccaatattgctattattactgaaattggcatgcaacatatgtcaacctttaaatcagttaaaaatattgctaaagcgaagtttgaaattgcatcttcacttgatcaaaatggctgtttaattttaaattatgataatgaatatattagggattatgataaaagcaagatagtaacaaatcatatttatacatatgggattgaaaggggcgattaccatattgaaaatttagtctttaatggtaaagaaacgaccttttctatatttcattttgaccatttcgttatggatataaaaacaaatttacttgggcgtcatcatgttttaaatattttggcggctttcacaacgcttaaggctttagaaagatatcatatatatatagataatgaaacatttcaaaaagtggtggcgaaaatcacaccaacgctacatcgattaagttatagggaagagggtatgtatcatatatatgatgattcatatagttctaatattattgggtttaaaaatgctagtgaggttcttagcatgcaagaaggaaggaaaattattattacacctggaattgttgatggaggagaatatgatcaatctatcaatgaagagattgcaaaagtaatgatagatatttttgatgaaatttatttaatcaataataaatctagtcaagttattgcacaaattttaaaagataagaaaataaattatttgatattttcttcctttaaagaggcatatttaacgattttatcgaaatataatagaagtgatgaaatcattaatattttaattgagaatgatttacccgatagttttttagaaaggtagcgaataaaaatgaaagacgatcgaattcatgttggtattattattgggggaagaagtgtagaatgcgaaatatcgctaatttcgggtttacaagcctattatgcgatggataaaagcaagtatcatcctaccatcttttatttagataaaaataatcatttgtttgtaggagaaactctgaatgatatcaacacgtataaattagaaaatattaaaaatttaaaggaagtattcttacatcatgaaaataaccaagtgtattatcactatgtaaaaagacctaaaaagaaatttccaatagatgtttttatcccagttgttcatggatttggagttgaggatggaacagttgtaggaatgcttgatttaatgggagccatttattctgctagtgatgttattccttctgcaatcgttcaagacaaggttgctactaaggcgcttttagataagtttatgcttcctaatattgcatatcaagtgttgtatgaaaatcatccattagaaagtgatctctcatttcctgtaattgtaaaaccttcttatcttggttcaagtattggtataaatgttgcaaaaaatgaacaagaattagccgatgcattaaaagaagcctttgcatatacggatgaagtattagtagaaaaagcattaactgattttaaggaatttaactgtgcggcaatatgtgatcatcatcaagtcattacatcttgtgttgaagaagtcatgcatacaaaagatattttatcgtttatagacaaatatgaaactgatttaaacaaactttctaatgctacaaatcggattattcccgctttaatagataaagagttagaaacaaaaattaaagaattgaccagtaaaatatatactttgtttcatttaaaagggattgtacggattgactttttatttgataatttagaaaataaattatacataaatgaaataaataatattcctggttcactagctttctatttatttgaacctcttggtatttcctttacagaacttttaaatatgttaattcacaatgctatgattactcatcatcaaaaaagtcaaaaaataactacctttcaatccaatattttaacaaaaaaatcatcaaaattaatgaagaaataaacaatctatgatataataaaatggaagctgacgtagcacaatcggcagtgcacctccatggtaaggaggaggttgctggttcaagtccggccgtcagcaccattagaaataaattaggtttgatatatgaagtaactcaaataaggtttgctttcgtattcaagcctttttcttttatcctaattggctattttcaatcaagaagaaaggaaaaaggagctgaaattttgatcatatgcatcatggaaagtaaaatagttgactaaagttcaatttcgtactataataaagtacgaattaggattttaaaggagaaaacgaaaatggatgcaaaagaattcttttatcttttaggtaaagcaatttatcggattgatgccatttatactgattatgcaaaagaaagtgatgtatcaccaaccctgttatggatactttatgcattaaacgatggcaagccacatacacaaaaagaaatttgtctttcttgggatttacccaaaagcacagtaaataccattgtaatgggactaaaaaaaaagggatatgtacaattagaaccaatcaaaggacaaaaaagggaaatgacaatagggattactgaagagggaaaacagtatgcaaaaataaaattacaacctatttatgaaagagaaaaaaaagtttttcatcacttaacagatgaggatatgcaagtagtagaagcattgaataagcttgccaaattgttatgtgaataaaaaatgaaaggatggaaaaatagtttatgaaaaagttatggacgtgttttttaatatgtttattttttggtttattgtttagttgttctaaagataatcaaaatgaatcagaaaatccaaatcaaatcaatcaaaagattgctgtagtatatttttctgctactaaaacaaccgaaaatattgctattcaaatagcagatataacaaaaggaaggttaatgcagattttgccagccattccttattcagcagatgatttaaattatactaacgatgattgcagagccaatgttgaacaaaatgatgaaaatgcaagaccagaaatagcaaataatattgagataaatgattgttcgatcatgtttatcggctatccgatatggtggggaaaattacctaaaattatttatactttttttgatacatatgatttggcagataaaacaattattccgttttgtactagtggtggtagcgcaatttcaactagtgtaaatgaaatcaaagaactagaaccctttgcttttgttaaagaggggaaaagattttcgtcatcttcatcgcagtctgaaataaaaaattggattgctcagttaaatgtaaaaataaatgaaaaggtaggtatggaataatgataaaacaagatgtaggtacaaagcaattaggggatatagcacctaaatttgctcaactcaatgatgaggtcttatttggtgaggtttggtctagggaagataaactttctttaagagatagaagtcttattacggttgcagcattattgacaaaaggaattgttgatcattcaattcaatatcatttagaaaatgctaaaaaccatggtgtaagcaaaactgaaatggttgaagtgattactcaacttgctttttatgccggatggcctaatgcatgggcagtttttcctatggttaaaaaagtttatcaagatgaaaaagaaattttaggcgatagtttatttggaagaggagaacccaatgtagcatttgctaattattttacggggaagtcctatcttaaaacactcaatactaaaaatattggtatttataatgtaacttttgaaccaaagtgtcgaaataattggcatattcatcataagggtggacaaattcttctttgtacagatggtgagggttggtatcaagaagaaggtaaacaagcaataaaactaacaccgggtagtgtggtttatattcctgctgaggttaaacattggcatggagcaagtaaagatgcatggtttacccatctagcaattgaaataccagccgattatgccacaaatgagtggtgtgaaccagtagatgatgaaacatataatatgttgtaggaggaatcgaaaatgaaacaattagtagcatattttagtgcatccggtattactaaagcggtagcagaaaaacttgcaagaataaaggaagcagatttgtttgaaatcataccccaagaaatgtatactagtgatgatttagattggacaaatgccaattctagatcgagtattgaaatgaaagataagtcatctagacctaaaatcatttcaaaagtcaaaaatataaatgagtatgatgttatctatttgggatttcccatttggtggtatcaagcccctactatcatcaatacttttttagaaatgtatgattttaatggtcaaacaattattccttttgcaacctctggtggaagtggtatgggaaaaaccaatcaatatttattaccatcatgtaagaaagcaaaactattagatggaaagcggttgtcatctaatcctagtgaagaggaattaaaacatctttaaaaaaaatataccatgtaaacaaaagcctaatatttaggcttttttatttataaatagataaactgagattcttaaatcataggaatgatataggatctttatatagagaatagtatcggttagaacatataaaagaggcggttaaaagatgtatcatgcgtaatatttcaatcataacattggcgttcaatccatatttttaggaaagtttaggaaaagtttagatatatttcatttacaaaatattctatttatagtataataataaattgtaggagaatctttataggtggtcatatggatgaaaatatcaatctagtaatagaaaaactaaagcaaactttaaagttgcaaaaggtattattggcttgttcaacaggtgtcgattcaatggttcttttagatttacttagaaaaagtctagatgctagtcaaattgttattgcccatgtcaatcatcaaagaagaagtgaatcagcaatagaagaaacatatattctttcatatgctaagcaaaatcatataaattgctacacgacaaaacttccccactacagtggcaataattttcaaaattgggcaagaaaaaagcggtatgcgttttttttagaaattgctgaagcggaaaagattgatattgttttgcttgctcatcatgctgatgacaatttagaaaccattttgttaagattacttcgcagttcatctttagaaggatatggtggtatcaaagaatattcaaactatcaaggattaactatatatagaccacttttaaacatcagtaaagatgaaattatagaatatgctaaaagcaatagcattaaatattttgaagattctagcaattttgaagatgattatgctagaaatagaattagacattatgttttacccattttaaaaaaagaaaatcctgctttaaccaaagctatttcttgttttagcaatactattttagaagctaatgaatttataaaaaattacgaaactaattttataaaaagacaacaaatggtttataataataatgattatttcgcgaaaatagatttaggtgaatttttaaatgaaacaacgtttttacaaacgcagattttatttagaatgttaaaacctttttcgttatcaaaagaatgtattcttgatacaatcaaacaactcaaatcatctaaacaaaatattgttcaaaatataaatcctcatttaatgatgattaaagaatatggttatgttatttttaccaatcagaaaatcaaagactattatttgaagattgatgaagaaggtgagtatgagttagataatcatacttatttgcatattactaaaaatatttgtaattttatcacatcgagtggtaaattatggtataatataaacatgttgccaatcattattagaactagaaaaaatggtgataaaattaaaactaaaaagggtagcataagtgtaagtgattatttgactaatcataaaattccatatttacaaagaaaacaaatcttattactatgtgataaggatgatttaccaatagctatacttggctatataataaaataaaaggaggaacaaatggcaagtatgaataaaagtcccaaaaagcgttttggtcttggtgacatcattatttttgggattattttaattgcaatcatttttatatttgcgggatcatgcggtggaaataaagccaaaacaattgaaacaaaagaagaattttatggctatttcttcaaaaatgcctcagatggtgcagcagtatataatgatttatcacaactagataaagacaaattaattagtgcccaagatttacaaattgaaagaatctattactatggtgcaactggtgatggaaattatttttataatatatatatctatttgccatcatcggcgaattgtatgaatttatcatcgagtgcgaaaatttatcattttaaagctgatgataaagatttggaaatcattaaggctattcaaaatttaatgttacaaataaatgaagaaattaaacttgataatgaagcaaataaagataatccaaattatacacaacaaaaaacctataagatttttgaggtaacaccaagagaaaataagagtattgatattttaggtattttatctattgccattcctatcattgctattgttgctttcattatcattatgttgaaaaatggtaagagcaataatcaagcctttgattttggtaaaagtcgtgcaagaatggctaaaaaatcaaatgttaccttcaaagatgtggctggattagatgaagaaaaagaagagatgatagaacttgtagatttcttgaaaaatcctaaaaagtattttgatatgggagcaagaattcctaaaggagtactattacttggtagtcctggtactggtaaaacgttaatggctagagctgtagcaggtgaggctggagttcctttttataccatatcaggttctgattttgttgaaatgtttgtcggtgttggtgctagccgtgttagggatatgtttaagacagcaaaacaaaatgctccatgtattttatttattgatgaaatcgatgcggtaggtagacaaagaggtgctggtcttggtggtggacatgatgaaagagagcaaacacttaaccaactattagttgaaatggatggattccaacctaattcgggtgtaattgtgatggccgcaaccaaccgagcagatattttagatcctgcccttcttcgtccaggaagatttgaccgtcaaattagaattagtaatccggatgttagatcacgtgaggctattttaaaggttcatgctagaaataaacatttatctcctcgagtaaatctaaccgatgttgctagaagaacaccaggatttagtggggctgatcttgaaaatttattaaatgaggcagcattacttgcggcacgtgagaattgtcgtgaaataaaaatatatcatattgatgaggctattgatagagtaatgatggggcctgcaaaaagaagtagaaaatatacagataccgaaaaagctttggttgcatatcatgaagcaggacatgctgttattggtctgaaattaaaacatgctgttgtagtacaaaaagtaacaattgtaccacgtggagatgcaggtggatataacctaatgacaccagaagaggaaaacttcttagaaaccaaacaaacactaacagcgaatattacaagttttttagcagggcgaattgccgaagaattggtattcaatcaaatgacaacaggtgctcacaatgattttgaaagagcaacaaagattgcaagagcgatggttactgaatttggtatgagttctttaggacctgttcaatatgaaagtggttcacatgatgttttcttaggtcgtgattatatgagtgataaaaatttctctgataaggtggcacatgaaattgatttagaagttcgtaaaattatagatgagtgttacaaacaaggagaaacaattatcaaagaaaatcgccaacttttagatttaattgcgaaacatctagttgaagtggaaactcttactaaagaagatattgatgaacttgtaaatacaggaaagttaaattggtgggagaagaagaaggcaaagatggctgaagatagaaaaatggatgaaactcctgtacaaaaagtacaagtaactgaagaaaagaaggaagaaactcctaaggtagaagatgtttctcataaagaagaaaccaaaactgaggatgattctaatgagactagataagtatttaaaagtatcaagactgattaaaagaagaacccttgcaaaagaagcaacggaagctgatcgaatattattaaatggaagtcctgctaaaccttctaaagaggttaaggttggtgatcatttaacaatcagttatggtaaaagggtggtagaagttaagattacttctttactggattctacgaagaaagcggatgcttctttcatgtatgaattcattggtgaaactactcgctgataaagaattggtcataaggtaagtgtatcttatgaccaattttatgttttatgatatactatataaagtaaaggagttaaatatgaatataatacttgcctcaaactcaccaagaagaacccaaattttaacacttgcccaaatctatcatcaagtagtaccttcagcgtgtgaagaaacgattgcccaaaatttagaaccttatgaagtggtagaatcactttcttatcaaaaagcggctgatgttgctaaaaaatatcctaatgatattatcattggtgctgatacaatcgtagtaattgataatcagattttaggcaaacctaaaaatgaacaagaagccatcttgatgttagaaaaacttagtgctaagacacatcatgttataacaggtattacaattttatcaaaaaataggtgtaaaactttccatgaaataaccaaagtagaaattgcgcaattatctaaacaagatattacaacatatctaaaagaagaaaatgtttatgataaagcaggttcttatggtattcaagggatattttgtaaatatattactaaaatagaaggtgattattataatgtgatgggacttccaattgctaaagtatataaagaattaaaggagtttaataatgaaatataataaacaattatttgatcaaatggaaacagaatatcatcaagttctaaatttgtgtgaattcatttttgataacttaattgaaaaaaatgatgaaattaaaaaatatgatattatgtgtgaatttgattattatcttcaaagtattcttgccaaaattgttttagatcataatcctaaaaatcctgcactattgaatatgttaaaaaaactcaatacatatattagtttttatcaaggaattcatttagatgattggtttaacgcaaaagaaaaaattctttttagtatagataaaaaaatcaaacaaatgacttcaaatattcctgttatattacagattgtcatcaacatagatgaaaaaacaaaaaagactgaattatcttatcaaattttagaatcgttagtatctcttgcactgacgattattcctgataaagaaacttttgaagatatagaaagtgaagttgtcaatacatattttggtgatatataccatcaaatacaaataaaagtcaaatagatagataaaaatttatttatctattttttattataataatattagataaaatattacaaatagttataatattcttttactaaaattcccaattatgttataatataattaattaaatatttggagggttttgatgaagaaatatacaattggattagatttaggaattaataatgttggttgggcaaaatatgatttagaaaccaaaaaagtgatagacaaaggtgtcgttagatttaaggaatcttcaactgctcaagatagaaggattataagaggttctagaagattaagaaaaagaaaacaacacagagtagaaagattagcaatacaattatcaaatataaatttttgtactagtcgtagttacgaaccagaactattaaataaaagaataaaaggtttgaatgaatcattatctgaacaagaaattactaatattatttattggtttgctattcatagaggatatattccatttgatgaagaaaaaccagaaagagaggttcataagtttgcggaagacgagtatccatgtcaatatatatttgattattataaggaatatggtgtgtatcgtggacaatgcgatttaatatcattaaaggataacttgaaagaattgaaacaaattttgcttactcaacagaaatatcattcaaaattaacagatgaggtcatagataatattttatatattatccaatcaaaaagagaattttgggaaggtcctggcgcctcaaaagaaaatcagttatctccatatggaagatatagaactttagaggatttagaaaaatataaagcagattcaacttatcatcaatacttatatgagatgttaattggaaaatgtgagttatccatagataaagatggttttatggatcaagttgcacctaaatgtaacttttatgcagaagaatttaatttttataatgattttattaatatgagcgtaaaagaaccaagtcaaatagatgaggagtatagaaataaaattactttaaaaggtaaatttactaaagatacaattgaagaaattaaaaaagaaattttaaatacaaaaactgtttcacttgaaaaattagtaaaaaaggtgttaggtttagaattaaaagatatccaaggctatcgtattgacaaaaagtataaacctgaaatttcaaaatttgaattttataaatatttattaaagagcttcaaggataaaaaattaaatcctcattggttagaaaatgatgataaaacaatatataatcaaattatatatatattaactgttgctccatccacatatgctattgaagatatgttaaaagacagagtgaaagaagttgaatttaaaaaagaagaaattgatgttttaatagatataaaaaagaaaaaaaatcctgatttaaaatatcactctttatctgaacggatacttaagaaagcattagatgatataaaaagacataattgcgaatataattttatgcaaattatgaaaagacttgaatatgaaaaagagatgaaagaatattttcaaaataactattccactaaaacacaatcaccttatacaatagaagatcaatatatagatcatcttattgcaaatccacaagttaaaaagactttacgtaaagcgattaaagtaatcaatgcaataataaaaaaagaaaaaaattatccagaaacaatagtaattgaatctgctacgtcactgaatagtaaagaaagaaaaaaacaaattaaggcagaacaaaaaaaatatgataaattaaacgaagaagcaaaaaatgaattagaagctaatggatatgaagcaaccgataaaaatatgcaattgttaatcaactggaaagaaacaaacgagtcatgtatatattgtggagagtctatttcattaaaggaagtattaactacagaaattgagcatattcttcctaaatcaaaatcaatggataattcacataataatactacttgttcttgtttaaaatgtaacaaagaaaaaaataatcgtacaccatatcaatatttgacatctgagaataggtatgaaggttttaaaaatcgtgtaatgaatcaatatgataaaatgtctcaagataaaaagtctaatttattatttgaaggtgatatagataaatattcaatcaaattcatcaatagaaatttaagagatacttcttatgcatctgttgctttagttcaagaattaaaaaaatataatgagtaccttggggcaaaagaaggatataaaataaatattattacttctcctggccaacttactagtaaaattagacaatatttaaaaattaaagataaagataggacttatttatatcatcatgtagtagatgcaatgattcttgcaagtattccagatacagaaataggaaaagtattaattgaagcacaaaatgatagtcaatattggtttaaagacaaaaataaagagaataaatataaagaagaagtatataatatgttaaatcatgtatggctttcaaatagagatcaaattcaaaagtttaatcaagattgtgacaatatgcctgaagataataaagatggtttaattaaacgttcttatgaagtattaaaaaatccaattcaacaatttagtcaatataccgaatatgcaaaatatattaaacaagatgatggttattataaaatattacaagttgataatatttataatttgttaattagaaaaaaagatggcagtgtagataaagataaacaattattagatgaattatttgacttatctaataaaaaaacgatatccttactttgtgagaaaaaagatcccaaattgtatcaaaaattaaaagatatatatattaaaaatgcctcttcaataaatccttttgttgatgaatgtaaatatatgtatggattagaagaaggggataaattcaattatttaaaacagggaattcgaaaaacagataatccaaatagcccacttgttataagattaagatatcttaaaagagtaaccaatccatatattaaaaataacataactacaagaagaaaaaatgtatataatgaatttactataaataaaccaaaaaaagatactataatcggtttagatggcctcaagcaagtgtcaacaagaattttttattcttatgatgataaaaaatttatctttttgccaatatgtgcaattagttttgtaaatgggaaattaaataaaaaggaaaaaaattatcaaacaacctataatagattaattggaaataaaaacgtaaaagaaattggtaatatctatacgggggaatgggttggagtttataaaaaaaatggagaatatttggaaggtagatataaagggtatcataagacatctaatgttttagagtactatattaatggattagatactttatcatgtgttaaaatatgttctagcgatttaagaattattatttatacaacagatattttaggtaatcgtcatataagacttgacacacaaaaagaaatatagtataatattagtgtactagacgtagtactacatattcaaatttaacaaagattcctattattacacgaatgtggaatccaaaaagagggttaatccctcttttattttttatttaatttttaaaaggatgtgagatatgggatggcgtacaatttgtataaatgaagcaattaggttaaattataaattaaattcgcttggagtattacaaaaagatgaaattgtatggataaatttagatgaaatagatattattatagtagaaacgcttatgtgtaatctctctttaaaattattatcagaacttgctagtaaagggataacaatgattgtatgtggagaagatcatatgccaataggaaattttattagtataaatgataatcaaaggaccgcaaaatttaatagacttcaaatggagtgggatcaaaaatctaaacaattattatggcaaaaaattataaaacataagatactattacaaatgatagtcttgtataaaaataataaaaagaataaagtagatattttgaacaaatatatagaagaagttgagttaggtgatattacaaaccgagaagggcttgcggcaaagatttattttcatgaattatttggtttagattttataagaactagaaatgctacagatataattaatagttcattgaattatatatatcaagtagttagagctaaaattgctcaagaaattatcagtcatggatatatatcatctttgggtatttttcactgtagtgagtataattactttggatttgcagatgatttaatagaagtgtataggccaataattgattattatgtaattcaattgattattaaagagaatgtttcttttatgagttcgtcttataaagaaaaacttttatctcttttatatactatcattttttatgataataaaaaacaaaaattaattgaatctataaaattatttgttatatcagttacagattgtttatcaaataaagaaatagaaaggataaattttccatatttttatgatgaaaattagcgattaccgaaaaatgagagcaataattttatttgatttaccaagtgttgaaaaacaggatatagcaaataatcaaaaatttataaaaaaattaaaaaaaataggattttatatgttacaattttctgtatatacgaaagtattaattaatcaatctgaatatgatagaattattaaaaaagttaaacaaattataccaaacaaggggaatataataattttaaaattaacggataagcaatacaatgatatgatttatttaaatggtgaaaaaaataaatacgatagtattgtaggattaaataatgttgtttattttggaggtgatgattataattgaattaaaaattaataatcattttttaacagttagtgaattatatgtagaaaaagtcaatcatttattagtattaaattataatacattgtattattttttaaataatttttttaatagtcaagaagcacaaatatttttaggaaactataaaatagattataaatctgcatatatcattaacttattagattatgaaagtatttctaatcaattaatattaaaaaaaggtacaattttatatgattatttaattgatgaaacaatatctaaaattgaagatacatatatagaagaagaattagaaatacaattaaaaaaattaatagaagaagtaatgattgataaaactttagaatatgaaactgaatttaatatagatatcagtaaaatagttacgaattatattcattttaaaatggatttaagtatagaaaattatataaaaagtataaaaaaattaattattaatttaaaaaataaaaatttaaaaaaatccattattatttttattaatactaatatatttggtaatgatttggatgacttagaaggagttataatatttaaattatattcaaaaaattttcctaatattattgtaaataataatgtagagaatattgaaaaacaaatattaattaatcaaataaaattaaattggccatgcgaaattgaaaataaaattatatatgaaatagttgaaaattttgcaaaagatgtgtctataaacaaagaaatctatacagatgattatatgaaatatgttgggtatatactaatatctaaaatattacaattaaatatagattgtaaattaactagttataatataaacaacataccaagttgttatataaattttataaaatcattgtaattattttattattatgatataataaaaaaggattcaaaaactaaaaaatgaataggacgctattcattgaatttatattcaaattatacatataactaaaatttgaggttttaggatgttgttaaatttgaatatgataaaagcatcaaaacagtaaaaaaagccattatttagttttaggatgttgttaaatttgaatatgataaaagaataatatagtaaatatcattactaaacttgttttaggatgttgttaaatttgaatatgataaaagttaactcattggataactaattggatacgtgttttaggatgttgttaaatttgaatatgataaaagccaacaacctccaaagataaaccatctttagttttaggatgttgttaaatttgaatatgataaaagttttgttgaagacattcaacacacttaccagttttaggatgttgttaaatttgaatatgataaaagatataagcattttgtgcttgttgtgatgcagttttaggatgttgttaaatttgaatatgataaaagttgtcgaaatgaaattatagatatagtttggttttaggatgttgttaaatttgaatatgataaaagccattgtagtaaaagttgcatagaagaaatgttttaggatgttgttaaatttgaatatgataaaagcctgaacaagagtcataccacaaataccaagttttaggatgttgttaaatttgaatatgataaaaggtctacagaatgggcttatcgttgtattttgttttaggatgttgttaaatttgaatatgataaaagacttacagagatgcctctgagaacctcatagttttaggatgttgttaaatttgaatatgataaaagttgaacaagcaataaatcagatatatttaggttttaggatgttgttaaatttgaatatgataaaagatttttatcacaaaattactaatcaagagggttttaggatgttgttaaatttgaatatgataaaaggaaatagtaattttacttggtcacaaaagcgttttaggatgttgttaaatttgaatatgataaaaggaggaacgcaacttagattatttaaaaaaggttttaggatgttgttaaatttgaatatgataaaagtgatgatcctgaatatttaagatttttaaagttttaggatgttgttaaatttgaatatgataaaagtaaacaaagctgtgatagtgattattttgcgttttaggatgttgttaaatttgaatatgataaaagattttacaaaaaatactttaactttacttagttttaggatgttgttaaatttgaatatgataaaagtatcactaaagatagaatgataagatttggttttaggatgttgttaaatttgaatatgataaaactcctgtctttctcgagtgtgtttcggtaaggttttaggatgttgttaaatttgaatatgataaaacgtaaggcattctgaccacttacacaatcgagttttaggatgttgttaaatttgaatatgataaaaccatctttttcattttcttcctctccttcttgttttaggatgttgttaaatttgaatatgataaaactgaacactataatgaatttgtaacaagttggttttaggatgttgttaaatttgaatatgataaaactaaatcttcattaattgatctaaaatttctgttttaggatgttgttaaatttgaatatgataaaactaatgatttgcattttgccatttatgatgggttttaggatgttgttaaatttgaatatgataaaaccactcgttccaaataagagcataagccctagttttaggatgttgttaaatttgaatatgataaaacttgtaaacattcgattacctatgaatttgagttttaggatgttgttaaatttgaatatgataaaacattcctgactggcataaggattacgaaaaagttttaggatgttgttaaatttgaatatgataaaaccgataacttattttcttttgatagagaaaggttttaggatgttgttaaatttgaatatgataaaactcagttttttgaatatcttgtttagcctctgttttaggatgttgttaaatttgaatatgataaaactatcaattggatcatctgttgtaaaatctagttttaggatgttgttaaatttgaatatgataaaaccatctttacataaatattatacactaaaaggttttaggatgttgttaaatttgaatatgataagtaatattgactttcatcaataattttgttataattgatttagaaaaggtgttaaggctcccgaaaggttgagcttgtcgacctcctacagactttttttaagtgtgattggagccttttcttttttctttttttatttatcgtaatatcatttttatgataaaaaagtggcaatgccacttttatttattttctatatataattttattagtttatatgtattatttaaaccattaatgtgtgtacgttccataccatgagatgcttggatacctgcaccaattagtgcacatttgatatcattaccgcctcttaaagctgctgatccatcagatgaataaaatggatatacatctattgcataatttaaattattttcttttgcgagatgtataagttttgaggtcatcttgtaatcataaggtccagaaccatctttagcacaaattgataccatttcttcagtacaagtaaggtcggctccaacacagcccatatcaactactaaaatttcgtcaaccattggaagactagaacaaccatgccctacttcttcataggtcgtaaaaacaaaaagaagtgtatctttaggggtaatatgggtttcttttaattcttttaaatattctaaaagtaagaaagcactagcaagatcatctaaaaatcttgttttaataaaacctttttgagtatattcaaatttaggatcaattgatatgtagtctcctacatttattccaagattttcaacatcctttttattatataccaattcatcaagtctaacatacattgtatctatatttctttctttcgttttggcatctttatagacatggacactaggagatgtagataaaatagtccccgtataagttttaccatctcttgtgtgaattttacaatattcgccatcataagtattaagaagaggaccaccaattgaagtaaacataattcttccgctgttatcaatacttctaatcattaatcctagtgtgtcaatgtgagcacttaaagcgattttatattcactttttccttttacttcaacaaagaggtttccttttttatttttaaaaggggtatatcctaaatgttttaaatactcttcaaggtaggttgttaattgaaaagtatatcctgagggacttggaattgaagttaatttttctaataatttaatatttaacatgttttgcactccttttcttttgctattttatataaatcatctaaatcttctttggtaaaatagtacttattgccacaaaaatgacaagtggtttcttgcgttttgttttcgtcaatcatttctttaatttcaattgcaccaagtgacaaaattcctcttgcaaagcgttctttagaacagttacaacgaaaatttaggggaattttttctaatatttcaacgtcttcagcaatattgtatatcatatcttctacagtatagccagatgataacatttctgatacggttggaattaattttaatttttcttcaagtttataaattacttcttcactcgtattgggcataagttgtacaataaaaccaccacttgatgttgccatattatttgtatcaactaaaacaccaaggccgactgcagagggtatttgttcactaacttgaaaatagtatgcaaagtcttcagcaatttcaccgctaataatcggtgttgagccgataaaaggttcttttaattttaagtccttaataacactaataaagcctgttgttccaattgtttgttttgcgtttagtctaaaatcattgtattcaaaatgacaatgggggttatcacaataccctctaatatttccatgtgcatcactatccacaattattttaccaattggtccatccccttcaacttttaaagtaatggtttcttctagttttaacatagaacccatcattgctcccatacttaaaacacgtcccatcgcatctaaggcactaggatagtaatgtagacgttttcctatttcatttaaagtattggtatttgacactgcatagattcttactgattgattaaaagctaatgctttaattatttcatcattcatcataaaatcacctagtataatataaatgttcaaatattatactaatatcctttctaaaatttagtgtgatagttgaactctatcattataataatgcatcgtgttgcgttatttgatatactatatttgatgttgtacatcattgataacactgtagactattttattttcaccttacagctcgattggttaaatgaggatatagctacagttcttaattttatatggttattagtaggttacagctttgactggttcataaataactaggtcacattaattaagaagtgtagatagcaccagtgttaatcatattaaacagaaaggactgataaaatgatttatgtaggtattgacgtggcctctaataaacacgactgttatttaatgaatgataaagcagaagtatattcttcttcattcactatttctaatgatgaggaaggatataaaaaacttcacaactctattaaagattttgtgaagcaaactaatgattctaatgtacgtatagggcttgaatcaactgggcattatagcactaacattcttttgtattttgttaaggcaaattataaagttatgttaattaacccattattaaccaatatggatcgaaaggcaacaactgttcgaaaaacaaaaactgacaaagttgatgctcgaggcatttgtatgttcttagatagaaacaaaaatgatttcaagccatatacactaatatcataccataaaaatgctttaaagtcattatctagagaaagattttctttagtaaaagatttttctaaacaaaaaatcaagctgcaaaggcttattaatgttgtttttcctgaatatttaaacttttttagtgatttgtatacttctagttctcttgatttactttatgcatatcctactccaaaactaatgaagcgagctaaactatcaagcatttcaaaatttcttcatggaaattgtaaaattacagctaaagaaattcaagataaatcagcttgttctatcggtcaatcattagattactatgcttttgaaattagactagtaattgactctttgagatttcacaaaaaacaaattgaatcatatgacacccaaattaaagttgtaatggatgaagtaggaaaaaacattatgagtatccctggaataagttatacaaatggtgctttaatattaggtgagattggtgatataaatgatttcgaatcagctgataaactactagcttatgcaggtcttgatccatctgtatatcaatctggtaaatatgatgctaatcaaaatacaatatctaaaagaggatcaaaatacctaagatatccacttcatttggcatctaatgtaatatggcaacatgataatacattccgcgattactataacaaaaagttaaaggaaggaaaacatcactttgtaatacttggacatattgataaaaaacttgttagaataatttatacaatattaaagaaagatattcctttttcttcacaaaattaactatataaaattttcaaagaacaactaaatattaatataattctgatactagattggtagtatcaaaaactttaggggtgaaaagccccgtttttgcgtaccaaataaatttataatgtaaaaacttattttctttattttttacttgatttatttatagtaggctcatttattagtatatcacatcatgtttaaaatgattgacgaaatactttataaaataaaggtggaaaatggtgatataattgacaaatcaatcaataatgattataataaagaataagaaaatgagggaataatatgaatatttatgaagactatgcaaattatattagtgaatgtcaagaattaattgaagaaatgattcaatataatagttcagtgtattatgcaatcgcagatgtcttaaaagtaactgattatatctatcaaaaaaatgaaaaaaaagaaacaattgatgaagatatgttagaaatttttgaaataggatatggatatcttgctaatgtactaggtgatttaaaaacatattatcttgattattttgataaaaatatagaagtttttaattattattcagagttaatgttatattctatctatattgaagattacaaaagtcacctcaatgtccaagatttaatcaatgatgatattgaaaaaaatttaaccgatttaatttataaaattgatggtattttagtaaataagaaaccatatgataaaaatacgataactgatattgaggcaaaagtgagtgaaaacaaacctcaaaatgataattataaaccagtgtataatgtttttagactaattgttgaagaactagatttagaataaattattgaatgtgaatgaaggagaatctatgctttatttatccaaatttaactttcctagttatgataaagaatatagttttagactcagtataaagcggacttgttatgatacgatttatcctttttttgttctgtctaatcgaggattagaaacgttagaatttgaacctattacgattctttatggtggtaatggtagtggaaaatcaactgctttgaatattatggcagaaactcttcaattaaaacgcgatacaatttataatagttcaagtttttttgaagattatatcaaaatgtgtagttttgaacaaagaaaaaaaataaacttgaatagtcgtataattactagtgatgatgtttttgattatatgctcaatattagaaccctaaatcaaggaattgatcaaaaaagagaaaatttatttgaagaatatttaaatacgaaatatgcaacgtttaaatttcaatctttagaagactatgaacaattgaaaaaggtttgtgaaactagaagcaaaacacaatcaaaatatgtaagaaatcatttgaataacaatattagaacgtattcaaacggagaaagtgcctatcagtattttacagaaaaaattctagatggtggcctttatttattagatgaaccagaaaatagtttgtcaccccaaaagcaattagaattgcttcaatttttagaagattctgtccgtttttatgattgtcagtttatcattgcaactcattctccatttctcttatcattaaaaggcgctagaatttatgatatggatgcagaagttgttgatattaaaccatggactaaacttaaaaatgtaagagagtattataatttttttaaacaatatgaagatgaatttaaaaaataaaaacagattatttaatcttttggtgaaataatctgttttttaattttataatttgttgggatcaaatacaactcccgtatcatcttgattatacatcatacctttcgtatagcaataactattactattttcaaaatttttaaaagacacttttactgaagaatttaaatcaatattt

SEQ ID NO: 3726 - DNA, 17680 bp, synthetic construct
  misc_feature 1..17680: note = Synthetic
  source 1..17680: mol_type = other DNA
caagttttttgatagataaacttactgatgattctactaaatggtcatttagcgataatcctaataacaataaaaatagatggatagaaaaaatgaaaaaagagttatttgattttataagagatgaaaataaattcaagcaactaatagaacaattaaataaagcgtaataaatatttattatataaagtatataataaaataaccttaatcaattgattatctacttattttatactataattcaaagaaataatttggagataagaatgtgataagtaacttacaacataatcggtaaaaaggatgtaaggatgttggtccttttataaaatatcttcttgacacaattcttttattatataaaaatttcaaagaaagatttaatttagttgcaaagaagaaaaaactattgaaattgtaaggcatatattaaaataggtagatttaataaataagatattaaagaattatgttcatcacttattctaaattgtataggaaaatctttaagaaaattaatcgaattagatggaatcaagcaagatgggaataaaaagaatagttgttattgtaaaattaaataaacatttgagttagtagttctttaccattagaagtaatcaataagtcttttgcgtgaagacttatttttttcatttttactagttttatagtaaaaataaataaagaattagtccatattttaaatgtaacaagataaagcattcgtttgtgcgaaactaaccaatcgatactttcaatggagaatttattaaaactgttagatacttttaaagtttttgtggataacctttgtggtaatatatataaaaatgatactataaaagaaagatagttctattgtttctagtataactatttataatccagatgtatgatttaagtcaaaccatcatatatataaatttttaaatgatgattataagttttattataaatagtttatttaaaacttattataatgtaaaaaaatctattattgttagtcttaacaataaacttagaaaagtatatattatttttgtatagaatcaatatttattaactctattgtttattttatcaatttgtagtatcttttttatgatagtagcaattttggtaaaaaatgcaattattttcaaatttttattatcaatggttactatatgtggaaatttttttgttttcgcccatacccatttgatcatgtatttttggtgttgtatttactataaagaaatataaatgtaaaaaatattgttgtaggaattattatgactgtattccttttcattaatggttccgtaactttcattttaagaaagagacttagtcatgattatgaatatttaaaaacaatgcaaaatgctatatctattgattttcctaataatggatacatatcaatagattaatgaaactactcaactagtagtattaataaaatttgatgataaagaagttgaagcattttttaatagatgagtaaagatgaaaagtggaaaaacttgctttcttttttacctcctcatatgttggatttatactataacgctatgatttctgaataggactactattttatggatattgatagtttaatgtataataacatacaaatttcaagcaatcataatgtaatatgagtagcatatgatgttgcaataaatttattatatggcttacattttatatatcaaaggaatcattttttaacgaaatattttgactctagtatgtattaaaatatgtcgataagttttctaatataataaagcattcagaaagattaggtttgatactatgtaagccttttttatttataacaattgagtatttttaagtaaaaaataagaatttaatttatacaagggttaaatttattataaattatatatattttaatcaaaataattgactaaagttcattttcgtactataataaagtacgaataaggattttaaaggagaaaattaaaatggactcaaaagaattcttttataatttaggtaaagcaatttatcgattagatgcaatttatgccaattttgcaaaagaaagcgatgtatctgctacccttttatggatactttatgcattaaatgacggtaagccccatacgcaaaaagaaatttgtttatcttgggatttgcctaaaagtacggttaacaccattataatggagttgaaaaaaaatggttatatcaaattagagccaatcaaaggacaaaagagggaaatgacaataattatgactgaaagggggaaacattatgctaaaataaaactacaactagtttatgaaaaggaagaaaaagtgttcaatgaattgacaagtaatgatatgcaaatagtagaattattaaataaacttgaaaaattgttatgtaaataatgaaaggatgaagagtaagtttatgaaaaaaatattggtgtgttttttaatatttttatcttttggtttattatttagttgctctaatagtaatttagatattgaagataatggtaatcaaaatgaagaagaaaatgtaaatagtagcaatcatcaaattgctatcttatatttttctgctactaaaacaactgaaaaagttgctatccaaatatcagatatgactaaaggaaagttaatagagattataccaaccattccttattcatcagatgatttaaattatacaaacgatgattgtagagccaatatagaacaaaatgatgaaaaggcaagaccaaatatagcaaatgatattgatgtaaataattattcaataatttttattggttatccaatatggtggcaaaaattacctaaaattatatatactttctttgatacatatgatttggggaataaaacaatcattcctttttgtactagtggtggtagtgggatttcaactagtgtaaatgaaattaaaaaacttgaacttcttgctatagttaatgagggaaaaagattttcggcatcttcttctcaatctgaaataaaaagttggattgaagaattaaatttaaaaataaattagaaagtagggattgataatgattaaacaagatgcaggtagaaagcaattaggcgatttagcacctaaatttgctcaactaaatgacgatgtattatttggtgaggtttggtctagagaagataaactttctttaagagataggagccttattacagttacagctttgatggcaaaaggaatcgttgataattcaattagataccatttagaaaatgctaaaaatcatggtgtaagtaaaactgaaatgattgaggtaataactcaactagctttttatgtgggatggcctcatgcatgggcaatttttcctattgttagagaggtgtatcaagaagaaaaagaaataataggtgatagtttatttggtctaggagaaccaaatgtaacttttgccgactattttattggaaattcatatctgaaaccactgaataccaaaaatgttggtatatataatgtaacctttgaaccaaagtgccgaaataattggcatattcatcataaaggtgggcaaatccttctttgtacagatggcgagggttggtaccaagaagaaggtaaacaagcaataaaattaatacctggcagtgtaatttatattcccgctgaggttaaacattggcatggtgcaagtaaagattcgtggtttactcatcttgcaattgaaataccagcagataatgctacaaatgaatggtgtgaaccagtaagtgatgaaacatataataaattataggagatattgacaatgaaaacattagtagcatattttagtgcatctggtattactaaaacagtagctgaaaaacttgcaagggtgaagaatgcggatttgtttgagataataccacaaaaaaattatactagtgatgatttagattggacaaatgcaaattctagatcaagtattgaaatgaaggataaatcatctagacctaaaataatttcaaaagtcaagaatatagattaatatgatgtgatttatattggatttcccatttggtggtaccaagcacctactattattaatacattcttagaaatgtatgagtttaatggtcaaactatcattccatttgcaacctctggtggaagtggtatgggaaaaaccaatcaatatttattaccatcatgtaggaaagctaaactattagatgggaaacgattatcatctaatcctagtgaaaatgaattaaaaaatctttaaacgaaaaaaatacggtatttattaaagtaattataggaaggtattcttgtaaaaaatttagaaaaaaccacttgtaatatgaaatatggacagaataactcctatagttaaccatcttgaagaacaacatttatatgttattcaaagcaaggaaggcctaaaaaagtagatataataacattttgtcgatatgggataaacactaatattgttgtaatatatcatactaaaaatatttttatttatcttaatcgtaaaaaagactcaggaatggaagatgtttctattgttacaacccatttaatattagcaactaaaaattaaggaataggattctattggattaattttttggattctaatcaatcgaaagcaggtttaaatttatcaaaggataaaacagtttaatgttattagatttaggttattctcttaaaacaagctcaataaattcaaatcatgacaaatgaaaagaacttattgaaattgtaatcaactatagattttaaatatgataaaaatacgaattgaagcctagatatgtggcttcttttttgtttgaaaataaaggattttatattattttcttaaaactatagatggtatgctattttatatataattctattttagaataaatggaatgtaccttttaacaaagtttaggaaaagtttagatatatttcatttacaaaaagttttatttatagtataataataaattgtagaaaaatctctataggtggtcatatggatgaaaatatcaatttagtagtagaaaaactaaagcaaactttaaaattgcaaaaggtattattggcttgttcaacaggtgttgattcaatggtccttttggatttgcttagaaaaagtcttaatgctagtcaaattgttcttgttcatatcaatcatcaaaaaaggaaagaatcagtccttgaagaaaaatttattattgaatatgcaaaacaaaataatatgagttgctacactacaaaacttccccactacagtggcagtaattttcaaaattgggcaagaaaaaagcgatatgagttttttttaaaaattgctaaaatcgaaacaattgatattattttacttgctcatcatgctgatgataacttagagacaattcttttaaggctacttcgcagttcatctttagaaggatatggtggtattaaagaatattcaaactatcaaagtttaacgatatatagaccacttttaaatatcagtaaagatgaaattatggaatatgccaaaaacaataacgttaagtattttgaagattctagcaattttgagaatgattatgctagaaatagaattagacactatgttttaccaattttaaaaaaagaaaatcctgctttgactaaggctatttcttgttttagtaatactattttagaagcgagcgattttataaaaaattatgaaactaattttataaaaagacaacaaatggttcataataataatgattattttgcaaaaatagatttgaatgaatttttaaatgaaacaacgtttttacaaacacaaattttatttagaatattaaagcctttcgcattatcaaaagaatgcattcttgatacaataaaacaactcaaatcacctaaacaaaatattgttcaaaatattaatcctcatttaataatgattaaagaatatggttatgttattttcacaaatcaaaaaattaaagattattatttgaagattgataaagaaggccactatgagttagataatcatacttctttgtatattactaaaaatatttgtaattttattacatcaagtggtaaattatggtataatataaataggttgccaatcattattagaactagaaaaaatggtgataaaattaaaactaaaaatggtagcataagtgtaagtgattatttgactaatcataaaattccatatttacaaagaaaacaaatcttattactatgtgataaggatgatttaccaatagctatacttggctatataataaaataaaaggaggaacacatggcaagtatgaataaaagtcccaaaaagcgttttggtcttggcgacatcattatttttgggattattttaattgcaatcatttttatatttgcgggatcatgcggtggtaataaagccaaaacaattgaaacaaaagaagagttttatggatatttctttaaaaatgcctcagatggtgcagcagtatataatgatttatcacaactagataaagacaaattaattagtgctcaagatttacaaattgaaagaatttactactatggtgcaacaggtgatggaaattatttttataatatatatatttatttgccatcatcggctaattgtatgaatatgtcatcaagtgcgaaaatttatcatttcaaagctgatgatagagatcttgagattattaagactattcaaaatttaatgttgcaaattaatgaagaggttaaacttgaaaatgaagcgaataaagataatccaaattatacacaacaaaaaacttataaaatttttgaggtaacaccaagagaaaataagagtattgatattttaggtattttatctattgccattcctatcattgctattgttgcttttatcatcattatgttaaaaaatggtaagagtaataatcaagctttcgattttgggaaaagccgtgctagaatggctaaaaaatcaaatgttaccttcaaagatgtagctggtcttgatgaagaaaaagaagagatgatagaacttgtagatttcttgaagaatcctaaaaagtattttgatatgggagcaagaattcctaaaggagtacttttgcttggtagtcctggtactggtaaaacgctaatggcaagagcggtagcaggagaagctggagttcctttttatacaatatctggttccgattttgttgaaatgtttgttggtgttggagcaagtcgtgtaagagatatgtttaaaacagcaaaacaaaatgccccatgtattttatttattgatgaaattgatgcggtaggtagacaaagaggtgctggtcttggtggtggacacgatgaaagagaacaaacgcttaatcaattattagttgaaatggatggatttcaacctaattcaggtgttattgtgatggctgcaaccaacagggcagatattttagatcctgctcttcttcgtccaggaagatttgatcgtcaaattagaattagtaatccagatgttagatcacgtgaggctattttaaaggttcatgcaagaaataaacatttatctccacgagtaaatttaacagatgtagctagaagaacaccaggttttagtggagctgatcttgaaaatctattaaatgaggcagcgttgcttgcggcacgtgaaaattgccgtgaaataaaaatatatcatattgatgaagctattgatagagtaatgatgggacctgctaaaagaagtaggaaatatacagatactgaaaaagctttggttgcatatcatgaagcaggacatgctgttattggtttaaaattaaaacatgcagttgtggtacaaaaagttactattgtaccgcgtggagatgctggtggatacaatttaatgacgccagaagaggaaaacttcttagaaaccaaacaaactttgacagctaatattacaagttttttagctgggcgaattgcagaagaattagtattcaatcaaatgacaacgggtgcgcataatgattttgaaagagcaacaaaaattgcaagagcaatggttacggaatatggtatgagttctttgggacctgttcaatatgaaagtggatcacatgatgtcttcttaggtcgtgactatatgagtgataaaaatttctcagataaagttgcacatgaaattgacttagaggttcgtaaaattattgatgaatgttacaaacaaggtgaaacgattattaaagaaaatcgtcaacttttagatttaattgctaaacatttggttgaagttgaaactcttacaaaagaagatattgatgaacttgttaatacaggaaaactaaactggtgggaaaagaaaaaagctaagatggctgaagatagaaagatagatgaaacacctgttcaaaaagtacaagtaactgaagaaaagaaagaagaaactcctaaggtagaagatgtttctaatcgagaagaaaccaaaactgaggataattctaatgagactagataagtacttaaaagtatcaagacttataaaaagaagaactcttgctaaagaagcaacggagactgaacgaatattgttaaatggtatagtagcaaaaccctcaaaagaagtaaaagtgggtgatcatttaaccataacatatggaaaaaaggtcgtggaagttgaaattacttctttaattgattctactaaaaaggttgatgcatctttaatgtatgaattaattcgtgaaactacacggtaataaaaaattggtcataaggaaagtgaatcttatgaccaattttaatttttatgttatactatatatactaaaggagttacatatgaatataatacttgcttccacttcaccaagaagaacccaaatattaacgattgctaaaatcaatcatcaagtggtaccttctaaatgtgaagaaagaatggataaaaatttagaaccatataaagttgtagaatcactttcttatcaaaaagcaaaagatgttgcaaaaaattaccctaataatattatcattggcgctgatacagttgttgtaattgataatcagattctaggtaaacccaaaagtgaaaaagaagctatagctatgctagagaaacttagtggtaaaacgcatgaggttataacaggaattacaatcatattaaacgacaaagttaaaacctttcatgatgtaacagcagtagaaattgccaaactttcaaaacaagacattgataaatatctcaaagaagaaaatgtatatgataaagcaggctcttatggcattcaaggagcattttgtaaatatattattaaaatgataggtgattattataacgtaatgggttttccaattgcaaaagtttataaagaattaaaggagtttaccgatgaaatataataaacaattattcgatcaacttgaggctgaatataatcaaatcttcaatttatgtgaatttatttttgataacttaattgaaaaaaatgatgatatgaaaaagtatgatgtcatgtgtgaatttgattattatcttcaaagtattcttgctaaaatcgttttagatagtaatcctaaaaatccagcactatttaatatgttaaaaaaattaaacaaatatgctagcttttatcaaggcatcaatttagatgactggttgaatacaaaagaaaaaattcttttcaatatagataaaaaaatcaatcaaattacttcaaatcttcctgttatattacaaattgtcatcaatatagatgaaaaaacaaaaaagactgaattatcttatcaaattttagaatcattagtatctcttgcattgacaattcttcctgataaagaaacttttgaagatattgaagttgaagttgtcaataaatattttggtgatatgtatcatcaaattcaaacaaaagtaaaataaaataccattttaacaaatggtattttttattatcaaattagacaatgtattacaaatatttataatattcttttactaaaattccaaattatggtataatataaatagttaaatatttggagggcttttatgaagaaatatacaattggattagatttaggaattaataatgttggttgggcaaaatatgatttagaagcaaaaaaagtaatagataaaggtattgttaggtttaaggaatcatcggctgctcaagatagaagagatagaagaggttctagaagactaagaaaaagaagacaacacagagtagaaagactagcagtacaattatcaaatatcaacttctgtacaagtcgtagttatgaaccagagttattaaataaaagaataaaaggtttaaacgaatcattatctgaacaagaaattactaatattatctactggtttgctattcatagaggttatattccatttgatgaggaaaaattagaaagagaagttcataattttgcggaagatgaatacccatgtcaatatatatctaatttttataaagaatatggtgtgtatcgtggacaatgcgatttaatatttttaaaagataatataagagaattaaagaaaattttaattactcaacaaaagtatcattcaaaactaacagatgaagtagtggataatattttagatatcattaaatcgaaaagagaattttgggaaggtcctggagctccaaaagaaaatcaattatctccatatggaagatataggactttagaggatttagagaaatataaaaaagattcaaattatcataagtatttatatgaaatgttaataggaaagtgtgagttatcaatgggtagagatggctcaatagataatgtcgctccgaaatgtaattattatgcggaagaatttaatttttataatgatttcattaatatgagtgtaaaagaacctagtcaaatagatgaagactacagaaataaaattactttaaaaggcaaatttatcgaagaaacaatagaagaatttaaaaaagaaattttaaatgctaaaactgtttcactagaaaaattaataaaaaaggtattaggattagaattaaaagatatacaggggtatcgaattgataaaaagtataaaccagaaatttcacagtttaagttctataaatatttagtaaatcaatttaaaaataaaaatttaaatcctacttggttagaagatgaggataaaacaatatataatcaagttatatatgtactaactgttgctccatctacatatgctgttgaagatatgttaaaagaaagagtgaaagaaattgaatttaaaaaagaggagattgatgttttaaaaaatataaaaagcaaaaaaaatcctgatttaaattatcactctttatctgaaagtattcttaagaaggcattaaatgatataaaaaaatataattgtgaatataattttatacaaattatgaaaaaacttgaatatgaaaaagagatgaaagaatattttcaaaataattattcaaataaaacagaaaaaccttatacaattgaagatagatatatagataatcttattgctaatccacaagtaaaaaagactttacgaaaagcgattaaagtaatcaatgcaattataaaagaagagaaaaattatcctgaagcaatagtaattgaatctgctacgtcacttaatagtaaagaaagaaaaaaacaaattgaagaagaacaaaaaacatatgatgaattaaacgaagaagctaaaaaagagttagaagttaatgggtatgagacgaatgataaaaatattcaattgctaatcaattggaaggaaacaaatgagtcatgtatatattgtggaaagcatatttcactaaaagaagtattaactacagaagttgaacatattcttcctaaatcaaaatcgatggataattctcataataatactacttgttcttgtctaaattgcaacaaagaaaaaaataatcgcacaccatatcaatatatgacatcacagaataagtatgaaagttttaaagattgtgtaataaaaaaatatgataaaatgtcacaaattaaaaagtctaatttattatttgaaggtgatatagagaaatactcaattaaatttatcaatagaaatttaagagatacttcctatgcgtcggttgctttagttcaagaattaaaaaaatacaatgagtatcttgaggcaaaggaaggatataaaatacatattgttacttcgcctggtcaacttactagtagaattaggcgttatttaaaaatgaataaaaatagagattatttatatcatcatgtagtggatgcaatgattcttgcaagtattcctgatacagaaataggaaaagtattaattgatgcacaaaatgataatcaatattggtttaaacataaggatgatgaatacaaagaaaaagtatataatatgttagataatgtatggcttgttaatagagatcaaatccaaaagtttaatcaagattgtgataatatgcctgaagataataaagatggtttaattaaacgttcttatgaagtatcaaaaaatccagttcaacaatttattcaatatactgagtatacaaaatatattaaacaggatgattcttattataaaatatcgcaaattgataatatttataatttattaattagaaaaaaagatggtagtgctgacaaagttaaaaaagacttagatgaattatttggtttatctaataaaaaaacaaaaatattactttgtgaaaaaaaggatcctaaattgtatcaaaaattaaaagatatatatattaaaaatgcttcttcaataaatccctttatcgatgaatgtaaatatatgtatgggttagaagaaggaaatcaattcaattatttaaaacatggaattcggaaaacggataatccaaatagcccacttgttataagattaagatatcttgaaaaagtaaccaatccatatattaaaaatacaataaccactaaaaggagaaatttatatcatgaatttactatcaatcaacctaaaaaaaatactttaataggtttagatggattaaagcaagtatcaacaagtattttttatgcttatgaggataagaaatttatctttttaccaatatgtgcaattagttttattaatggtaaattaaatgaaaaggaaaataattatcaaacaacctataacagattaattggaaataaaaaagtaacaaaaattggtaatatctatacaggagaatgggttggagtttacaaaaaaaatggacaatatttagaaggtagatataaaggatatcataaaaacaataattgtttagaatactatattaatggattagatactttatcatgcagtacaatatcttctagtgattcaagaattattatttacacaacagatattttaggtaatcgttatataagacttgacacagataaaattatatagtataatatatacgtactagacgtagtactacatattcaaatttaacaaagattcctattattacacgaatgtggaatccaaaaagagggtatatccctcttttattttttatttaatttttaaaaggatgtgagacatgggatggcgtacaatttgtataaatgaagcaatcagattaaactataaattaaattcacttggagtgttacaaaaagatgaaattatatggataaatttagatgaaatagatgttattatagtggaaacacttatgtgtaatatatctttaaagttattatcagaacttgctaataaaggaattacaatgattgtttgtggagaaaatcatatgccaataggtaattttatcagtgtaaatgataatcaaaggaccgcaaaatttaatagagttcaaatagaatgggatcaaaagacaaaacaactattatggcaaaaaataataaaacataagatattattacaaatgatagttttatataaaaataataaaaatgataaagtaagtatcttaaaaaaatatatagaagaggttgatttaggggatataacaaatcgagaaggtcttgcggcaaagatttattttcatgaactatttggtctagattttataagaactagaaatgctacagatatagttaatagttcattaaattatatatatcaagtagtaagagctaaaattgctcaagaaattataagccacggatatatctcatctttaggtatttttcattgtagtgaatataattattttgggtttgcagatgatttaatagaggtatataggccaataattgattattatgttatacaattaattattaaagagaatatttcttttatgagttcatcttataaagaaaaactattgtctattttatatactatcattctttatgataataaaaaacaaaaattaattgaatcaataaaattatttgttatttcagtgacagatggcttatcaaataaacaaatagaaaggataaattttccatatttttatgatgaaaattagtgattatagaaaaatgagagcagtagttttatttgatttaccaagtgttgaaaagaaagatatatctaataatcaaaagtttataaaaaaattaaaaaagataggattttatatgttacaattttctgtatatacaaaagtactaattaatcaatctgaatatgatagaattataaaaaaagttaaacaaatcataccaaataaaggtaatattataattttaaaattaacagacaagcaatacaatgaaatgatttatctaaatggtgaaaaaaacaagtatgatagcattgtaggattaaacaatgttgtttatttcggaggtgatgattataattgaattaagaatgactcatatgtttcttacagttagtgaattatatgtagaaaaagttaattatttattagtattaaattataatacattatattattttttaaataatttttttaatagtcaagaatcgcaaatttttttaggaaatcataaaatagataataagtcctcatatatcattaatttattagactacgaaagtatttctaatcaattaatactaaaaaaaggtacaattttatatgattatttaatggatgaagtaatatctaaaattgaagatacatatatagaggaagaattagaagtacaattaaataaattagtagaggaagtattgattgataagacactagaatataatacagaatttaatttagatataagtaaaataattgttaattatattcaatttaaaatggatttaagtattgaaaattatataaaaattattaaaaaattaataattaatttaaaaaataagaatttaaaaaaatctattattatatttattaacacaaatatatttagaaatgatttggatgatttagatggagtgataatatttaaactatattcaaaacatttccctaatattattataaataatactgtagaaaatattgaaaaacaaatattaataaatcaaataaaattaaactggccatgtgaaattgaaaatgaaactatatatgaaatagttgaaaattttgcgaaggatttatccgtaagcaaaaaaatttatacagatgattatataaaatatgtggggtatatactaatatctaagatattgcaattaaatatagattgcaaattaactaattttgatacaagtaaaataccaatttgttatataaattttataaaatcattgtaattattttagtagtatgatataataaaaaaggattcaaaactaaaaaatgaataggacgctattcattcaatatatattcaaatgtcacatattactaaaatttgaggttttaggatgttgttaaatttgaatatgataaaactagattgttttgatttggaaacgtttacttgttttaggatgttgttaaatttgaatatgataaaactaattcttgagtaggataaatgtcatcatagttttaggatgttgttaaatttgaatatgataaaactgagtaaaaagaaatatttaacatatgaaggttttaggatgttgttaaatttgaatatgataaaaccactctttgaaagaatacttgacatatactgttttaggatgttgttaaatttgaatatgataaaacgtaaaataatcatgtaacttattaacaggagttttaggatgttgttaaatttgaatatgataaaacacgatacgggtatgcatatgatagtattttgttttaggatgttgttaaatttgaatatgataaaacttttatttttgtaaagaattatctatctttgttttaggatgttgttaaatttgaatatgataaaacaaataaaaattatttgataacaaatggtaagttttaggatgttgttaaatttgaatatgataaaaccagtgacgagccggtaatcgtagctgtaaagttttaggatgttgttaaatttgaatatgataaaacttagtttgtgtcattcctgttcctaaattagttttaggatgttgttaaatttgaatatgataaaacggcatggctcgcaaaagccatcgatgaggggttttaggatgttgttaaatttgaatatgataaaactcacctcctcaataaaatcaagacgactacgttttaggatgttgttaaatttgaatatgataaaactatttattcgaggtctaatgactagacatagttttaggatgttgttaaatttgaatatgataaaaccgacgccatttagccacattttttttatacgttttaggatgttgttaaatttgaatatgataaaactaacggtgatacagatttatatactcctctgttttaggatgttgttaaatttgaatatgataaaactttatattataatcaacctaaccaaccaaagttttaggatgttgttaaatttgaatatgataaaacttaatgatggtcaataagacccggtactgagttttaggatgttgttaaatttgaatatgataaaaccacccaacagccagtcttagttgatattgggttttaggatgttgttaaatttgaatatgataaacccccccaccagccagtcttagttgatattgggttttaggatgttgttaaatttgaatatgataaaactataatcagctatagttcctacttcgttttgttttaggatgttgttaaatttgaatatgataaaacaaggtccaaaaatttgtctaaaatcttattgttttaggatgttgttaaatttgaatatgataaaacaacagattatatacttgattaatatctgttgttttaggatgttgttaaatttgaatatgataaaacccccggtgacacatttaaagtgaagtcgacgttttaggatgttgttaaatttgaatatgataaaacagagtctcgaattaattgaaaagccgaatggttttaggatgttgttaaatttgaatatgataaaactgtgatatattgtttttgcgcgacttattggttttaggatgttgttaaatttgaatatgataaaactcgatatacagaaattttacaagagcatttgttttaggatgttgttaaatttgaatatgataaaacaaactatacttttggcattgatgaagctttgttttaggatgttgttaaatttgaatatgataaaacttaacttaatgattgacgaaaatatgtattgttttaggatgttgttaaatttgaatatgataaaactttggaagaaaatttaggacctttgttagtgttttaggatgttgttaaatttgaatatgataaaacaaaga

SEQ ID NO: 3727 - DNA, 6525 bp, synthetic construct
  source 1..6525: mol_type = other DNA
  misc_feature 1..6525: note = Synthetic
acgagtctggtagaatttctcattcggggcaaaacggaacttaaactccacttccgacatccggtaggaatcggtagccgtgatctggccatccggaccgatacggtcaaacgcggcgtaaccggttgagtattccttaaaattccgaagtaccgccccataagcccagccgttataatgctcacggtaatacgtcagttccatattccttaaataggtggcacgcgtatctttctgccgcttcaaggccaagaacatattatccttgttggtatacatatactgctgacctaactggttgatatcatataggtactcgaagcgaatagaatgcacgggaaattctttccgataatccttcttatcgataaaagaatattctacgataccatcatatttcaacttgcggtctttcgatccataagccaaataaccatccaagaaaagacgtttactgaacgccgttgtcgtggttccaccgacacggaagcgggccccctcaatcgcgttaccactgatataggtgttcatcggaccaaactcgaacttgctcttctccggaatcttattcgtcgcgatataaccggaggtaaggatcgaaacaaccttctccgtcacatagaaaataggaacggaacgaagtttcgccattagcaactccacgttattctgcttgcgagttcccgcctcagtaggacgatccgccgaacggcgataagcttccatcggtataataataggtgcgctctcctcaaaaactttaggatcatctggtccctcaaacgcttgattcgaatagatattcaaacggcgggcatacattcctttcgatttctccgtcaatttgaagtccacgttgatatcatctttcgtaatgatacgagtcccatccggggcacggtcgaaagtctgctcgatcgtcattccaccgacaaaattcaagttgatcttcttcgggacattcaacttaaccttctgcacgaaataagtagaatccaacgtgataaaaagatgtcccgtaaaaccgaacgtctccggagtaaacggagcgaaacccaaatccacgcacttctgtccggcgacctccaccgtgtctagcaaataatatttatagaagttaggccccatcgtagacataggactaacgaaacggttcaagaacaaaggaatatcattctggaagatattcacttcccggaatacctcattcaagaactgttgcataccgtctcgtgagaagacctcatccacaccagccgctttcgtagccagaacgaccctcttttccgtcttcgggtctttacgataataaacggtctggattttctcacgttcggataccggcaagatcgtctttcccacctccaacgtatcgataaactcagtcaagaagtcaaactttcccgcctttccatcttttttcggtttcggttggtaatcgttcatagcgaagaccatcttctcgtattgatcataccgaaaataatcatgattacgaggatcgttgctctcccgacgtgcgatagcgtttttgataaaggtaaccgcaggattatccttctttcgatatctttcctttcccggcttgataatcacctccgacaaattaatacttgtcggagctaactgaatcttcaaatgttccgctttacccggaacgaatttcaattctttctccgtataacccagataagagacctgtaaagtacgtaccttagatgaagaggagagcgtaaaagccccatccagatctgtcgtagcacctatcgtagttcccttcaaaatcacagccacataaggcaaaggttctcccgtaatagaatcagtcacgattccttttatcatgtagttctggctcttcgctacccaagcgaacgccaataaaagccatataaaaacaattctcttccccatcagatctgacacctcattaaactccgcaaaagtacaacaggatcatttatataaatgttccaaaacacatgcaatatattccaattagcaacaaatggtctaaaaagccaatcgtactttcaagaacgactaatctgaagccccttattcgataagctcatctccacgaaccgggcgttcgaattgggtggagaaagagtcaatatctttcggatttgcagggctttatgccgcagagccagaagattaagaaaaagaaaacaacacagagtagaaagattagcaatacaattatcaaatataaatttttgtactagtcgtagttacgaaccagaactattaaataaaagaataaaaggtttgaatgaatcattatctgaacaagaaattactaatattatttattggtttgctattcatagaggatatattccatttgatgaagaaaaaccagaaagagaggttcataagtttgcggaagacgagtatccatgtcaatatatatttgattattataaggaatatggtgtgtatcgtggacaatgcgatttaatatcattaaaggataacttgaaagaattgaaacaaattttgcttactcaacagaaatatcattcaaaactaacagatgaggtaatagataatattttatatattatccaatcaaaaagagaattttgggaaggtcctggcgcctcaaaagaaaatcagttatctccatatggaagatatagaactttagaggatttagaaaaatataaagcagatccaacttatcatcaatacttatatgagatgttaattggaaaatgtgagttatccatagataaagatggttttatggatcaagttgcacctaaatgtaacttttatgcagaagaatttaatttttataatgattttattaatatgagcgtaaaagaaccaagtcaaatagatgaggagtatagaaataaaattactttaaaaggtaaatttactgaagatacgattgaagaaattaaaaaagaaattataagtactaaaaaagtttctttagataaattagtgaaaaaaatattaggtttagaattaaaagatatacaaggatatcgaattgataaaaaatataaaccagaaatttcacagtttgaattttataaatatttattaaagagcttcaaggatgaaaaattaaatcctagttggttagaaaatgatgataaaacaatatataatcaaattgtatatatattaactgttgctccatccacatatgctattgaagatatgttaaaagacagagttaaagaagttgaatttaaaaaaaaagaaattgatgttttaatagatataaaaaagaaaaaaaatcctgatttaaaatatcactctttatctgaacggatacttaagaaagcattagatgatataaaaagacataattgcgaatataattttatgcaaattatgaaaagacttgaatatgaaaaagagatgaaagaatattttcaaaataactattccactaaaacacaatcaccttatacaatagaagatcaatatatagatcatcttattgcaaatccacaagttaaaaagactttacgtaaagctattaaaataatcaatgcaataataaaagaagaaaaaaattatcctgaaacaatagtaattgaatctgctacgtcactgaatagtaaagaaagaaaaaaacaaattgaggaagaacaaaaaacattcaatcaattaaacaaagaggttaaaaaagaattagaagataatggatatgaagcaaccgataaaaatatgcaattgttaatcaactggaaagaaacaaacgagtcatgtatatattgtggagagtctatttcattaaaggaagtattgattacagaaattgaacatattcttcctaaatcaaaatcaatggataattcacataataatactacttgttcttgtttaaaatgtaacaaagaaaaaaataatcgtacaccatatcaatatttgacatctaagaatatgtatgaaggttttaaaaatcgtgtaatgaatcaatatgataaaatgtctcaagataaaaagtctaatttattatttgaaggtgatatagataaatattcaatcaaattcatcaatagaaatttaagagatacttcttatgcatctgttgctttagttcaagaattaaaaaaatataatgagtaccttggggcaaaagaaggatataaaataaatattattacttctcctggccaacttactagtaaaatcagacaatatttaaaaattaaagataaagataggacttatttatatcatcatgtagtagatgcaatgattcttgcaagtattccagatacagaaataggaaaagtattaattgaagcacaaaatgatagtcaatattggtttaaagataaaaataaagagaataaatataaagaagaagtatataatatgttaaataatgtatggctttcaaatagagatcaaattcaaaagtttaatcaagattgtgataatatgcctgataataataaagagggtttaattaaacgttcgtatgaagtattaaaaaatccagttcgacaatttagtcaatatactgagtatgcaaaatatattaaacaaaatgatgtttattataaaatatcgcaaattgataatatttataatttgttaattagaaaaaaagatggcagtgcagataaagataaaaaattgttagatgaattatttgatttatctaataaaaaaaataaaaccctactatgtgaaaaaaaggatcctaaattatatcaaaaattaaaaaatatctatgagaagaattctttttctataaacccttttgttgatgaatctaaatatatgtatggattagaagatggggataaatttgattgtttaaaacaaggaattcgaaaaacggataattaagatatcttgaaaaagtaactaatccatatattaaaaataacataactacaagaagaaaaaatttatataatgaatttactataaataaaccaaaaaaagatactttaatcggtttagatggtctaaaacaagtgttaacaagaattttttattcttatgaggataaaaaatttatctttttgccaatatgtgcaattagttttgtaaatgggaaattaaataaaaaggaaaaaaattatcaaacaacctataatagattaattggaaacaaaaacgtaaaagaaatggggaacatctatgtaggagaatgggttggggtttataaaaaaaatggagaatattttgaaggtagatataaagggtatcataagacatctaatgttttagagtactatattaatggattagatactttatcgtgtgctacaataggttctagcgatttaagaattattatttatacaacagatattttaggtaatcgtcatataagacttgacacacaaaaagaaatatagtataatattaatgtactagacgtagtactacatattcaaatttaacaaagattcctattattacacgaatgtggaatccaaaaagagggttaatccctcttttattttttattcaatttttaaaaggatgtgagatatgggatggcgtacaatttgtataaatgaagcaattaggttaaattataaattaaattcgcttggagtattacaaaaagatgaaattgtatggataaatttagatgaaatagatattattatagtagaaacgcttatgtgtaatctatctttaaaattattatcagaacttgctagtaaaggaataacaatgattgtatgtggagaagatcatatgccaataggaaattttattagtataaatgataatcaaaggaccgcaaaatttaatagacttcaaatggagtgggatcagaaatctaagcaattattatggcaaaaaattataaaacataagatattattacaaatgatagtcttgtataaaaataataaaaaggataaagtgggtattttaagtaaatatatagaagaagttgagttaggtgatattacaaatcgagaagggcttgctgcgaaggtctattttcatgaattatttggtttagattttataagaactagaaatgctacagatataattaatagttcattgaattatatatatcaagtagttagagctaaaattgctcaagaaattatcagtcatggatatatttcatctttaggtatttttcattgtagtgaatataattactttggatttgcagatgatttaatagaagtgtataggccaataattgattattatgtaattcaattgattattaaagagaatgtttcttttatgagttcgtcttataaagaaaaacttttatcacttttgtatcttattattttttatgataataaaaaacaaaaattaattgaatctataaaattatttgttatatcagttacagattgtttatcaaataaagaaatagaaaggataaattttccatatttttatgatgaaaattagcgattaccgaaaaatgagagcaataattttatttgatttaccaagtgttgaaaaacaggatatagcaaataatcaaaaatttataaaaaaattaaaaaaaataggattttatatgttacaattttctgtatatac

SEQ ID NO: 3728 - DNA, 18246 bp, synthetic construct
  misc_feature 1..18246: note = Synthetic
  source 1..18246: mol_type = other DNA
ccccgacgacaaaattgtccgtcgaaaagggaaggtatacatcattaacaaaaaaaatccacgctacaagcagcgtcaagggtaacaggaaataaacaatggcacgtatagcaggcatagaccttccaaagaacaagcgtggcatcgtggcacttacctacatttttggtgtaggtcccacaacaagccgcgacgttcttgacaaggcagggatagatcccaccaagcgcgtacaaacatggacggacgatgagatagctcgtatcaggcaggctctgagcgactacaaaaccgaaggccagttgcgctctgaaattcaactgaatatcaagcggctgatggatattggttgctaccgcggcctgcgccatcggcgcggtctgccggtgcgcggtcagcgtacacgtaccaacgcacgtactcgtaagggcaagcgtaagacagttgccggcaagaagaaggcagcacgtaagtaagaattaataaaccgataaacccggggccatcccggacggagataacatggcagcagtaaaaaaacgcgtcaaacgcaaaatcgtagccgacgttcacggtaaagcatttgtgcgcgccacatttaacaacgttgtggtaaccatcaccgatacctacggtaacacccttacatggtcgtccgccggtaagaacggtttccgtggttccaaaaagaacacaccgtatgcctcgcaggtttcagccgaaaaagctgcacggcaggcattcgaaatgggcttgaggaaggttgacgtggttgtacgtggtccgggatcaggcagggaagcagccgtgcgtgccctaacccaggcagggctggaagtactgtcgattaccgaccgcactccgctcccgcataacgggtgccgtccgccaaaacgcagacgggtgtaaacctaagccccttccaactttttgtttttccctcatcatcaacacgaacatctctcaaggataaccatgaacactttaatgcagatgcccgagcggctggtggttgaacacctaggctctgaatttcatgcgctgtttacacttaacccgctggaagaaggctatggtgtaaccatcgggaattctcttcgcagggttcttctgtcgtcaatccaaggttcggcaatcaccggagtgaaaatctccgatgttctgcacgaattccaaaccattcccggtgttacggaagatatgtgcgagattatcctgaacctgaaagaaatccaattgcgcgccgttgacggaaagcttcctcagcgtatttcgtttacagtaaagggtggcggacagtggacggctaagtcgattgccgacgctacgtccgaagtcgaagtgcttgacccgaataaggtaattgctaatcttgctgatgatgccgaatttgatgttgaacttcgtgttggctttggcacaggatacgtaccggccgaagaacagaatacatcggacttcccggttggtatgctaccaatcgactcggtgtacacaccaataaagaatgttatttacaaggttgagccgttccgcgttggacagaaaaccgactatgaaaagttaacgctcgatgtgttaaccgacggctcgatcactgccgaaaaggctttgcaggatgctgccaaaatcctggccgaccatatcaggtatttccgtggcgctcttgcggtgtcggatgaagtaccctcggtggatggtctgctttcaggtagcgagaaagatcgtgaacgcatccggttacggaagatactgctacagccggtagacgagatggagttaagcgtacgcgcacataattgtttgaaggcagccaatattaaaattctggcagatcttgttagccttcaggaaaccgatttattaaaattcaggaattttggccgaaaaagtcttgccgaattaaccgatgttgtttaccaaagcggtttatcatttggtatggacgtatcgccttacatccaagacgaactcaaaggaagcgaataaaagatgagacatgggtatgcagggcggaagcttaagcgcaccgccagtcaccgtaaagcgttgctatcgaatcttgcaaccagcctgttcgaacacaagcgtgtgcggacaacggttgccaaggctaaggaacttcgtccgtttgccgagcaactgattacccgcgcccgcaaagcctacagtgcggaacgtgcaaacaatgccggcggtgtagatgtacacaaccgtagaatggttggacgttttattcgcaacaaggctgtgctgcaagagttgtttgatactatcgcacccgtagttgcagaacgtaacggcggttatacacgaatcactaaacttggtcagcgccgcggcgatcaaagtcccgaagctattatcgagttggtggattggtcaaatgcacaagatgggcgcgtaagcagtaagggtggccggaaggcaaaagcctcaaaacctgctaagccctctaagccagcaggcgctgaggcattaacggcttctgctgcagcaggtgcggttgccacggctgctgaacctgttgctgaatcagctgccgatgctgtggctgaacaggacgttgcaccggtaaccgaaaccacggttgatactgttgtcgaagagcaggccgaagcagttgctcccgaggccgaagcagtgcaagatgacgcaccacttgccgatgatgcatccgaagcaggtgatgcaccggccggcgacgaagaaaagagcgaataatcgccgacacagatgtcggcattcgacgccggacgttccagcgtccggcgtttttgtttttacaaccggaaggacgtcctttcatggaaaccattcaggcatcattcatcactggagcggtaagcccggaacagttcccggtgcataccctgccggaggttgccatgattgggagaagtaatgttggcaaaagctcgcttattaaccgtatcgtgctgcaaggcaacgtagcacgggtttcaaatactccgggtaaaacccgtgagataaacttctttaatacaagcatgggttttgtactggtggaccttccgggttacggctatgcacgggtgagcaagcaacaccgtgccggttttagcgtgctgatccgccggtatctgattgaacgcccgaatatggcgctcgcttgcgttctggttgacagcagacacgatccgatggaaagtgacctggcaatgattgaggagcttgaatttgccagccgcccatacacagttctgctcactaaaaccgataagctgaaaccaacccaggttaaggagcgcactctgcagctgcggcatctgctggaacactgcaggcactgtgttgacgtgattgcaacgtcatccgaaacaggtgagggaagatcaagtgtgcttggtatgattaaaagactttgttcgcagttcaacaaaccatcgtaaaggtaatggtatggtaggaattgttatgggaagtgactcggacctaccggtgatgcgggaagcagcagccgtatgcgatgagttcggagtcccgtatgaaattcgaattgtaagcgcccatcgtacaccggcagacatggctgactatggtacaactgcccgcaaccgtggtattcacatcatcattgccggagcaggcggggcagcccaccttccgggaatgcttgcgtcgtttagtaccgttccggtaatcggtgttccgattccgtccaaacatcttaatggccttgactcactgctaagcattgttcaaatgccggcaggagtgccggttgcaactgttgcaataggcggcggtaggaatgccggcctcctggctgttcagattttatcagtctcggatcatgacctgcataacaagctgcagacgtataaagatgctctggcagatgagtcacgcagtaaacgtactgactaagacggtacgtaaaaccggcttccggtacattgctgcaaatccctccgcgcccggatgccacatcaccgttcacccttcaggcaggttgtccggcttgctggttaaacagcagacgtaacctgatttatatcatattttccggtgcaccaagtccgtaacattgcactatgcttagttgggcatagtggtaacatgaaaaaatttactgtcagagtgcgagtatgggtaaacgaagccgaggggccgttccttggcccgggaagagtacgtctgctggagaagattcatgaaaccggctcaattacgaatgcagctcgagctatgaaaatgtcgtaccggcaagcctggcagttggtcgaagacatgaacagccgcgccaaacagcctctggtagaaaaaatattgggtggtaaaaacggcagcggatcggtcctgaccaaggtgggagaacgagccattgctgagttttaccgcatccagtccgaacttcagaaccaagccgacgaactgtcaaaaaaattaacactataaaaatttttacccttcagtatgctaaaaaaaacacagtggagtggccgatttgcacagaggttaggagtgctgcatcttattattctggtgtgtaccgcccttgcgcctgggctgcaggcgcatcccgattcagcttcggtgcaccccccgacggaacagggaacagattcaatggaagttttccagctgggccaggttacagtaaccgggtcacctaaccgagatctgaccagcgaggttggcagcgccgatatgaaacgatggaacactcaccaggtttctgatgcactgtcactcctgcccggcatcgccctggcacggtcgggtcagcgtaacgaaacgtccgtcacggttcgcgggtttgatttgcgtgccgtgcccgtgtttatggatggtttgccggtatacattccgtacgatggtaatgtggaccttgcacggtttaccacgtacgaccttgccatggtctcagtgcagaaaggctactcttcgcttctgtacggaccaaacgccctgggaggagtaatcaacatcgtgtcacgcaagcctgtacgagagctggagtacgatgcatccgcggggatgatctcgtcaaacggctacagcaccaacggtaatatcggaggtcggtggcagcagtggtatctgcaagggggctttggcatgctgcacagcagtgcctacaggatgtcggcagactttgcagctacggacaaagaaaacggcggcatgcgcgataactcataccgagcggataagaagtttaccttcaaggcaggatggatgccagcggacgggcatgagtacgttgttggctatgctgctcagacaggatcaaaggggaacccggtgtacaccggcacggacgagaataacgctcttttcaggaagccacgatactggcagtggcccgcctggaacaaggagcttgtgtatctgctttctaaaacagccatcaccggagacgctacactgaagggaaaggcatattacgacaaattcgtcaataccataaatagttacgatgatgcaacctacacgacacagaataaaccatacgcatttaccagtaactatagtgactatacggtgggcggtggcctggtgtatgaagacacacggtttgcagacaatgccctttcactaactgttcaggtaaagtcagatatgcaccgcgagcataacaatggtgagccggtcaggcacattcaggatgctatcgtgtacgtggctgcagagaacgttgttagcctttcaaacaccatcgtgcttgtaccgggtctggcgtacagcattcagaacaaccttagagcagaggatcttaccgctaacgatgaaattgtgaacttccctgaagcagatgcacatgcagctatcaacggacagatggcggctttttacaacattgataacgccaactccctaagccttactctggcgcgcaaaaccagatttgccacgctgaaagaccggtattcctaccgaatgggaacagccataccaaatccgaatctgaaaccggaaaatgcgatgaattacgattgtacctataccggaaatcttggtgagaatctgttctgtcaggcctcactctactacagtcacattaccaacgtaatcctgagtgtcagcaacgttcagccgggcaaggcccaaactcaaaatgcgggttctgcagagtttatgggctttgacggagcaatacgatactcgcccacacaagccgtaaccacgggtattaatggctcatatatccggcagaacaacctaacgcacccgtcattgtactttatcggcgtcccttcagcagtgatccgtgcatacgcaatctatacggtgcttgacggcgtcagagtacaggcaggcacggaatacaactcaatgcggtacagtaccagctacggaacgtcagtgcccgggtatcatgttaccgacgtaatggtatccagccgcttatggaagaacctggtcctggagggcggtgtgcgaaacctgttcgacgcgaattatatgatcagtgaaggatatcccgaagaaggaagaaacgcgtttgtaaccgtccggattaacgggtattaaaatttattaagatagaggcaatatgaaagaacgaattagatttatagctttaacactaaccgttacactgtgtattgccggatgtacaaagcccaggcaggagctcggtgcaggtgcgcaccatggtgtgcatgaacatccaggtgcaaatgctcaaaacgcagaaactgatgaatgtacagtcgtggtatcggcagcagacagcatgaagtacgtaagtcgcacactcagtgttggtggtgatgtattgcaccctctggtgctaacagttgactcgctgcggtcaatgcaggtgcatacgatctcggattttgacgttgtgtgttcaaccggcgccaccgtaaaccgtcacacatccagcaagggtgtgctgctcaaggagattctggaaaaagcagtaatccgtcagtcaaaccacaaggaccgcaacttctacattgtagctcgtgctaccgacaattataaagccacattctcgtgggcagagctgtttaacagcgtcaccggcgatagtgtgtatgtgttgttcgaagaaaacgggcatcccatacaaacacagggcagcatggtactgatcagcacgtccgacatcaagtcggggccgcgccacgtaatctggctgcaaagtatcgacgtttacaaagtgccccctcggcctgttagggtggagggggcctgagtttccgttttagtacttgagtagtacaacaacctgttcgccgctgagcaccacataggtgcccgcgggcagatccgaaatgcggatggtatgtgatgattcatctatcattgaaaccggcagttgtgtgccatgaataccaaagacttctaccggtgcattgccgatgaacggcagacgtaccgttgccgcactggtagcaatgctgcctgctactggtaatccagcgccttcggcaaccgacgttacctccggaatggtaaacaccacaacgttaccgcgtggctcgtaggttaccttatcgagtgttaagccaacccataccttgttatcgaaaatggcaaccggatcggcctttgccggaagatcaacttccttaacaaacgatccatccggcattgaatacaccagtagtgtacccttataggtcgtcacaaacaacaggttttctccaattgccatttcccggggtccatcgtagcctgaggttggagtagcaatctctgcatcgggaacaagagtgtgcgttgttccgtcaacttgaagtattgaatgtgcaccgttcatacttaccagcagatcgtcgccaagtgcgaccatgtatgccggagtatcgcccagcagtgtattggttgtggctcctgttgcgctaacccacgttatcccgccgtccgccttaccatacaatccctcgcacagtactgctgccgaaaaaacgcccggctgctcctggcgtaccattacctgaatcggattaacgcctacttcaatttccgtacgttccaatgtttcaaggttgacgatgataagcgtacccggctcggtatatgttgggcgagtagtgatgtacagatacggagtccgttcatcgtaggtaagagccgacacattcggtgcatagatagccgtagcagaccgctgttgagtattcagcgcataggtgtacaccgagtcgccgatacctgcgaacaacagccccgtattaaagtcaaccgcaaccctggatcccccaacaacgccacccgatgcccatggaaagttaacagacgacacggtatccagtgtaaaccggtccagaatcagccactgtcccgggagatcgccctcatcctgcacatcgttaaaatcaaagtcaacatgtttagtaaacacgtgaaccctgaacgtatccgggataattgcagcaaccgtaggttgcgtgtgaattgtaatttgtgccaggcaggcacctgcagaaaataaagaaaccaacaaccacacaccaatgcgcatggcataccctttcggaaaccaccggttcagcgccggcagcgcggcatcgccgctggtgaataataaaggtaccgtcaggtattccgactctggcatcatccgcattggttcgccttcccaagccccctgccacagcagaaagcgctcagtggctgctgaaacagcgtgaaccaacttgtacaccatcacggcggcgcgaccgtgcgggaattacacccgcttccctgttgtaacgatgaacggtaccggtgggcaaacttacaaaagcttagccgttcgccggtccggcattcaccatggcaacaagttcgggaggggaaaggggctcaagcttgccgcgccacgacgcaatccaagctgccagctccggatttaccggtgcggtaagattaagtagtagggcaccatcggcagtgtgcgtaaagtgttgtgaagggtgccaggtccgggatgtgaagaaatcggcgaaggtattgttaacgcgaatagttacggcatggattggaccggagtggacgccaaagtgtgagttgcgatacagttcttcgttaaactgatggagtggtagtgtgcagtccggatcctcttcgatggcaataatccggtcggcagccagattcatatagttgcgatatttaggatgccaggcggccacgtagagtcggccagcatgtgagattagcctgcacaatgcaaccacgtacgacctctcgttatcatcatggagtgcccggtacgtaacgcgcgtccacgattgctccaatatactgctgataaccatgtttaagatatgtgccggaacttcctcggttacctgtcccggtgttaccacctgcagcagatcggaatccagcagcaccgtccccggggccagaccttccaggcgctgtgccagcgaaacaacatcctgttcaacctgtgtacccctgaactgttgcagaaaccccttcagcacgtggagtgacaaaatttcattcgtgctaaccgttagcggcgtgagagttctgtatgttgccggcacccaccatcggtttgttctgccctcctgctgacagcataacggcacacctgccgcctcgattgcccgcagatcgcgctgaatctggcgtctggacacgcatttaccctcattactctcggccacccgttcggccagctcggcagtggttagcttcctacccgaactgagtgccgttagaatccgtactaccctttgcacctgttgtgattctgccatacacgaatgtatgaaagcgggcgacaccatacgtcgcaataactgtttagtttgaaaaatgtactgatagtgggacgcaggtgcagtcgggtgcttggagtggagcttggaatacaaaccaatacaatgtaactttatgagccgggacagtgagggcaaaaaaaaacctcaccagaagtgaggtaaaggcttttagccagcggaaactctgtttccttattgtgaataaggaccagagcagatctttgaaagcgtttcaaacttacaacggtacaatttatttgtcaagttttttttaaaggggctaaacaatgagtacggtactggggttagacatcggctcgaattcagtagggtgggcattagtggatatcgagaaccagtctattacagcaatgggcgtcaggatattccctgatgcggtagaaaacaagaatagcgagcgcgaggagagtaagaacgtagcgcgcagaatgaaacgtcagcttaggaaacagtatgaccgacgcagacggcgtgcgaaggtggtacggagcatcatggttaaaaatgcgctgttaccgttaacggaggaggagttggatcggttgaatacttccgatccgtatgaactgcgtagccggtctcttaccgaaaaactggagctgtatgagattggtaaaattatcgatcatatcaattcaagacgagggtttcagagtaaccggaagtccagtagcgaggaagaaaccagtggtgtgattattgacggaacaaaggacggtttgaaaccgggtatcatggcaattgatgaatcgctgaacccgaagcttcggaagtacaaagattacctggcggagaaagcatcgatagttaagaagttgccggatgtaaaacacgggtacaggacgatgggtgagtatctgtacagccttgatccgcatacggtgcgccggcgcaacagattcacgctccgtgatcattaccggattgagttggatctgattttggcactgcaagccaggtattacccaaaggttcttactccggaactgcaggaacagattcttggcagtgtgttccatcagcgaccattgaaatctgtacgacacttagtggggaaatgcaggtttgaacccggtaaaaagcgtgttcacaaaagtcacccggagtaccagcgcttcaggttcctgcagcaggtgaatgccttgcgcgtaaatacgaccgatagagtatcgggcgacgataccgatttgcttcctgaagaaatttataatcttaaacttattgcagaagctgcagcagcaaaaggcagggatcggaaactaaaactcgaaacccagggggatatcaagaaagcccttggatggaagagcaagattcctgctactgcaagtgtgacgtcagttgacctggagcggacgattgccgacatgcgcaatgctcttggcagaacatacattgatggattgccaagggagcaggtacatgaactgtggaacgtactgcagtatgccgaggatttggactgggtaattgattgggcgcagaaaaagcttggcgttgatgaaacaaaagccagggcgtttgctgccatcaaactggaagacggctatggaagcgtgagtctgcgcgcagtccgcaaaattctgccgtttcttgaagaaggtgatctgtacaacgaggccgttgtacatgcaggatacaactttcatgacgaagcacttgactttcagattaccgacagggtgccggcactgctccccgaggatgccaggaactcaatggtacagcgttcgtttgccgaaacacgccggattgtaaatgcaattgtacggaagtgggggaaccctgatgttatccgggttgaaatgggacgcgacctgaagctccccgctaaacaacgtgctaagattgagaaggaaaacaagaaaaaccagacccagaacgctaacgataaaacgcggcttgaaaaagagttcaagattgatgatgcgcgtcgatcggatattctgaaactgcgcttatgggaagagcaggacggcaagtgtatgtacaccggtaaaacaattgccaagaatatgctgtttaacggcactgttgacgttgaccatattctgccgtacagccgtaccctggatgatagtaagaacaataaagttgtctgtctgcgagaagtaaaccaggcaaaagggaaccgaacaccctgggaagcggccatggccggcgtccttgattttgaagcactcaaggagatggcaaaaatattacgtgcaaaccataaaataactgataaaaaacacgccaacctcctgatgtcggccgaacaatttgccgagcgtttttccgatgaccccaataacggattcattgccagacaactcaatgatacccgttttgccactcgcttagtatcgaagtatctgcgaaccgtaacaaaacgggtagaagcacctacaggagcaatgacggccatgctgcgcaggttctgggggctggatggagtacttccggagctggcttcgctgggcagggcgtttgtggcaccggtgctggagggcggacggaaggacaggaatgaccaccgacatcatgccgttgacgcattaacaattgcactcaccaatcagagcataattcagaagatctcaacactgaatgcgcggtcagaagaaaagtcaaaagaactccgcgacggcagaataaaactccccgacgcaccaattgcgggcctacggaaacttgcccttgactgtgtggacagcatcattgtaagtcatcggaaaaccaggaagggcaggggggcgttgcaccaggaaaccctgtacgggcttgcccgcacacatggcggtgagcaacgttttaacgcggcaggagtaccacagtatgttgtgcgtaagccactttcagccggcctctcgtgtggcgaaatagacggcattgtaaatcctgttgttcgcaacctggtattacagcgtttggaagagtttggtgtaaacacttcacaaaaaaaatatactatccccgaagatgcctttgcggcaccattgtattacgaactcgcatccggcgaacgccgtaggattaagcgagtacggatcctggtgccatcgacgagtgcagttaagctacgaaaagatggggtttatgttattccgtttggtagtgaccatatgttgttttatcgagagaatgactctcagaaatataagtgggaacttaggtcaaggttggatttggccaaaaaactccctttgcaaaagttaacattatcagaggcagaacaggcgatcagtttgcgtgcaggcgatttggttgagttaacgagaaagggaaagatcgatgtttacaaagtacaaaaactttctggtgccggagttggcgaagtatctctattccatcacgctgatgcttccggaaatacaaaacagtatgaacgtcccaccccctccgcaatgcagtttgaaaaacttaccgttgacatattgggaaacattacaccggaatgataaagcgctcagttgttattcagaaccggtgctatgtatcggttctgaataaccagcttacaattgagaaccgtgaaaccggcgagatgaattcggtgccgatagaggacgtagggtatctggagttcgaatcagcgcagtgcacggtaaccactgctgcgctctcgcggcttgctgccggcggtgccgttgttgtagtatgcaaccagcggtatgcacccgaagcaattacgctcccgcttgaaggcaacacactgcatgccgagcgcattcagatgcaggttagtgcatccacaccggtaaagaagcgcctgtggcagcagcttgtccgatgcaaaatcagaaaccaggctgcagtattaaaaaccatggggctgccgcacgccacggttgcacggtgtgccaccatggtttataccgctgaccggactaatcgggaagccgttgcagcaaaggcgtactggcagcaactattaaagttgtatggagttaccagggatcctgacggactgtatccgaataattttctgaattacggctatgcagttcttcgctcatcggtagccaggggactggtgcgggccggattacatcctgcactgggcatacatcacagcaaccgtagtaatgcctttgcactggctgatgacgtaatggaaccgtaccgtccgtttgccgatttgcatattctgcaattctgtgctacactggttgaacccacagagcttcagccccctcacaagaaagagatattgcaactccttgttcgcgatgtgcagcacagtattggccgacgtccgttgttaaactcagtagaagttgtatgtgcccaggtagcgcaaacccttggcggaagcagcaccgaaccggatctacccattttacgcgcataagtgagtacagagccgtgtgggtgatggtgctttttgatttgccggtaaccacggcagcaacccgaaaagcatacacgcattttcataaggggctgctaaaggacggattctcgatgtggcagtttagcgtctatgtcaggcattgtgcatctgacgaaaacggcacagtacacatcgaaagggtggagcgcatgatgcccaaggccggtaaggtatcaatcctggttatcacagaaaagcaaatggcatcggtccgcacattctggggcgctgtaaagcaggataatcccggtggccctctccagcttgaactattctaaaaaaaaaaagagccttaagaacaaagaggtaagttcttacggctctttatacactgcaaaatctacgtaactacaataaaaatataaacactgtaatactaagactttcaaagatctgctctagtagccaattcacaacgccaattcagtccgtatctggcaagcaacactttcaaagatctgctctagtagccaattcacaacgggctatgacgttgttgtagaaagcgacgaactttcaaagatctgctctagtagccaattcacaaccagccacgaggctacaaagcgcgcggggtaactttcaaagatctgctctagtagccaattcacaaccctcggcaaggcgctgcacaaactccgtgaactttcaaagatctgctctagtagccaattcacaacggcgcgtgcgcatgcactggccatcaggtactttcaaagatctgctctagtagccaattcacaacggctacggcagctggtagcgagaacatcccactttcaaagatctgctctagtagccaattcacaacccaaggggctgcggttcagctcgcaaaacaactttcaaagatctgctctagtagccaattcacaacaaacagtacgaagtagccatgacaggtgaactttcaaagatctgctctagtagccaattcacaacactgcacaatagcgtagtggctatgtacacactttcaaagatctgctctagtagccaattcacaacacaaggccgcccgtgttgtcgagcaaaaacactttcaaagatctgctctagtagccaattcacaacggcagcggagagcaccgctaccgaatcggactttcaaagatctgctctagtagccaattcacaaccatcaatagtagctacgactctgtcaacaaactttcaaagatctgctctagtagccaattcacaactggcgaggcggcggttgtttcaagccttaaactttcaaagatctgctctagtagccaattcacaactgtaggcagctattcattgcaaagccttacactttcaaagatctgctctagtagccaattcacaacagcttagaaaaaggcagtaagaaacaccaactttcaaagatctgctctagtagccaattcacaaccaaaacaggcgaccatttgcccgaacagtactttcaaagatctgctctagtagccaattcacaacgtgtgttaacacaacgcttgttgcctattactttcaaagatctgctctagtagccaattcacaaccttccgggtgctgcctcctccagttgttccactttcaaagatctgctctagtagccaattcacaactttgcgcccttctttaagatattccagtaactttcaaagatctgctctagtagccaattcacaacagcgtaccgcgaagcataccaccagcgcaactttcaaagatctgctctagtagccaattcacaaccgtcgtagtactcaccctttagcacaatgactttcaaagatctgctctagtagccaattcacaacaatccggttgtttatctctttaattccatactttcaaagatctgctctagtagccaattcacaaccttgttgcgagcaaaggcgtggcacgaacgactttcaaagatctgctctagtagccaattcacaacacgatggtcttacacccgaaacaatactgactttcaaagatctgctctagtagccaattcacaaccacgtactgcacgaactgcaaagaatgcaactttcaaagatctgctctagtagccaattcacaactgtatgcaacggcaggtgatggcacggctgactttcaaagatctgctctagtagccaattcacaactttctgcaacttacacaaacctagccatgactttcaaagatctgctctagtagccaattcacaaccgtcgtagtactcaccctttagcacaatgtactttcaaagatctgctctagtagccaattcacaactagacgtgtaacttccctcatgccaaaaaactttcaaagatctgctctagtagccaattcacaaccaagcgcgttagctccaccgaatgggaagcactttcaaagatctgctctagtagccaattcacaacagccaaagccgcaatagacaagctccgcaactttcaaagatctgctctagtagccaattcacaacagtcatttgcgatgttgatttcactgagggactttcaaagatctgctctagtagccaattcacaaccgaccacagcatgacggtgctaggcggcaactttcaaagatctgctctagtagccaattcacaactgatgaatagtgcaactgccatgatgcccgactttcaaagatctgctctagtagccaattcacaaccggcttgggatgcggctcgggatgcggcttactttcaaagatctgctctagtagccaattcacaacaacttggctttgggacatcgcaactacgaactttcaaagatctgctctagtagccaattcacaacccttcgggaatccggtcttctggtatgacactttcaaagatctgctctagtagccaattcacaactctacgcgaagacgtactagataggctagactttcaaagatctgctctagtagccaattcacaacgatcctgcagcgcggcacggtctgcctcttactttcaaagatctgctctagtagccaattcacaacatgtagctgttcaaccgcttgcgttgtgcactttcaaagatctgctctagtagccaattcacaacgctgctgtggatactcgaacgcgtgccgtactttcaaagatctgctctagtagccaattcacaaccgcgctattgagtagtgacttcacgagttgactttcaaagatctgctctagtagccaattcacaactgctgtacagccatagcggtacgaccgtgactttcaaagatctgctctagtagccaattcacaacattagacttgccactcatctacaccgatgaactttcaaagatctgctctagtagccaattcacaacgagatgaaccaatgacgcaacccgattacactttcaaagatctgctctagtagccaattcacaacactgccgatgcacggtgcaggcagtacgacactttcaaagatctgctctagtagccaattcacaaccatcgacagtgcgatatagactcccgtttactttcaaagatctgctctagtagccaattcacaactttttagacggagaggattacccagatgagactttcaaagatctgctctagtagccaattcacaacagaagccgcgttcactgcggactatgcacgactttcaaagatctgctctagtagccaattcacaacttgactctcaaccaacaaccaccctcattactttcaaagatctgctctagtagccaattcacaacttaaccgaactgtacggcaagccgagttactttcaaagatctgctctagtagccaattcacaactgcggtaaaggctaatgcattcggcaagaactttcaaagatctgctctagtagccaattcacaacgccgtgatcttgcgtggattcacggggtttactttcaaagatctgctctagtagccaattcacaacaggccgtatgcaatgggatgcgagattgaactttcaaagatctgctctagtagccaattcacaacgcaaattcacgaacctgaaagtgtggcgatactttcaaagatctgctctagtagccaattcacaaccatctactgttggctattccgtggcaagcaactttcaaagatctgctctagtagccaattcacaacgcgttggcactggagccgctgccgaggtgactttcaaagatctgctctagt

SEQ ID NO: 3729 - DNA, 15246 bp, synthetic construct
  misc_feature 1..15246: note = Synthetic
  source 1..15246: mol_type = other DNA
tgtttaaaaccaggacttaaagggctttctgaaaatattaaagtgagaagtattattggtagatttttagaacattcgcgtatagtctgcttcgcaaacggtagtcgtataccttcgactagggctaaagtgtttttatcttctgctgactggatgccaagaagctttattcgtagagtcgaatctatgattcctttagaagacccagtgattcataaaagaattttagaagaagtgatgttttataatcttgctgacaatgagcagtcttggctgttaaaatctgatggaacttatgagcggatgcatgttttatctgataaggttaatattcatcagacttttttaaatctggctaaggatgctaatctatgattactgctgaattgagtgattgttttgcgattattgatataggttctaactcaattcgcatggttatttatgatgagatagctagatttcctcgaatagttatagatgaaaaagctgaatgccacttggctgaaggcttagctatgaatggtgtatttaaaaaagagaatctcgaaaaagcttatgaaaatattcgcagatttgctgctctgctagatatttctaagatatatgaaagatatatcatcgctacatcagcttgtagagaggctacagatgctaaagaatttattcgtgaagtagagaaaattttaaatgctaaagtttctgttatctctggagaggaagaagctttactttctgcagagggggttatagttgagatgcctgatgcagagggagtagttgctgatttaggtggtggaagtttagagcttagcttagttactgctgaggtgtctaaagggattagccagaaaaacgcagaaattggagtttgcgagcgatcccctgaaatcactgaatgtacgagttttaaacttggttatcacacgatgctcgatatagaactgtctaaaggctttaatcctagccaaatgcagaaatatcttatgaatgccttgtctgaagctaaggtttataaagaaaagaaagtcgagaccttatatttagtgggtggacgctggaaacgtctagctaggctgcatatggcatctaaagattatccacttaaaattatcagtaactatgaagtttctagtgctgagatgaaagagtttcttaaattagataacgttttctccgctctgcgtctcactgccctgcttttaactactttgctgaaggtgactggagttaaaaaaatagttttctgtactagtggtatacgtgaaggttatatatattcactacttaaagaaaaagtgaagcgctgtgatcctttaatagaggcggttttaaagattactaaattaaagcctaaagagagtttaaaacgagctaaagagatatctaaatggatagagtcttttgaacttatggatataaaagctgcttatagtcatgcttctaaggtggcgataaaaatagattttcataaaatgatatttatgtcttctttactcatacaggcttttctgtttaataataaagaacagaaatctgtagcggttttcgactatttaattaatttaaatttaccctatctttctcacccagagagggttttccttgcttatgtattattcacttcacttgctggaaataagacgaataaagatataaaaaaatatttatgtcttctagattttaatattcagaaaaaagcgaagaagatcggctacctgattagacttgctatatatctttcaccgagggattctaaagttttaagtaagattaagctctgctatgaagctggggttttaaggctgactagttctaagattgctagtgatgatctgttttctgggattactttgcataattctttgattgagcttgagaatctcgtcgaatattaggtatcagccccttgtgtcttgaacgactcaccccacgcgtagcgtgggtccccaagttcgtcttatcaagacacaaggggctgataccttttggtggggtttaggatgggattttattttagagactgttgtgcaaggtgctccaacggcgactagtaaatttaaacaggcattaaaactttcttgatcatttgcttgatagaaatcatagaaagagttgtatttagagctataaagaaatattttctcaatggcttctagtatggttaaaaaatgtaaaactaatttatccaattcttatcctttttctttcaatttcgtctttgataattggatttaagttaattgaattaaagtacactagatctatttctttattgaagaggtcttgtgaaagttcttctttcgcagcaataaaatttttatatgttttaaaacctgaatctacagttactgctatgtctatgtcgctgtcagcgttagcattattctcggcataagaaccgaaaagaaatatttctgaaaagccgtatctggattgataatactcttttttactttctagttttttgattaattctttagaatccattttcgttatctagcttacattctaaaacagaatcataaggtatcattaaaaatcaaaaagattttgtaaaatgcaaaaggaattaagactcgatactaattttatactcacagagcttcttatgtttagttagccttccagaaactctttttcgccacagtctaaaactcctaggttttaattcacgctgcattactctaataacctcagcttcagtgagtccaaggctttcctttatctcttcaaagctgattctatcttgccaagcagatttgatgattttatttagctgttcttcttttaaagcacggatttttttgatactttttaaggacatgcttaaatcttacccagagcagaagcataaatgcatatggtttgtatctaaggcagattgttggtgtaagtgcgggttttggtaatgtttggaaacgtatagcaatattaaatattatgaatcgggactacggaatagttcgttcttggcataatccttatatccgttttgggattaatacttgtttgacctataatgacagggctgcggaggatattcttttaaaagatgatgatatcgcttttgttgatattggacctctgattggtgagctagagggggatcttggggtgacgctagtatttggtaataatgcaaagctttactctctcaagtctgctagtgaaaagcttttcgcttatggtttggaattttttaaattacacgagcccactggcatcgaaatgcaggaatttatttcatctagggctcgtgaaatgggttatacatctcttcttgaatctacggggcatttaattggtaaattttcacattcggctatttggaatcagggagtggcgacttatacggaggaaatgcagtctgggatttggatattagaagtacagatcaaagatccagaattgccatattcagctttctatgaaaatatcttaatatgaatttagatagatttagtgaaaatatcttacagagtgatttagatgatgatgaatatattaaagctaatgatgggtggtgagtatgcctgaacttccagaagttgaaacagtctgccgtgggcttagtgaaaatattcttgggctaaatgtctcttctgtagaggtttatgcagagaagttaagggattttattccagctgacttaaataaaaagattttaaatcacactattactaaaatcgaacgtaaggctaaatacatacttatacatttagctgctaatatggatcttcaaacgaatggagacgggaatgtacttgaaccacggtctccagttttaattattcatcttgggatgagtggtaggttgactattcaagatgaagcatatcagcgaaaaaaacatgatcatgtgattttaaagctcaacggtttacagttaggcactgttgccgaacgtgtaagtccaaggctgaggaggacgaatgaccgcggtacattgctggtatttaatgatgctaggcgtttcggggtaattaccttaacagatttagagaatttatctcagcataagctttttagaaagcttggcttagagccgcttgcaagagagtttactgtagctaaattaaaggctttatttaaaaacagaaataaaaatattaaaaatactcttatggacgcaagtttaatagtcgggataggtaatatttatgctagtgaagccctctttagatctggtattcatcccgagagaacggcaagttctcttactgataaggatataaagaaattacatgagcagatcattgttactttagaagacgctatccgagctggtggttcgactttaaaagattttagtaaggctaatggtgaaagtggatattttcagtatcagtttaaagtctatggcagagaaggtttgccttgctttacttgtaagactcttattgaaagaatagttcagggtggaagaagtagttttttttgttctaagtgtcagaaatagggtcacctatcttccagatacctttttctcgaaaagcaggtatggtctgtcttcttgccatatttattattgaactaacaggtttatctatggaacgagcataattagtgagttttactatttcactactcttggcgtaaaagcagtataagatcttctgtatttatcagtagcagttggctcccctttatctataaacagtcttagagaggatttagaagttagcttaagatgttgaatcatcccttaagggattatgttaatagcatgctgtggtataattattaataataaggtgattcactgtaagattaataatagatcatccctttcgggtttataaagaaggtgtattatggctaaacttaatgactcaaaaaatttaggagattttatattagctacaagaaagcggcaaaggcttacgcaggaggatttagctttagcttcgggcgtgggtttaagatttttaagagaactagaaaagggaaaagagacttgccaaattaataaaatttttctagttttacgttcactaggatgttctctgtatttagaagataagcgagatatgaactgatgggtaaaatactctatgtatatttaaataggcagctaacaggtattcttactgagagcgatacaggttttttatcttttaaatatactgaaaatgcaaatccgatatcagtgtctatgccatatagagaaaatgaatacttagataaagagactaaggcatttttctcggcattattgccagacagtatagttagaagaaggctggctaaatatttaggaatttcagggaaaaattcttttgcccttcttgaagcagttggtggagaatgtgctggagcattagctttgtattcaagaaaaagaaaagagactgatcaaattcaggaaaaaaatattttacttttagatgataaaaaattagaaaatattttagatcttttaaaatatcgtccattaatggctggagaaaaaggtttaagaatgtctttagctggagcacaggataaaattgcactcggtgtaataaattctcagctcgctttatttacgggagatatacctactactcatattttaaaacccagcatggaagattatccagatagtgtttttaatgaagtattctgtatgcagctcgctgctagcttagatatagaagttccaaaaacagaaatccgttatttgaaaggaaaatcgtattatttaatcgaacgttatgatagaaaaatagggcaggtatttaaatcgaaagaagctctcttagaaggatttttagataaagttatcccagaaccgatatgccgtttacaccaagaagatttttgtcaagctttaagcatcatacctgagcataaatatgaatctgaaggcggtccttctgcgaaattatgtttcggtttacttgataattattcatcaaaaccagctgctgacagaatagcttttcttaggttacttatttttaatttcttaatcggcaatgctgatgcacatgctaaaaattactctttactatataaaaattcaattcctgaattagcaccagcttatgatttattaagcactgctgtttatcctgatttatctcataaactagctatgagcataggcggtgaatttaatccagagaaaattaaaatagaacactggttaaatttaattccagatactgcctcagcacagcgtttgcttgttaaagagattaagaagacttctagaagctgtatgaataaagcattagctttaaggcggaaatttaaagatgagggtaatttttctaaggttatagatggtatatgtagagtgattgagaagagggtgaggatgattagtggtttttaataaaatttaaagcttgttataatagttgctaaatgggtataatgactgttataaggagctttatgaaaaaaccagttaatttacctatacccgtaattaaagttttacgtaagctcggaaatgacataagtgatgcacgtcgcaggcatagagtcactgttgaaattatggcagagcgagcagggctttcacgggcgactcttagtaaaatcgaaaaaggtgatcctacggcttccatgggggcttatggctctgtactttttgtattgggtcttgcagataggttaaatgatcttgctgatgctgctcatgatcttactggaagacagcttgaagaagagaaattacctaaaagagtacgattaccgaaaaagagaaaaatagataaccatgaatagtagagaaatcatagtttggatttcccttgggaaggagaatataccagtaggtaagctatggtttaacttacataaaggaaaagaaacagtatcttttgagtatgattcagcttggttaaaacattcagagaaattctcattagaaccagctcttgaattaacagaaggtacttttcatgccgcagtaagtgtctttggggctattggtgattcagctccagatcgctgggggcgtgttttgatgcgaagagcagaaagtaaaaaagctaaggatgagaaacgaactcctataacgctgcttgaagcagattatttattaggagtaaatgatgaagcgcgccaaggtgcattaagattttctttagagcttgataaagctgttttcctcgcagcaaacgatcagaacccaattccagcacttattaaattaccgaagctactctccgcaacagaacgctttctagataatgaagaatctgctgaagatcttaaattattattagctccaggatcatcattaggcggtgcaagaccaaaagcttcagttcaggataaagacggtaatctagctatcgccaaatttccaagaaaggatgatgaatataatatagttctgtgggaagcagtagcacttcatcttgctaaatctgctggaatcaatgtctcagattggcgaatagagaagatactcaggaagccagttttaattattaaacgctttgatcgtaataatgatgaacgtattccttttctctcagcaatgagcatgctaggagctaaagataatgaagagcatagttatttagagatagcttacgcaataattcagaatagtgctgctccaaatgatgatttgatggagctttggcgacgtatagtatttaacattatgatagcaaatacagatgatcatttaaggaatcacggttttatttatgagcgttataaagggtggaggctatctccagtctatgatctgaatccgacccctgtggaaattaagccaagaatactaagtacggctataaattatgaagatagatcagcatctcttgagcttgctatgagtgttataaaagagtttaggattaataaaaatcgtgcaatgcagattagtaaagaagtggcagcagcagttaagcaatggcgtaaggttgcagctaaatttggtttatcaaaggtggagtgtgattttatgaagtcggcatttgaatgggagtgactctcttaatctttggctcctttggtttttggcttgctcatcaagattagggcgatagttcggaaatcgttttatactaattttagtgataaaaatcataaaattactgctccctatattacagccttcgtggcagttttttaaggaaatagctccatcaccacgtatagaattcaggctattagagaatattgaagaaaatctgagttggattgagtttcgtccacgtccggagaagctgtctgttttaagtcatttctatagattcttttataacgctgaatggaatgaaactatgtatatgactaattgtgctgaaagtttaattttagaacctactgagcatgcagatactgaaattaaaaatcgtattaaaaggtatttattaaaagaaggctataaactagaaaataaattttttgaatttagaataacctttatttatagaaagcaatccactttggaagcacatgtgctttatcagtctagtttagagcatttatctggagattcagtctatgagttttgagcaggctattcatttaactgaaatattacttgctatctctttaattcagcagagcttagagcatattaattcagctagtgatgaaagaagactttttattccacaaatactttttagtattctgctactagtggggatttccactaaatgggtgcttttggttttactgtttataagctttttaattctttatcgttttcaaggtccttataatggtggctgtgacaggatgacactattaatactatgctgtctaaattttatttatttttgctctaatcatgtttttcaagaaatggcttttatatatttggctctgcaagctatcatgtcatattttatagctggattagtgaaaattgttaatccggactggcgttctggacaggctttgaaggatattttccatttttcagcttatccgatgagcgaagaaatgagatatataaaagataaatctaattggcacttagctttatcgtggtttattatagctgctgaattgcttttcccctgtattttcattaatcagatatttttatgtatctttcttataatcgcttttagctttcatgtagctaatactgtgatttttggctttaatagatttctctggatatggcttgcagcttatccttcgatgatttggttgtttggtagggtgcaggggagcttggggtatttataaatcttgattaaaggtctgcgtagatcactaggtttttaaaatatcagaataaaactttataaaattccataaatggaagttaggcgtaatagattaaagccaagtcgagattatggtctgaatttgactgattctatggtgcttatattatgcacagaactctgtcatcctgctgggaagtggttcttaatatttttgacggaggatgggcattattataaccaagggaaagtccttctgtctttgttgacggcgttgtttggcgttattgttggtataatgaaaatagcttacaacaggagaaagattaaatgacaatagaaggttatatatttgtagctgtatttatgcttatctttggctcatttggtttttggcttgctcatcaagattagggtgaggttttttacggttttatttaagtagaaaaaggctggtcgtttagatttatattttttaagactggctttgataattttttctaattctggagaagcactctctgtactggatttaatgaaggggatgttgggttttttattggcgaaattagttaaaagtagccttgcgattttgtttgttgagatgaagttggtttctttggcttgttgttttagtttttcgtttaagatttatgaagttttggatttgaagtttgaatttgactataaattgatgacgtagatgcctaaataaaaaaggaagcgtaatgcttcctttaacattttgcggatctgtaaaatatccttattatcttacagagaccaattcataacttattcaatattttatcaatatctcaaagagtgtgtaattaatttttgtataattattcgaaatgaagcagccatatcgattatcacttgacattggtactaattctattggttggtgcgtattggatttaaagaaggattctgatggagtggcttctagtgaggataatcttgtgccatgtaaaattagaaagatgggggtgaggctttttactgaacctcgaaatcccaaagatggtacaactttagctgcaagaagaagagataaacgtagtcagagaaggaatttatttaggtttaagcagaggcagcagcgattacttaaagtactaaggaaacatggtctgcttcctgtagatgatactttggcacaagagctgaaggatttaaatccttattatttgcgcgtgagagctttagattatcctctaagtgattttgagcttggtagggctatctataatcttagtattagacgtggttttaaatcaaaccgtaaatctgcaaatgaagatggtagttctcaattaaaaaaagctattcaaaatttaagagatacgcttagcaactctaaagcaagaacagttggagagtttctatataatcgaatgctcgaaggcaagtctgttaaattttcgtacttgattgatgataaaactgaatcacatgaaattaaaaacttttttatagatagaacacttatggaaagtgaatttgatctaatttgggaaaggcaaagagaaatagcatctttagatttaaatgatgcaatgaaagaagatataaagagatgtatttttgagcaaagaccgttaaagtctcagaaagaaactattggaagatgtagttttgagacacatgatgaaaatggcttcaaaattccttttggtgagagacctattcgggcaagtaaaggtttaataagttttgagatttatagattgttacagactttgattagtttaaaatatacggtttctgaagaggagggtgcagagaaggcgttaaactcttttcagataatgcgtgttgttcaacaggcatttaaaaagcctacaaagaaggtttcttttgctactctgagggagattttaaagttagagtcagagaatatatttaattttgaaattgggcagttaaagcaacagctaggttcatctaagacgataaccaagtctaaaaagacagaattagattttgtgccaactttagcaatagtctctaaatatgaggaatttaaagattttctgaatttggaaagagttgtagagttagactgctttttggagtttattgctcttggggaggatgatgataagttattagaaagattgcaaacacaatttgctttatctgataatagagtcgaagcttttttggataaggttttaccagagttagataaggctttgggtactcagtatgcttctctctcactgaaagctttgaataagatcaataaatatgtagtggagcatcttaatcaatctgataatccactaaagtttaatgaatatattcaagctgtttatccaaagagattagaggggcgagagatacatgaagagcttccatattatggagatttagacatgtcatgtttaactaaatctccaaagggctatgtccccccaaaaggatctgatgctgatttttatatctcgaaccccacagttcatgttgctcttaatgaattaagaaaagtagttaatacattaattgataaatatggacaaagacctcactctattcatcttgagcttgctcgggacttgaaaaattctaaaaagcaaaaagataaaattaatcaaactaataaatataatgaggaattaaggaaagagtttgaggaacgttgtcttcctcttggtgcgaataaagacaatcgtgatgatctgattaagtataagctatggaaagagatggacgtagatggtggacgtaagtgtttatattcagataaatgtatccagatcacagagctgtttacaaaaaatattgaaattgaacatattaaaccatattcaaaatctcttgatgatggaatttctaataaagttttagttttccattcggaaaatagatttaaaaaaaatcagacaccttatcaggcttttgtgcaggatgaagggaaatggtcagcaattcaagaaagagcaagagatttattctatatacgcaatcgtagaaagtatgaaaatgttatttctcaaaatgagccacaagcagacgcttttcttgagaggcatctgaacgatactcgctatatctcaagagttgctcgtgaatatttaacttgtattgttgataaacctagtagagtagtggttcttaacggtggacttacgagtatgtttaataaagcttatagtctttatggtctcttagatccgaattcaccagaagaaaagaatcgagatgataataggcatcatgctttagatgcgtttgctattggagtaattagtagatcacttattaataagattcatagaatatctggcggtaatgagaatattttaaatttcagttctgccattctcggaatgaaatcttctgtggagctgtctaggatactagaggatttgccaattcagcttgataagatcgtgatttcttgtaaaccaaataggagttttgctggtgaattacatgaagagaccatttatggagctattgaaccttctgagtggtataaatattgggatgaagagcataagcctgattgggtaaataagctagatacttatcaaaattattatttgccaactaaaaagcttagtgttaaagaatttgcaaaaatagaggaatttaagagtattgtagataaaggtttgagaactactttgcagaaggtttgtgggttaatacaggataaaattcaagcaaaacttccgaaagagcaggtattaagtgtgtttgaatactatgaagctaattatgcatcattgcctaagaggattaaaatatttaattctctttcacctcttaagttattagtgaaaaaagatccaagtggtagggtaactcaagcgtttaaatatggaaataatgctttctgtcttatttataaagatattaagtctaaagttaaattaaaggttattcaaagagcggaagcctatctgagttacagggagtatggtgaaaactacattactcgacttgctgaaaaatatttacccgatggattggcttatcatgatgtgattttcccgaaggatacgcttttagccattttgagacaacccattgaaggctatcattcatctcaagtatatcttcaagtggaaagcttcacctacaggtcttctcgggattcttatgccatcatgtttaatgaatctctctcgccgataataattcagaatagtaaaccctttggtaaaggagaactttctccatctggttttaaagattatcaggttcatcgtatagatattagtccaatgggtgtttaatgaaacggcttattattgaaatcacgggaggctctaagtatctaaaaaaacataggggctttattgttgtccaagataaggattctgacatcgagactaaaataccaatagattctattgctgctttggtttgttattctgatgggcttactattacgaatgaagttataactgctcttttggaggctaaggctaatatagttttctgtgatcataaatatttaccagtttctataatgtatcccttagatggtaattttaaacagactgaaagaatgcaggcacaattagctgctgatatggttttcaaaaagaggttatggcagaagattatagaaaccaagattatagctagtgcacaagtgcttaaatttcttaataaaacggattcatttcatttattagcagatgaagtaaaatctggtgataagactaatgttgaatcattggctgcaagaagatattgggcattactgttcggttcgagttttatcagagatcgggagcaggacggtatcaatgcaatgctcaattattcttatacaattcttcgttctcatttatctaggcttgtggttgcatatggtttacatcctagtttgggattgcatcacaggaaccagtataatcatctctgtctagtggatgatttgattgaaccatttagagcttgctgtgatttgttggtttatgaggcataccattatcaacagcaccgtttagtgagtaaggactttaaaattttagtagctaattctatgctttttgattatgaaattccgaagggagtttcaccactgttaaatgttttagataattatgttatatcaatttgccaagcttatttgagcaaggattataaaaatattgatttgccaaattcttttgtgtcattgggctaccacaaacactagatatagtacctaatatttgtaaggcttgcgatgaataaatatttgccgataccgtagctatgcttagtgcatatagagttatgtggttacttgtgatgtatgatttaccaactttgagcaagcgtgaacgtaaaacagctcaggattttagaaattttttattagatgagggatttgaaatgactcagttctcctcatatatgaaatattttcttggtcgaccagaactatcggcagcaatgaaaagaatagaaagtaatttaccagaagctggccatgtctatattttgaattttaccgacaagcagtacagtaattcagttaggtttaattgtaaaaaaaagtcgagaccgaaaagaaatcccaaccaattactccttttttaaaagaaaaatccgcagattttggctttagctgcggattttcgaggattgtattgtatcaagttatgaattggtctctataagaaactagcactcgaagctacctccgaagcgaatcattgtatcaagttatgaattggtctctataagaaactacactaattcgtatgctggaactggtaagattgtatcaagttatgaattggtctctataagaaaccttacttttaaaattggatattcagaatcaattgtatcaagttatgaattggtctctataagaaacggtgcaggcaatggtactggtacttggactattgtatcaagttatgaattggtctctataagaaacttatagcagtagctaacaagtgcgtcatgtattgtatcaagttatgaattggtctctataagaaacttatagcagtagctaacaagtgcgtcatgtattgtatcaagttatgaattggtctctataagaaacttatagcagtagctaacaagtgcgtcatgtattgtatcaagttatgaattggtctctataagaaac

SEQ ID NO: 3730 - DNA, 15527 bp, synthetic construct
  source 1..15527: mol_type = other DNA
  misc_feature 1..15527: note = Synthetic
aataatctggcaatgaatcgtttgatactaattgcatctatcttctcttcatcaaaaataaaatccaggtcttccgattgcctgtgccctgattgcagtgcaagagctgaacctcctaccagagtgaaacggttcatatacttttcctttgccaattgttgaagaagcaaagtggttcctgctggcaaattatttaggtttatactcataatcctaaaataactttgttcacaaaatgcctccgtttctgccaacgtccctgggctgatatcttctgatttgccgctgcgataatatcatttgaaactatatcagacaagcgaaacaaatcatccaggtcaccataaagtatcacttgttcagcaaccaattcctccggcaaatcagcctgagaagtatatgaccaaaacagatgatgcggaaatcctgtaattttcatattgtatcaacaagtttattctattcaaagatacaaaaaagagatcatttcagcaaaatactaagtaaaaattcttctaattccacattgatcatgatgttcatcttcgtttccctgatactaatggttaacattgttgtaattatcgggataataaaaggaaagtaaacgaggatgaaactgataaacggattgttaaatatagaccgggaccagaatgtcgataaatattatgacgaatcactgataagtaattacaatgtcagatataatctttttattttggtagtggtatgtaccggattaattgcaacagttgttccctttattctgagatgataataaaaaatgccaggaatttcggatgacggatgacgaatttttttaaatgtattcgaaattccccggttcatgtcatttcattcccggattcgtcattctcttacccatcattcccggattctccattcgtcattcttgtcatctgatttttacggggtcgggatttctaccgggtaatttcaatttttttttgaaaaaattctttcacagaaaaaaaattaaaataattttgcacccgattttagaaaaacaacaatttatggaagtgagtgttgagaacattacaaaaagctatggctttcaaaaggcggtcgacagcatttcattcaatgtaaaggccggtgaaattgtcggtttcctgggtcctaacggcgctggaaaaaccacgacaatgaagatcataacctgttatatgacaccaaatggaggtgatgtgaaaataggtggcgtttccattcttgcacagcctgaagaagtcaaaaagcacatagggtatctcccggaaaccaatccgttgtacaaggaaatgccgatgatcgattacctgaaattcgtagcagagttacagggtgttccgaaaggaaagatcagggacaggatctttgaaatgattcaggtctgcggcctgaaaaatgaaaaatacaaaaagatcggtgaactttccaaaggataccagcaacgggttggattggcacaggctatgatccatgaccccgatgtgctgatcctggatgaaccgacttcaggtctggatccaaaccaaatcgtcgaaatcagggaactgatcaaaaagatcggacgtgaaaaaacagtcatcctttgttcgcatattttagcggaggtcgaagctacctgcgaccgtattgtaattatcaataaaggtaaactggtggctgacggaactgctgccaccctgaggaaacaggcgcaaacgaaagagatcgtcaaggttactattgaagatggtgacaggaatgaaatctttagggcattgcaaaacgtggagacgattgagctggttgatctgcttcctgattatacccaatcttttgaaatacaaagcaaagccgatctgttttccagaaaagccattttcaaattatgcgtggaaaaaggatggacattgactgaaatgaccccggttgaaagaaaacttgaagaagttttccgggatcttaccattaacaattaataagataaaacaaccaatatatttatgaaaaagatctggataattactaaaagagaattgcgatcattctttgattccctgatggggtatgtgctgatcgtcttgtttctcggtttttgcggattttttacctgggttttcggcaatgacatctttcttgtcaaccaggcaagcctgcaatcatttttcagtattgcattctggacacttttcttttttatcccggcggtaaccatgggattacttgctgatgagaggaagtcaggaacgatcgaattgctggtcacaaaaccggtgagcgactggcagatcattgctggtaaattcctcgccgcatttttattgatctgtatttcattggcttttactttaccctattacattagtgttgccagtatcggtaagatcgaccatggcgccgtatggatgggatacctgggattactatttatgagcgcttcttatataagcatcggcctttttactagcagcattaccaacaaccagatcgtcgcattcctgattgccctgttcatcggcattttctttcacctcatttttggccttgtcggaggaagttcaagcggatgggtcggcgggatactaaggtacttgagcctttcaacacattacgagagcatggcaagaggagttattgattcgaaagatgtgttttatttcttatccataatcttcactgccttgatcggaacagaacttgctttttcaaaaaggaacatttcaaattagacatcgatggttcgaataataatagttaacctggcttatttatgaaaaataaaaaatcgattttaacttatatcctcttgatggccggagtcatcatcctggtcaatatcctggctgaccggttatttctccggcttgattttacggctgataaacggtacaccttaagtccggccaccaaggatatcctgcattctttaaatcaaacagtgacggtgactgcttatatcagtgaggaattgcctgcaaatttttcccagcttcgacgggactttaaagaactactgatcgaatattcgaaccgctcaaaaggaaatgtgatgttcgaattcattaacccgaacaaggacgagtccaccgagcaaaaatcaatgcaggagggaattaacccggtactgataaatgtgcgggaaaaagaccagatcaaacagcaaaaagcttacatgggagctgttgtccattatggggataaaaaagaggtcattccttttattcaacccggggcagcactggaatacgccctttcaaccagcatcaaaaagatgaccattgataataagcctaaactaggctttctggagggtcatggcgaaacttcaccgaattccatggttcaggtcatgcaggcactatatgttttatatgatgttgagaatgttaatctgaaagattccagcgcaaacctgaataaatataaaaccctggtcattgtcaaccccaaagataccatccctccttcgcaatttgccaaactggatgaattcctttcaactggaaaaaacatttatattgccatgaaccgggttgatggtaattttcaaaccgctaccggaaccgaagtgaatacaggactggaaaagtggctcgaaacaaaaggtgtgagggtaaacccgaatttcattgttgatatgaattgcgggagtgtgatggtgaatcagcaacagggagctatgacgtttcaatccagcatgaaattcccgtacctccctctgatcaccaaatttgctcccactccggctacaaaaggtcttacatctgttctcctgcaatttgcaagttccatagattttgtcagtactagaaaagatctgacgttcacctcactggcaactacatcagataaagcaggaacggaaaatcctccccttcgttttaatattaaccggaattggcagcaaagagatttcccgctttcgaatctcacggtagcagggttagttacaggaaggatcgccggttcccaaaatgcaaaaatgatcgttgtttccgatgccgattttcctgtgaacggggaaggacagcaggcaagacagattccgcccgacaacatgaattttatcgtcaatgcaattgactggctttccgatgataccggactgatcgatcttcgcacaaaagaggtaagttcaagacccctcgatcaaatggaggatggtaaaaaagcactgataaaatacctgaactttttactcccggtcatcctgatcatcggttatggatttgtgcgctggcaatttcgaaggaatctgcgcatcaaaagaatgaacgaaaattacatatgagaaagaaccgttctttctgaaccataatgacttgtttcaaacaataacgcggaagaaaatttcaatgaaaacaataaaaaataaaacattactgatcctgttcatgatccttgcaataattgcggtgatcatgttcttttatgacaggaataaaggagaaagaagctttaagagcgaattgtttaccgtggattcttccaaggtgacatccattattatatatccgaaagggaagacgaacattccgctgcaattggcgaaaactggtaaaaactgggaaataaaaaccaacaataaaacctatcctgcagatagccttgtcattcaaaggatcgtaagcgcactttgccatgtcaaaccggaaagagtcgccgggactggcaaagctaattggaaagacctgggaattacggattcactggggattcatgttgttgttgaacaatccagtaagactatagcagatatgtggatcgggaaaatttctattacccaggacaataacagaggaaattatggaaggaatcagaatatgatcattaaatcacatgtccgtgtagtcggtgatgacagggtctatgttgtggatggtttcctctcaatgatgttcggtgatcaaccctccatgtacaggaatagaaccgtcttcagatttgataaaaacctggctgccagattaactttcatgtatcccggtgacagttctttcatgctcgttaagaacgggacacattggttgcttaacgatcaacccgttgattcagccaaaacagcgaattatttgaattcgatcaccaatacaatgaacagtgaatttgcagatgatggcacccaaccctttgtatttccctattcattgaaaatagatgggaatgatatgaccgctattgaagtacatggagcaataagtcccgatccgaagaaatatttcgtaaaatcgacctttaacccttcagctgtctttggttcgtcaaaccctaatttattcaaccaggtattcccgggtaaggataaatttttcgaaacaaaaaagaaaatcactaaatcccggctttcatcgataggttgattaattttgtaaaaaaattcagcgagatgagattaagctgcattgggatcattatccttggtttattgagttttcaatgtgtgtcacagaccggaagcacagatactcttccttcatctgctgcaatgcctgcaactccaaaatatctttccaaacaaaacaaaatgcatgttaatgtcatggccggaacagaattttggacggcaaccggttatggttcaggaatagccacttatctaatgacagggattacttacccggttggaaaaagattcagtctcggcggcgggatcgggattttgaatacaacccctgttggagttcattccacctcagtcgaaagttttgggaatgcgaattctactaatactcttgtttatatcaccggccaatacctgttaagtcagcacgtgacagtgagcggaaccgtgtttaaagaatttactgcttttaacaattccccggaatatcagcgttccccaaaaaatactccccagggtgtctatatgaaggtcgattacaggatcaatgattttatgcagatcgaagcaggatttggctattcaagaggcgtaagtccttattataattcatacacgggttcgcccatatatgacaggccattttttttcagaaatccttgatgccatttacttcatctctttcagaaaatcttcttttttttgtgattccctgcagctgttaatgtaaaacaaagcgctgtccctgcggccgtttaaataataaatagctccaaggttaaatttagcatcatcaaaatacggatcaatattaaatgcttgcaataatattgcttttgcctcattttgtttttctgatttaaaaagtgcggctccataatcgttcaataccctcacttcaaaaggtgtggaccttaatgcccttttaaaacatgtaacagctgaatcaacatcgcctttcctgaaatacgccactccttcaaaccaggcaagtggcaatgtattaggtgtaatccggtaaaacgggttttcagctttccggcaataatggatcacattttcatcgttcttcctttcatttctgaacatttttatcgtaaaatattctcctctgatcctgacgaacgacaaaaatattgagaatacaagcaggatcacgaataaccatgaaaacaattttagagggaatttccggatcaccttattgttaaaaggctttaatggaaccttctggaagaggaatgcaaatatggagaacaacaatacattatgctccaccctttttaaagggaaatcaaatagggaaaagacatagaaaccgatgataaaggaagtataaaatacagcagagatatgaggcctgggaatagtgtatgcgattttatagaaaatgatcagaggagggataaaaaatataaaaacagaaaggataagaccaacaattccaagttctgaaataatactgatccactcattgtgaggctggctataagtaaaattctttgctgtatgttctggatttgctggatatttacaggatggaacaatgattctccagtttccggctccaacaccaagtaccgggtgagatctgatcaggtaaaatgattttttccagaaaatgacacgaagatttgcgttctcataatagttttcagagaaatcaaatgcaggcatatgttcgagatcggcttgaagtttctctctttctttcctgattttctcagcgtatgaatcttcatatgttctgaaataattccacaccggtatcttactcagaaaataattttttcttgtgttatcaagggatgaatagaacaggaaaactcctgttgagagcataacaaaggaaataatcccggcaagaatatttcttcttgaaaaaacacttctgtatttaatgatcaataaaatgatagaaataagcatggcaaggaacaaacccaggtaagctgccctgctctgaatgatgatgataaagaatacagaaaggataagaaccagaaccgacatatatttccagaagcccctgttaagggaatacccggtcagaacaagtggcagggagatcagcaaaaaacccgcaaagaggttattattggctgaaacagaaaagatctggtaaggattataaaactcaagggagatcatctcataaaatcccaaaccaaaggcaaataacaggacaaaaagctgtgtcttgatgaatatattctcaaattctatattctcattactcaatgaggagatcgttagaaatactgcaaggggaagaaagaccagctgtgattgcatgattgcttccgaaggagcaacagcccaaagacaactcagcaaattccataaatagaaaaggataaaagcaccttcaaaaaaattaagtctaaacaggctgattttacggaatagtaacaggtaagttattaaaagtaaaacggaaaggaacaggaaccttggcagaaatgatttgtcaacgataatccctgaacggattaagttggcaaaacataatagcaggattgtaaaaacaaataaataccttttacttttgctacgcattgtagctttttatggtaattatttcggacaggaacaggttctttttattcccagaaggtgatgactgcacatcccccttcacccgcggttgggatgcttgttgaatatcctgaaatgagtgcacctcctttacccggtctggaagtaagggttctgtcggcgatataggatctttccaatccctgaaaaacatcgaggatattatcattaggaatatctgaatagccggtaatggtaccaatattagccgttccttgagtaccgtgttgtgtagttgttgcatagctaccccttttccctcctgttccccctgcggctttcatccctccgaaccagctatctccgccatttccaccattcgtatcaccgtaccagttaggataatagtatgttgcgttcgttccggcatatccacctgatccaataacaacagtaaattgctggtttgggactacatcgaactcttgcccggaaaatccgccactaccgccgtcgccaccattattcaggttgtaagaataagaataggcaccagcgccacctccgccgccagaagctccccatagctctactttaattttggataccgaggaaggtacattccaggactgggaggaggtgatgactattttattattggccggataaccattattatttgaattaattacataaggggttgggatcgttccattccctgtcaccgttatattatttccggcctgtatcttggtttctgagccgtcggtcaccggtttgtttgtaagatcgttataatccccgctaaaaccattggccgctttttgggaatacaaggcataaggaacactcaaaagctgactgaccccggtaatgctgtaatttgttcctccggccggatcggtttctgtcttaaggaaaaagggcccaatggaccaatcgatatcagcaaagttccctgtagttgtacccccgccaatctctaatgatacaagcccgttggcattagtggttgcattgtgcgtttctgtataaaccgctgttccagtcgttgaaccttgcaggatagttaactttacaccaatattgccaccttgcatcaacttgccggaggcatccctgatcactgcctggtaagtcaatttctggggcgactgagcaagcaaagatgtagcaataaaaagcgcaagaacaaaggaaaataactttttcatttttttatgattataaatgtttgtaatgctttgtcattctcggaaactgtaagacaataggatgcaggcgcaaggtcccccatccgtatggctgtttcaggactttctattttcatgttttccagaagaaagccgttcatattatatagctggtagctcaggttttttatttcattccggtcaattttcagatttgtgtaactgccagccggattcgggtataaagtacatcccggagtcgttccattgacttcatcaatccctatatggaattggatttcaaaaggttgttgcaccccttcaatgataaaaccatcggtagcggtgttgaaattataagcaacctgcccgatggaataacttacagacccggtcgtgcctgtggcatcattgctggctgtaagaactgtctgctgagcccggattgcctgcgctcccaggagcatcagcaaaatgaaacttaaacaaatagatgaatatttcatttcacaataatttcttgtatgttttctaattcacaatgaaatccggtagcaatttacgacatttttttgaaaaacaaataatttgtatctttcggtaataacttttttgagatgtttgggcttgtaggatggggaaggcaaacttatttacgattggacgatcgtcgacttccgattgaattgtgagattgacgagggttgattgattttaaaatgagaaaccaaacggattccttgcacctaaacaaagagatatcaatgatatgatgaaaggagacacatttaaaattattaattatatttggaggttataaaaaaaggcgacccgaaagccgccttaaatgttttcacaacggaataatccttattgtgaattgcttcaaattgtaatgcaaatataattgaaaattctcaaaagtaatgcttctatgaaaaaaattcttggacttgatattggcacgagctccataggttgggcttttgtattggaggatgaagaaaatgctgaacttaacaagattcaatccgccggcgtaaggatcatccccatgggagatgaagaaaaacaattcatagagggaaaaactgtgacactgaatgttgaaagacgcacttaccgaaccatacggagaaataatcaacgttacaagctcagacggcataatctggtaaaaaagcttatcgaattgaacatgattcctgatgaaaatctacttaagcgaataacggcctttgagctttatggactaagggataaagtcctgaaagagaaaatttccttggaagagttagggcgtgttttctttcatttgaatcaaaagcgagggtataaaagcaataggaaagcgaataaagaaaccgaaacagattttactcaaattattattaacagatcgaaaataattgaagatgaaggaataacagttggtcaatttttttatcaaaagttgttaaaaaacaaggaaactcctgatgcaaattttattattaaaaagaacacatttctcaggcaagattacttaaatgaattcaatgcaatttggaattttcaacgaaatttttatccggaattacttaacgatcaaaatctcattgaaatccgcgacagaatcatatactatcagcgaagattgaaatctcaaaaagggttggtaggtgaatgcagatttgaaaagtttcacaaagtggtaccaaaaagttcacctatatttcaattgttcaacatttattcaaaacttaataacctggcaattgcaagtaaggatggtgaaatcattgagattactcctgaaggaagagaaaaaattctgcttagtttaaattatgttgatcatatctcaaaaacaaaacttcttgaaatgttggattgtaaaccaacccggcattattacataaattttgaaaatttagaaggaaacaagactcgcgcccaattccttaatgtattgacccaatcaggttgtgacactgaaaaaatcaagcaccttcttgcttttgacccaatgtatgcaagacctgatttggagccattttacaaactttggcaccttgtttattcaagtgaggaagaccatcaattgatcaagaatttaatggaggactattcttttacagacatacaagcagaagcaatttcaaaaatcggatataccagtcagcatggttctttgagcgcaaaagcaatccgtaaattattgccatacctgaagcaagggttaaaatatagtgaggcgtgtgaaaaagtcggttataaccattcggattcagagacaatagaacaacgaaacgaaagagtattggttgacagacttgagcaaattaaaagaaatgatcttcgcaatccggtcgttgagaaaatatcgaaccaggttatcaccttggtaaattcaatcatttctgatcctcagtttggaagaccggatgaaataagggttgagttagccagggaattgaagcagaatgctaaggaacgagaagacttaacgaaaacaatcagagaaaatgaaactgaaaacaagcgaattgaaaaaattcttcttgaagaatggggctttaaaaaggtgagccggaaagatatcattaagttccggctttggcaagaaacaggcggagtttcagtttatacgggaaatactattcaaaaatccgaactttatgatactgcaaagattgatgttgaacacataataccccgtgctttgttatttgatgattcattttccaacaaaaccctttgtgaaacttcattgaaccgcgaaaaaagtaatgaaacagccttagatttcatatcttcaagaggaattgatgtgaatgagaattatcgaatatttgtaaaaaagttatttgaagaaaaagcgatcacaagaaccaagtttaacaagctaatgatgaaaaaagaagatttaccggaggatttcattgctcgccaacttcgagaatctcaatatatcgcaagggaaattaccaaaaggttaaaaagtgtttgccgaaatgtggtatcaacaacgggatcagttacggattatctaaggtttgaatgggggcttgatacaatattgcatgaactgaatcttgaaaagtaccgcaaaatgggcaaaacattccaggatactgatcattcgggtaataaagttgagagaatcaccgaatggaccaaaaggaatgatcatcgtcaccatgcagttgatgcaatagtaattgcctttacaaaacagggtatgatccagaagttaaatacgcttcattcaataaagggcggattgcagaatgaaatgaaggattatattgttcagcacgaaagctggaggatcaaagaaccttgtacatcgatccgcccacaggcaaaacgggctgtagaaagaattctcatttcttttaaaacgaatagaaaagtgctaacaaagcatatcaacaagattaaaattcaaggtggtgagctaaaacaggttacctataccccaagaggatttcttcataaagagaccatgtacgggcaaattagacgatatgaaaagataaaacttgataaaaaatttacttcggaattgtatgttttgatggctaatccatttgaaagattcctggttgaaaagcatttaggaaaatacgataataaatttgaacaagctttttcaacaaagaccctgaaaagtgatcctctttatgttgatgaagaaaacaagaaagtacttgaaacaatttcagtttttaaccacaaattcgtttatcgtgtcgcattaaacagatcattcgataaggtcaacgatattgttgatcagggagtaaaaaaaataattcaaaagcgacttgaagaattcgggaatgaccataaaaaagcttttaatgatcttgagaaaaacccggtatggttcaatgatgcaaaaagaataccgataaaaactattcgtgtttttggaccggttacattgcagccattgcatgttgatgaaaatggcaaaccgaaagattttgtgcaaaccaggaataatcaccatattgcaatatatgaagatgaaaaaggaaaccgatacgaaaaagttgtcaccttctgggaagcgatcgaacgcaaacaacaagggatttcaataattgataaaaatccacacgctgaacataaattcattacttcaatgcaggtaaatgatctttttgtatttaaccttgatccttccgagatagatttttataaagaggataattggccgttagtcagtacaaatctttacagggtgcagaatttatcaaatagtgactatagtttcagacatcacttggaaaccacactcaaaaatacagctaccaagattaggattcaggatataaaaaaaatgaatggagtaaaagttattctggatcattttgggcgagtaattcaattaggagaaaaatgatcaagcgtactttatatttcgaaaatccggctattcttacaacaaaagaagatcaattagtgatcacattggttaaagatcctgaaataccggatcaggtaaaatcaaaaaccatcccgatagaagatataggagtgattgtgttcgacaataagcagattacttttacgcatgcccttttgaataagctgattgaaaataatgctgctgtgataacatgtgatgatcaccatatgccttcctcacttttcatgcctctttcaggaaatactatacaaggcgagcgatttgcagaacagctcaatgtcagtgttccattacagaaacaactttggcagcagacaatgcaggctaaaatcctgaatcaggcctggcttttaaataaagcaggtttcgaaacagaatacatgaaacaatgtgcccggaatgtgaaatcagatgacttggaaaaccatgaagcacgggcagcagcctattattggtataggattttttcaaaatttcttgatgactttaagagagggagggaagaagctgaacccaataatctgctaaattacggatatgctatcctgcgggccgtcgtggccagaagtcttgttgccaccggtcttatcccgacattgggaattcatcaccggaaccgttataatgcgtattgccttgctgatgatatcatggaaccctatcgaccgtttgtcgacgagatagtctatgatattattgccgggaaacccgggaattttgagctggatcccggtatgaaaaagcggttgcttacaattccggtgattgatgtaatgatcgacggacaaaaaagtcctctgatgattgcgatgcaacgaactgcttcatcattgtttttttgtttttcgggtgaaaaacgaaaacttttatatccaacctttgactgacagtcaattcaaccaataccggattatgtgggttcttgtattctttgatcttcccaccgaaaccaaaaaggacaggcacaattatgcagttttccggaaatccctgaaaaaagacggcttcaccatgtttcagtattccatctatactcgatgttgcccaagccgggagaatgcagatgtgcacattaaacgggtaaggaaaatattacctccggaaggttttgtgtgtctcatgacaattacagataaacagttcgggatgattgaattattccgtgggaaggaacaagtggaaggagaaaaagaacctcagcaacttgagttgttttgaaatataacaaaatcattctataccggaaagggtttcaataaacagttcgccgaactttttcaagcacattttgaaagtattgattatattgacctacatattaaatatatgtgtcctgcttgcgaatttaggtaaggttcaggtttttttcattgtaaatccctttagggattaaatatgggtagcaaaatggttgggtgatagatattacgtcccgtacgggacgagataaatttctacgttcactgctttctaccaatattttatgcctggcggcataatccctgaacaaaattgaaataaaaaaatccctctccaaccctggaaagggatccattgaacacatatttttcattccaattatctacctaattgcttggtttttgacgctttaaacacaggtatgctgtgttcaatatgtcaaagatacaatctgaaagcaattcacaacgtaaacggctcagcgcacgaatgaaaaagggctgtgttcaatatgtcaaagatacaatctgaaagcaattcacaacaccagcgaagctggcgaattcttctccgaagctgtgttcaatatgtcaaagatacaatctgaaagcaattcacaaccacttcagatatggggacgtgaaaacaatgctgtgttcaatatgtcaaagatactatctgaaagcaattcacaacatcaactcctgcacctaccggatggacacgctgtgttcaatatgtcaaagatacaatctgaaagcaattcacaacaaatgctaaggcggcgctttccgttgctggctgtgttcaatatgtcaaagatacaatctgaaagcaa

SEQ ID NO: 3731 - DNA, 23621 bp, synthetic construct
  misc_feature 1..23621: note = Synthetic
  variation 14925..14978: note = note, n is a, c, g, or t
  source 1..23621: mol_type = other DNA
acgcgaagtgacgcaaagttttttgaagtttttattcctgcgtttctaaatatcaggacaccctgtattatcgtcattgcgagcgactgaaaggagcgcggcaatccacaatacggtcactggattgcttcgttgcttacgctcctcgcaatgacgttttttgaatcaatttataaattttgccagagattagaccagtgcttccatgaaatccgtgacgttcatatcttcaagataggtctggtcggacattatggagaggattttatcggcatgtccggcatcataatgacctttgaaatattcgcgggctttggcttcgatcagggggaaaccttcggcacggcagcgtttgtggccaacaggatattcgacttcaactttttcggtggaagtgccgtctttgaaaaaaatctggatggcgttggcaatggcgcgtttctcaggatcataataatctcgggtataacgcgggtcttctatgacatccataaggccgcgtagcctgtcaatttgcgcattggccgcgacatcgtcctcataatcctcggcgcgcaggctgccttttaacaggccaatggccacaatatattgcaggcagtggtcgcggtcggcggggttattcagtgcccctgttttactgatgatgcgaatggcaggctcctgcgttgtcaggactattttttcgatatcatccagacgtttactgacgtgcgggtgcagtttcaaagcgcattccacagccgtttgtgaatggaattctgccggataggaaattttaaacaggatctgctccatgacataagagccataaggccgttcaaatttaaattcattgccaccgaacaggacatcataaaaaccccatttgggcgcactcaaagcagagggataaccaatctcgcccgccatgacaatatgtgccagccgtacggcgcggcttgtggcatcgccggcggcccagcttttacgggggcctgcattgggcgcatggcgataggtgcgcagcgcctgtccatccagccacgcatgagaaagtgcggcaataatctgctctttcgttgcccccatcatatgggcaacgaccgccgttgaagcgaccttgaccagcacaacatgatccagccccacacgattaaaagaattttgcagcgcaaggcagccctgaatttcgtgcgctttaatcatataggtcagcacgtcgcgcatggtcagtgcggctttgccttcagcagcgtttttctgtcccagataatcggccatggccagaatcgcgcccagattatccgaaggatgcccccattctgccgccagccacgtatcgttataatccagccagcgtaccatcgcgccaatatcaaacgcgcctttgatcgggtcgacaatatggtctgttccgggaacacgcacgccatatttcaaagacattccttcaaaagaatttcctaacagcttggtacaggaaggaaatttcaaagcaagaatagcgcaggcaaggctgtccatcaaatcgtaacgcgccgtttcgtatgcctcctcgctggtgattttataatcacagacataatcggcaatgtcggttagaaccctgtcaaacgccgggcgctcattcacatcgacattttctttcattgcggccattcccattttttattccttgtcaaaggttgcgctgatttctttaccaccgatattgatgctgactttttctttccggttttcctgatacagaaaatacgcggcggccagaacagccacaacaagaaccgcgataagtatgtttttattcattttaggtctccttttttatcagcttagatatataggattatgaaacgcaaaggacacgaagtcacgcaaagtttttatagcgcctgtaagcaatagagaagaatcactttgcagcctttgcgtttcaaattttaaactcatctattttcaagcgttttgtaatcccgtgttgccggcccggtataagcggcgttggggcggatgagtttattattttcgcgctgttcaaaaatatgcgctgcccagcccgtaatacgtgacatcacgaaaatgggggtaaacatggccgttggaattttcatcatgtgatagacggaggcactgtaaaaatcaagattggggaaaagatgtttttcatcccacatcagggtttcgatggcttcggagaccgcgaacaactcctgtttaccgccatcctcgcataaacggcgtgaccattccttgatgacacggttacggggatccgcttcggaatagacacggtggccaaaacccatgacaagctgctttgccgccatcatgtctttcacgcctttttgcgcgtcttctgctgttttgaatttccggagaagctccattgccgcttcattcgcgcccccatgcaaagacccgcgtaatgccccgatagcacccgtgaccgcgctgtaaaaatcggacagggtcgaggtaatggttcgcgccgtaaaggtcgaggcattaaactcatgctcggcgtaaagaaccagcgagacattcattgccctgatgtgaagatcagagggcttgtcacggtgaagcagtgtcaggaaatgctccgccacaccggaaccggtcacgcattcatgacgttttccggtgtgggcaaaatgccaccaatagacaagaatcgccggataggccgcgatcaggcggtcggtaatggcatactggctattatcatcattttccggttcgattgttcccagaaatgacgtggcggtgcgcatgacatccatcggatgcgcctctttgggaatcagttccagcatgttttttaaggattgcggaatatcgcgggcggctttgagtttatttttatagccttccaattcggcctttttcggcaattccccatagaccagaagataagcgacttcctcgaatgttgcctgctctgccagatcatagatcgaatagccgcgatattccagattatgcgcaccgcccgcagcagatatctgcgtttctccggccacaataccggcaaggccgccggttttctttttagaggcatccgtttttatggctgtctgtgtcattttttactccgtttatgcttttattttatttcccaaacaacttatccagtttttcctcgtaagtcgcgttatcaataacgtcataaagatcagcgcgggtctgcatcagatcgacaacatttttctgcgttccgtctttgcggatggcattgtaaacggtttctgccgcttttgccatggcacggaaagcggaaagtggatagagcgccatgtcaacgccatgcgcgcccagctcgtccaccgtatagagatccgttttgccaaattcggtgatattggccagaagcgggacttgcaccgcatccctgattttctgataatgagcaagatcggtcatggcctcggcaaagatagaatccgcgccacattccacgtaataggcgcagcgttcaatcacgccgtccagcccttcggaggccagcgcgtcacaccgcgccatgacgataaaatcgggatcggtttttgcatctatcgcagccctgatccggtcgcccatttcctctttgctgaccagttctttattgggtctgtgaccacagcgtttttgcgcaatctggtcttccatgtgcacggcggcaacccctgcccgctgcatttccttgatggtgcgggcaatgttaaatgccccgccccagccaacatcaatatcggccagtaacggaatatcaaccgcgccggtaattttgcgcgcttcctccagcacatcatgcagatcggtaatacccagatccggatagccgttactggcataggcgaccccgccaccggaaagataaacagctttaaatccggcacgctgcgcctgcatcgcgctataggcattgatcgcgccgacgatctggagcggggtttctgtttttaaagcgtgctgcattttttgtccggcggtattcatgctaattctttctgttgcaaggcgataaaagagaaaatttacaatatttacgcagtttttctttcattctgcaacaatttttcctatcacccttccgaggacggaaatcggcatcttccggataaacacttgaaattttcttcaatatatcctatattcccattgggaagcggcgcgggcggttggttcgccaacccggtcagggtcgaaagacagcagccgcaacgaattttaccgggtcgtgtccgctttccacttttaataaatcttccggttatcccgcaaaaatatataaattcatgacggactgattgcctgcgcaacggaatcccgctacatatatatctatgtcagaagaaaagcagaccccgtaccgcgttctggcgcggaaataccgcccccgcaatttcagtgaacttgtcggacaggatgcgctggtgcgcacgcttaaaaatgcgattgaaagcgggcggattgcccatgcttttatgctgaccggcattcgcggcacaggaaaaacgacaacagcacggattattgccaaggcgctcaattacaaaggcgcggacggcacagccggcccgacaacagaatcaaccgatgactgcgaactctgcaaagccattaccgaagaccgtcaccctgatgttctggaaatggatgccgcctcgcataccggtgttgacgatatccgcgatattctggacggggtacgctatgccccaacagcggcgcgttacaaagtctatattattgacgaagtgcatatgctgtccaaggctgcgttcaatgcgctgctgaagacactggaagaaccgccggaacatgtgatttttatttttgccaccacggaaatccgcaaagttcccgtgacggttctctcccgctgccagcgttttgatctgcgccgggtcgatatcccgactttaacagcgcattataaaaatatatgcggtctcgagaatgtcgagatcgaggatgaggcacttgggctgattgcccgcgctgccgatggctccgtgcgggatggcctgagcctgcttgaccaggccatttccctgtgtaacggcattatcatcaccgcgcagcaggtacaggatatgctcggtctgacggacaggacactggttctggatattcttgaacatgccctgaaagggcaatgcgacaaagcgctggatatggtggccgatctttatttcaagggcgctgatcctgccgttcttatcagtgacatgcttgacttcacccatcttttaacgcggattcgcgctattccccatatgaaggaaacccatggcgctctggccaaggagacttttgaccatgccacggatctggccggaaagctttccatgccctccctcggacgcgcctggcagattctgctcaaggggctggccgaagtccatagcgctcccaacccgcaggcagccgcagaaatgattattattcgtctggcctatgccgccgaccttcccgatccgggcgaactcatcaaaaaaattaaaaaggagcagcaggcaggcggccatacacaaggtagcccgtctagcgcagcgataccccgcacgccggagcctgtcgcacggatcacgagggacggaaacggatcacaggcagtggcggctctgtcacaacagccgcaggacgttaacgcgcaggaaatccggagccttcacgatattgaagacctgctcagggcgcacaaggatatgattctggccggacagctttatcaatatgtccatcttgtcaaattacagccgcgtctgcttgaaatcgcgctggagccggaggccgataccagactggcgcaggaactgaaacaacggctgagcgaaatcacgaacgagcactggatggtcagtattgtgtccaacacacaaggcgcccctacgctggcacaacaggtggcacaaaatgaaaaagcacgtattgacgaagccatcgcccatcctgtagtgaataagatactggaaatttttcccggcgcgacggtgaaagtgcgccctataaccaaagaggaataaaatatggatatgcagcagattatgaaacaggccaaacagatgcaggaccgcatgaaggaaatgcaggggcagcttggtcacatggaagtgacaggagaggctggcggcggccttgtcaaggttctgatgtcctgcaaacgcgacctgaaaaaaattgaaatcgcgccggagcttatgcttcctgacgaacgcgaaacgctggaagacctgatcgttgccgccatcaatatggccggacagaatgccgaaggaaaaatggccgaagaaacccagaaaatgatgcaggaattcggccttccggcaaattttgaacttcctgatttttaagggcgggagaataatggaacagaaaaaaatatagtcacctctgcaaaacgctattttcgtcactccggcgcaggccggagtgacgaaaatagaaatatttgtacaaaaagctgctatcggggacttttgcagagcttcctataaaagttgccctaaggccgtcattgcacgcttcatgcgtgtcatccatcataataaaaagcacagaagaaacgggaatggatcacctgcatacgcagatgatgacggtttatcaatgataccgcctaatttggtttacttaatggtagcaagctcaaacgagccttctccattttttcttcacttttttccgctgcccagcgagatactatcattgaaccacaaaaaacacttgctgcaatatctaccgtcgatggttcaatagaagcactcacaaatgcaagaattcccaaggcaaagctggcattagaggccatatcccatctttttgcttccgcagcaaatttagcagagatattttcagcgttagcaaagttttcttcagaattactcatatttttcattccctttaaaaatattaattattcataaaacactaacataatcatgtcaatgtttttaatcacgctctccctaatcctgacatggatcacctgcatacgcaggtgatgacgggcgcaggtgatgacgggatacgggataaaataagcgatgaaattatacagtcattcttatcaagaacaggacatttccgtcatatccgcgtcggcggatatccggagagaataaagtgtgccgcgatttttgacgggcttccatcagccccctgccccagcattttcctgacttctgcaaaagcagttttctgattttcgatggcaagggtcttcatggcttgcgctatcttttctgccttgcagtgttcctgaatgaattcagggacaacaggatgatccagcagaatattggcaagatgaaaatgcctgacgagaattttgcgtttgataatggcggcggttagcgggctggctttataggcgacaacatgcggcacatcggcaaccgccagctccagacccaccgttcccgaagtggcgagcgccctgtccatgactctaaaacagtcccattttcgggtatgatccgtcacaatacgggtttcacagggcagaccctgcaagaaattggtcaccattttctcaagatgcggaaatgtcggggacaggatataaagcgctttattctcagccgcaagtcttgccacgacttcgcgcaggacggggcctgtacggttcagctcgctgatacgactgccaaacagaacccccagcacgggggcattctgcgggatatccagttcctgacggattttttcaacatcaggatgcgccacatatttctcgagtacgggatgtcccgcaaaaacggctttcatgccttcccgttcaaaaaaaggcggctcgaaaggatacaggcagatgatcccgtcatagagtgcggcaacttttgcggcacgctccggtcgccacgcccagaccgtcggcgcgacatagtgaaacatttctggccgatggatcgcccgttttttgagagcggtggcaacgcgaaaacagaaatcaggagagtcaatcgtcacaaggatatccggtttttcctgctcgattttatgaatggtctgtttcagtctgcacaggatttttggcagtcgtggtaaaatctctgtaatgcccatgacggaaagatcgctcatcgggaaaaagctggtaaggccttcttccgccatcaggacgccgccaacgccgatgaaacttacggatctttcgcccgcctcctgtttcagggaggccatgagttctgcccccagcgcatctccggatgcttctccggcaataagggcgatttttaaattactggtcatggccccgggattccggatcaagagcgattacaaaaattttatggtggtctgccagtgacgccacatcctgcggatttatcagcaggcttcttccggcctgtatcacaatgcccgacacaccattttcagcgcacatgcggacggtctccacgccgatcgagggcaggtcaaagtcacgatcctgctgcggcttgcatgttttcaccagaagagcgccccggcttccgtgacgctgataaagacggcagcgttttatcagttcgtccgtgccttcggcggcttcaacccccagaacaataccatcctgtatgattacggactgcccgacatcaagctgccccagcgtctgtgccacggcaaggccgcgttcaatatccggccagtcctgttttttcggcgcaagacgtccgacctgccccgcaacggcaaccagatcatccacaaattcctgcaccccgtgaatcgtaaatccttctttttcaagttcgtgccgtacagctttgagtagagtatcatcccccatggcacggagccccacacgggtaaaaaactgcgccgtccgcaaatccggtttcagccccacaaggccggggcggcggacagaaccaatgaacacaaggtctttaatatcgcgggaacgcagcgtccggataatctgccctgccgcgccgatgcgcgtcagcatagaggggcggtttttcaggatctcggggtctgtctggccttcaaaagcaataacaaaaacatcctgcccggctttatcgcaggcatgaagaagaagctgcggaacgattccgcctccggcaatgattcccagtgtcgggatagtctttttcaggctgcttttctctctgcttttctctggggctggcataacggaaacctggttttctcacgggcaaattttacaacatccatgaccagttgcataccggaaaactccgaggccacagtttcaatccgctgctcgaacgtgccattttcatcaaacatccggttaaaggcacgttgcagcgttttaatatcatcctttgtaaagccctgccgctccagcccgatcaggttcagacctgccagaaacgcgcgctcgcccttgacacggccaaagggaatgacatcgctttccacaccggacatcccgccaaccatcgcataagcgccaatgcggacaaactggtgcacgcccgacagaccgccgatcacggcaaaatccccgacatggacatgcccgcccagcgtcgcattattggccatgatgacattattcccgaccctgcagtcatgggcgacatgggaggccaccataaacaggccattatccccgacaatggttttcatcccgccgcctctggttccgggattcatggtgacatgctcgcggatcacattattttccccgatgaccagcatcgccggttcgccttcgtattttttgtcctgcgtccgtgacccgatcgaggcaaaaggaaaaatctcggtaccggcgccaatcgtggtaatcccctccagcacgacatgggaatggatgttcacattatcgccaagggtgacctgcgcgccaacgattgaatacgccccgatccggacattattcccgatctgcgccccgctcccgataatggcggtaggatgaattgtctgggtcatattttttccggatcattactaaagatattgatattgccggaagtatagagcctctgcaacatcaagacaaatcacgctttattgcgaaacatttcagggattctaaagtcattgccctcctggaacgaagatgcccccgctgggcaaaccatacgggggcaaaaattatgcgtttaactttagggatttaaccccacgggggacgcgacccccttatcatagcaacgcgtccgacacggttatactatgtattgagaaacaacttgcaactttgtactgtataagtcaagacatatatatggttgtaaaaaaatttctatggggaaacagtttaatgacatatacacttggaattgatattggcattgcctccgttggttttgcgggcgtcaatcaggatcagaagaaaatcctcttttgtggagtacatatttttgaagcggcggagaatccaaaagacggggcatcgctagccacaccccgccgtgaaaaacggggtatgcgccgcgttaccggccgccgcagccagcgtaaaaaacaaattcgcgccttactggcacgccatggattaaaggatattgaatccatagacctgtcaaaaaaagaagcggtcactctgtcaccatgggaattgcgcaaagccgctttggagagaaaacttgaagatggagaatttgcccgtgtccttttccacatcgccaaacggcgggggtttcagtccaataaaaaaggcaataccgaggaaaacgataccgaaggaaaaaaggttatcagcggggcgatagagctggaagaaaacgcctttaagtcaggcgcgaaaacgatagccgcttaccttgccacccagccaaaaaagcgaaacggtgatggggactatacaaattccattaagcgggacgcggtgcgcgaagaaatcaaacttatttttgaatcccagcgcaaatatggcaatgaaaaagcaacagaagaattgcgctttgaatatgctggaagcggtaggaaagaggaacgtaatacacgcgaaggggatggaattgcctttttccaacgtccgcttaaatcgtctgaagaacttgttggagaatgtacttttgaagcccccgaaaagcgcgcccccaaattttcctattcagcggaattgttcgtaatgtggtcacgtttgaataatacgcgcataaaatacaaaaatggccatgaccctttcctgacgcaggagcaaaaaaacaaactcgttgatcttgtccataaacaaaaagaggtcacctataagcaggcacgcgaaaagctggatttatctgatgatgaatctttcaatattagctatcgccaagtaggcgaaaatgatgatacgccagaaaaaaaacgagcaacagcagaaaagcgcgtattcctaagtctggctggataccatactttaaaggaagcacttagccccgatagcgagcgtgattgggatatttggcgcaaccaacgccgagacgatctcgatgatattgcgcgtgtcgtgacctatgagcaggatcaggacacaaggcaatccaaactgacaaaatatgatttaatagagacacaaatacaacacctccgcaaaattgagcatttcagcaaaactgttgatctgtcattaatggctatcaaaaaaattcttccctatatggagaaggaagttattaccgaagatggtgagatcatacatggctacgatcatgcgtggagaaaaatttacggtaaaccagaaaacaaggctttggagcttgttccaaaattcaaagatattcctaaccccgttgttaatcgcgcccttgcccagacgcgtaaagtcataaacgcctgtatacgtaaacacggaatgcccaaaaagatcattgttgaattggcgcgcgaagtcggcaaacccatgaatggatattgggtggacaaaaacggtaaaaagaaactcggcaaaggcaatgtgaaccatggagaccgttacatcaaaggtcggagggacattgaaaaagaacaggcgaagaactgggaaaagagaagaagcgcggcaatagctgttgcaatagaattagggattaaccctgatcttgtctctggcggtgatattctgaaacaccgtttatgggaagagcaaaggcacgcctgtatctattgcgggaatataatcggtgcagaaaaattcaaggctgctgacgaaacacagatagatcacattttgccttatgctaaatctcacgacgattcgtatatgaacaaggtgcttgtccataagaattgcaatcagataaaaggcgatagtatcccattcgaaaaatggagcgcggacacagcgcgatgggaaaagattgttgcgtgcgcttccgtcctgccaaaagataagcaagagcgtattttgatggaggaattcgacgcacgggagcaagggtggaaagaccgcgccctaaatgacacgcgctacatggccaaggaattacgaaatcatttgaaagataatcttgcctgtaaagttgatgccagaaacggtgcaatcacagcacatctgcgcggtatttggggatttacggatgagaaattaaacgaaatcatcaatattctttcatctgataaggatgagaaggatgtaacaaagaatctttcttcgctgggtttgcaggattatcatgttaaagctgccctgcggatcagggatatggatcaggccaatctaaaaaaagcactacgcgggcttatcaattacaaagaccgcaccaatgaccgccatcatgctttggatgcgattgtgattgcttgctctacagaagctatggtgcaggatgttgcaaaacataatcgctataacaaagagaaaaaacattttcctacaccgtggccagatactttccgcgatgatgctttggcggctgtctatggtgaagaaggcgaagatggcattcggcgtggcgggattttcgtctcccgtatgccagtgcggaaaatcagcggggcggcgcatcaggaaaccatccgcagcattcgtaaaccggacgggaaagtgatccagcgcgtgaagcttaaatcgcttaaactttcgacactggaaaatctggtggacagacagcggaatatcaaactttataatctcctgaaagagcggctggaggcgcatggagacaagccggaaaaggcctttgcggaagtcatttatatgcccgtgaacgacccgtcaaaacccgcgccgcgtgttaattccgtgcggattgaaacgaacgagaaaagcggaattatcatcaatgaaggcttggcctccaacggggatatggtgcgtgtagatgttttccaagtgaacgggaaatttcagcttgttcccatttacattcaccattttgtacaaaagaaattgccgaacagagctatcattgctttcaaagatgaaaaagactggctggaagtttcggatgaagattttattttttctctttataaaaacgatctggtcaggattaaaagcaagaaagaagattttcttggctattataatggaacacaccgtggaactggaaacattaacatacgtgcgcatgatagcgacccctcttttggcaaggaaggcgttaaggaaggcgttggcgttaaaactttattagcttttgaaaagtattctgtggattattttgggaataaacacaggatagtaaaggaacaaaggcttggcgtggcgcagtgtgatgatccagaatgcggcggcgctgtccctctcgaaggggcagttgaagctgcagaatgacgagggggcgtttacgcttcccatagaggacattacggcccttattctggaatcgccgcaaattacgctgtcttctaccctgctttccgcatgtcaggaacacggcgtggccgtcttgacctgcgatgccacgcatatgcccaacggggcattattgccgttccagccccattcccgccaaagccgcgtggcgcatctccagatttcgtggacggacgcgctcaagaaccgcctgtggcaaagcgttatccagtccaaaatcaccaatcaggccacctgccttgagcaaactacggatgaggaaaccgccaaacgtctttatgtgatagcgcagcgcgttaaatccggtgaccctgataatatcgaggcgcaggccgcccgttattactggcaacgtcttctgggcgatgatttccggcgcggcggcagcgatatcatcaatgcggcgctcaattacggctatgcggtgcttcgcgcttttgtggcgcggtcacaggtggcctatggcctgcttccgacctttggcatccatcactgtaaccagcttaacgcctataacctgaccgatgatttgatggaggtgtttcgccccttcaccgattatcaggttttttcaatgcgccgtgatggtctgctggaggcaggcacggacaggctttctaaagaagcaagagcagcgctagccaatatcggcaatatcacatgccggattgacggcaatacccacaccatcgccaatgcctgcgacaaaatggcggccggccttgtgaacgctattgaaggcaaaagccccgcgctgcttcttctaccggaatttgaaatcaggaacaaaacacaatgacagcaacaaaggaccggtttatgtggctttttgtattttttgatcttcccgtcaagaccaagccggagcggcgcaccgcaacgcgctttcgcaattttcttctcaaggacgggtacatgatgatacagttttccgtctatgcgcgaatctgtaacgggcaggatcgaacggacaagcatctgcaaagactgaaatccgtgatccccgaaaaaggcagcgtcagggtgatgcagatcaccgataaacaatatgaacggatgaagattcttgtcggaacgaagaaaaataacgagaaaacaaaggccgaacagcttgttctgttttaagctatccggcctttatccttttatttcagcaccttaccgcgaacccatcatagcataaccgtgtcggaagggaagctatgacacaggatctatttttaacatattcaaagggatcatagcataaccgtgtcggaagnnnnnnnnnnnnnnnnnnnnnnnnnnnnnnnnnnnnnnnnnnnnnnnnnnnnnnccgtgtcggaagggaagctatgactctagtaattatttaaggcgtcaggtcaacatcatagcataaccgtgtcggaagggaagctatgactggaccgctgcgcgttgctgggcatcttgatcatagcataaccgtgtcggaagggaagctatgaccaatatggacatggtttttcgggcaaaaaatcatagcataaccgtgtcggaagggaagctatgacccaggcgctacctcaccggtctggtcaataatcatagcataaccgtgtcggaagggaagctatgaccacttttcgcacaccctttaagcttgtttcatcatagcataaccgtgtcggaagggaagctatgacaacgcatcctgcgtcgcgcgccagtcctgcatcatagcataaccgtgtcggaagggaagctatgaccatttcggcccgatagtgagcgggagctcgatcatagcataaccgtgtcggaagggaagctatgactaaggaagtagaatacagaagcctgaatgaatcatagcataaccgtgtcggaagggaagctatgactcagggccaaatagtaaaccggcctcggtaatcatagcataaccgtgtcggaagggaagctatgacccggtgaagaagatctgtgccgcaccggggatcatagcataaccgtgtcggaagggaagctatgacagagttttgatgcatctgtcagtgaagataatcatagcataaccgtgtcggaagggaagctatgacagactgaagacctatatgtaaagggccgggatcatagcataaccgtgtcggaagggaagctatgacgcggtaatagagaagaagtcgcccgggtgcatcatagcataaccgtgtcggaagggaagctatgacttgcgctccatatagttccagagtttttcaatcatagcataaccgtgtcggaagggaagctatgacgaataatcgcctgtcattgattcgtaagtaatcatagcataaccgtgtcggaagggaagctatgaccgtgttgaatctcttgaaaaagaatacaaaatcatagcataaccgtgtcggaagggaagctatgacagggcggcttcaatcaattcagggcgttcaatcatagcataaccgtgtcggaagggaagctatgaccatggcaagggaatggatctcggggaaaccatcatagcataaccgtgtcggaagggaagctatgactttctccgtcataggattgtaaagatctttatcatagcataaccgtgtcggaagggaagctatgacgcctcgcaatgccgggatacaatttctcagatcatagcataaccgtgtcggaagggaagctatgacaagcaagcgcccgtatcctcaacgatttttatcatagcataaccgtgtcggaagggaagctatgactcagcgctattgatggaattgttgatatggatcatagcataaccgtgtcggaagggaagctatgactgttggtgccagcaatatcaaatatccattatcatagcataaccgtgtcggaagggaagctatgacgaggacattgtcaatcgttgtttatgtgaatcatagcataaccgtgtcggaagggaagctatgacccacaaagctgataaaccgcgccgtttataatcatagcataaccgtgtcggaagggaagctatgacagggcggcgcgtgcctgtttcaggcgctcgatcatagcataaccgtgtcggaagggaagctatgacatagaagtagtacggcctttcgcgtctttaatcatagcataaccgtgtcggaagggaagctatgacacacgcggcattcctgttgaggtggggcaaatcatagcataaccgtgtcggaagggaagctatgaccatagcattcttgcggggtgttacacggttatcatagcataaccgtgtcggaagggaagctatgactgatcatccttgcaatctatgaaaacagaaatcatagcataaccgtgtcggaagggaagctatgacagatgaattgggtcgatttccatcgattttatcatagcataaccgtgtcggaagggaagctatgaccgtggggcaatgcaaactttggtgacaaagatcatagcataaccgtgtcggaagggaagctatgacatcgatcatcagggtttttccaaacctgtcatcatagcataaccgtgtcggaagggaagctatgacatgacggcgcggcgatggcgattcccaaaggtatcaagcggggggcgttttgatgggaggggcaaaattacaccagatcatctatatccacctcaagggcttgcgccaatgctttaagcgtggcaacggaccctgtttttttaccggattcgatttcggacaagagactttggcggatcccggatttttcagacagagctgcttgcgaaaggccgcgatagtctctgtacaccagcacagagttttccccgttaatcaggcgttcgaccatagcggacggaaaagtctcttcgttgcgtgtccggtagtaggacagggtatcacgcaaatcttctatttgattttcaagatttgtgagtcttttttcatagctttgatgcaaaccgataagttcctgtgcaaagcgttcgcccgtgttttctgttacatgtgtcatttgtatatttctcccctgtttccgattttaaaaacttccagaatacgcactttggtatccaccgtatacagaacgcgtaaatcaccgaagcgtttccgaaaaccattttccacgccctgcaaaggggcgcgattattgtcggttgcaaaaggattctgtgccacatccttcatgccttctataaccgattttgccttattggccgaaatgcgtcttaaagaccgtttcgccgaatttgtgtatctcacttccatgtttttattatctctaaaagagaagattttgtcaatatattttatctctaaaagagaagatttttattatgaggggacaagatgaccgccttgacaaaaaataacagaaaatcatagcataaccgtgtcggatgggaagctatgactcacggcagcccccccccgcaactctttccaggcacagtgtccactccactacaaaatgagagtaaacagatatggcgttaaagcgtgccggataaaatcgacggtttgaattcttcatcggggttcgattttgcaaatatcaaaatcatgattgacctcaaattttattgccagaggcacagatttgagttggttccaatatgattgtaaaagaaaaaacgccttacggcgttttgatccggatcattgatttaatggagcagtgaagggattcatataaatgaaatagtgaattgatttataaaaataatgttcaattcaaactttcaatatacccctatttatacccccaactgtaaaattttggctatccaaacaatgcttttatatcgtctttccaatcatcttccatcagcatgtgcagggatatttctgcgctgtcatcggcttgtaagcccagcgtaccaacatcaaagggctgatgataataatcggtcagaagatcaaacaggcgggttttgtattccgtgtcatcattgccctttaactgcaatccctttgtttccattacaaacagacggctctcattcatgcaggcgataaaatcaggataaatcttatttctttgccagccctgcaaggcataatcctgccgcgcaaccatcctatgccaccacgtcacggcatcactatccgacagataaagcgcaaaatctttttccagattgttcaggtctttttcaaaaataacttcaaataagctgttttctaccttatcaccactttccttgaacaatttacgttcgttctgccgtgccatgactttcaattcatgggcaatttcaaaattcagcttttcattaccgttggtaatcagacggaaaacaatatcaccgcttttcagcctgtccctgaatatcttttctgaatactcatgcacgcgctgtttcaaatggcgcttcatgctgtccagcaagtacaggcgactattataaatcgcttcgtcactgtggcctttggcgttcagggtttctatggtttccagcaatatgcgcgaagcctgccaaggattggaaattacatccaacaaagggcgagacaggaaagccagatcaagtttcttttcaacccaaacattatgtttctgcgtttttgtaaccagccccaattcgccttgctgatcggctaaatccttctgcttttcaacgtcaatgctggtttccgtggttaggggcgtatccttggcatccagaaaatgctcaatatcaaaggtcaggtcatgccatgggatatggcttagaatatcacggtcataatttatatcgcgccagtcattgccgtctttatgcaggactttgggcaggaaaattttcaacccttcaaatttaccgttacggggtatcaggcgcaattccgccccctgcaaatcggtgttaccatccgcgccttctgcccttacaaattcggaaagcccagacatgccctcatcttccagccctttacggacattatcaacggcggtgtttacgtcctgatcgtaacagaacacataacactgatttaaggaatcaatgctggttgtccgcgcatccggttgacgcaagacacgccctaccatttgcgtcatggccgtctgtgcggtggttttatccagcagagtcaggacataggcgaaggaacaatcccaaccttcctgcaaggcttccttggtgatgatatatttgacggggcatagcggatcaaacaaatcggtatcgcccagttcatcggtttcggatgattttatgcgtatttcatcttccttgaccgaaagacgttccagaaggtaatcccgcgcatccagcgcatggattttctgtccgtcacgctggtctttgcctgtgcgttcaacccgcacaaccataatcggcctgatatagcgcccgtcttcttcctgcaaatcatgggatttttccgccagttccgccaaacggccatgcgccatggtcagggtattttgccaatcgccgttttttgtattgataatgttgatcggcagtttgatcatttgttcgtctttcagatcaaggccggacacatctaccagaacattgctgatatgatgacgcacattcggcgtggcagtcagttccagaatgaaagacgggttaaatccgttcagactgtcccgcgtattttctgaataggctttatgcccttcgtcaatcaccacaacggggcgcagcatcttcaaagtgttcacaaggctttgcttgaccgatacacctgcaaatgcccccgcatcgcccaaatcgtttgtttccagatcggggcaaacgtttagcaaggcgttattggcggtgtaatcatccagttcggggaaaaaactggtatattttccagcatcacgaaagattttcagaaattccttgttattggcgcggttcgtggcggccagccgtaccagcataatgcacaggtaattttcagtatcggccttggtgaatggatcatctttttccaataccttcacacggccaccagaagcccgttccagcgtctggcggtaggggtgttcacgattggccagcgccttccatgtctggcgataaatctgcacggtcggcacaacccaaagcacaagccctgtctgccgcttgaaaaagtccgtctgcacccgcccgacacattccgtagccagaagggttttcccgccgcctgtggggactttcaggcagacatgcgggatagaacgctgccgcgcatcatgacgcggggtgtatgcagggattttaagccccatcggggttttgacacgcggcaaaacggtttcaatctgcttccatgcgtttttcggccaatcacccatgccgtctggaatatccagccccgcatcttcaagggctttaatggccttttccgccttttgctgttcgctatgcaaggctttcagataatcgtcatagcgttcaatgacacggcgctggtattctttcaattccatgggcgttaatcccccatgatgcggtgaatggcatagggtaactggcaataggtaatgcccatgtcagccagttccttttgccccatgaatttatgcgtggcgaaaacaagggcggatttacctgtaccgtcccgcgccgccgatatagatttggccaagggcatattcagggcagaatcgccagaacgtagaaaagccagatcaggcttgtaaatcaaatgcacacggtaattttcagtttcgccaataaaataatccgtgccttgctgaacatcatccagcgataaacccgtggccgtgtaaaacgcataatgcgccagttcattaaaggatggcaggtttttaccgccaagcaaattggcgatattcatttcctgtcccagttcgcagaaggtgaaagagccgcccagcccttcttttagggcttcgtcattggcttccggtacgccgttgataacgcgccgcactcgttcggcggtaacatcgttcgcatactcttccatttctgccagaatgaattttcggttgccgccgtcttccttattcagagccagaacagcatgagcagttgtgccagtgccagcaaatgaatccaatatgatggaattttcattagtggcaatttccagtaatcgagtaatgagtgatacaggttttggaaaatcaaaattacattcgggtaagatggtacgcagcgtctttctactggcatccatgttcatatctttatcaagccaaatagttttaggcttcgttctggtatcttctcccaaatagtctttgcgaaaaatccgccaagtacccgcctgcgtttgctttgcggtcaggttatctttttctttattgaatttttccttgccccaagtccaacaagtatcattgccttccccgtccaaaggtaatgcttcttctttatggtttgcatcctttgtgagtgaaatagccaaagtttttggattgacgtaaattggatagaataaattcggtcttgtggttttattaaaggctctattcctgtttcttaattctatctcgcggtatgctcctttttcgtcttccttgttatactcgcgcatcattctatcatctttttttaagccatttacgcttgcctgttcggtattctttacaaacatcaatacgtattcatgggtcttggcgagaaatttatccaaatgtcggcctttaggattaaattgggtacaaattctgccaacacgattatcttcgccaaaaatttcagaaataatcatttcaagacgatgggcttcatagtcatcaatgcttacaaacaggacgccgttttcagataaaagatcgtgaagcagttgcaatcgtggccacatcatgcacagccatttatcatggcgttccaaatcttcgccatccacgggattggcgctatctttcagccattctttaatcagtggcgcattaaccttatcattatagcaccatccttcattgcccgtgttatagggggggtcaatataaatacagtcaatttttccggcataccgtggtaataaggctttcagggcgtgcaggttatcaccgtgaataatcaaattatcatccagtgagggcttgccgtctttaggcagggattttttcttatcaatgtccagttgtctgaatggcacgctcaaatgatgcgcgtaaacaaattgctttcccttaaaatccagtgacggcatatacaaactccctttggtgaaaagcaccgccaagagcgtcaacctctttggcggcacgggagtttagaaccatgaatcccaagggaaaatggcgcggcagtctttagccgcgaagcctggacatccagtgaaatgcgcgaacgcataacaccactgtcgccccccggccataaaaaggacggaaagcgacatgttcgtggcacatgtctgccacttgggattcaggggttctaaagccccaacctgttttgactgcaacaggtcggtttcataattgtacagtatcggacaaaactcaatagcacattgaaaatacgcccgttttttataggcattatgagattttaatgccggatatgattttgcgctgttctgccacggacaactggccataactgcttaatgtcgtgtctatggatgaatggccgagattttgccgcacggcgttcaggaaggccggactttgcgtttcagcataccgcgccagcgttttacggaaggaatggggcttgatatattcaaatccggcgctttcaaaggcgcttttgaatatatccctgattgtcgtgtccgattttatttcctctttcctgattttttgttcaagcaggtttgtctttgtaaaatggttatcaattttgggaaaaagcgggtctgcatccttaaaccccatcgagcgcaaataatcacgccactgaatgacgttggcaataatgtcatcggtcagagcaatgaaaaccgcataacgtgttttggcaaattttacgctcatgcttttggggcagacatagataaaatactgcccgtcttcttccaccaaatttttcatttttaccgttcgcaattccgatatacggagtgtgcaaagagcttgcagtgacacaacggccttatcccgtttttccttgtctgtcttatccggcattt

SEQ ID NO: 3732 - DNA, 23153 bp, synthetic construct
  source 1..23153: mol_type = other DNA
  misc_feature 1..23153: note = Synthetic
gtatctttatagaaacgaataattgcgcccttaggccctgcatcaagttgcatcacacctgcccgtttgcaatacatcttgatccgcacaatttcgagcagattattcacctcgtcaggaagagaaccaaaccgatcaatcatctcggccgcaaatccatcaacatcctcatcggattccaaatcacccaaacggcgataaaggctcattcgtgtactcaaatcggaaacataggcctcaggaatcagaaccgacataccaaggttaagagttggactccaatcccctgcatcttctatgaccccgtcaacccctgcacgcgccgccgccacagcgtcttccaacatttgttgataaagctcaatcccgacctcacggatatgtcctgactgcgcatcccccaataaatttcctgccccacgaatatccagatcatgtgaagctagttgaaatcctgcccccaaactatccagagtctcgaaaatctcgagccgcttttgcgcatcatccgtcaagcgttgattgggcggataaatcagataagcataagcccgaactttcgatcgcccaacccgcccgcgaatttgataaagctgggacagtccgaacatatcggcacggtgaataataatcgtattggctgacggaatatcaaggcccgattcaataatattggttgccaataaaaccccgtactgcccatcatagaacgcattcatccggtcttccagctctgtcggagtcatttggccatgcgctgaaatcactttgacttccggcaccaattccttgagctgttcttccagctcttccatatccgcaatccgtggacaaacataaaaactctgaccaccgcgataatgttcgcgcaaaatcgcctcacgcaccaccaaaggatcaaacggcatgacaaaagtccgaatagccagacggtcaaccggtggggttgcaatcaaactcatgtcccgcacaccacttaaggccaactgcaatgtcctcggaatgggtgttgcggacagtgtcaacatatgaaccgaatgttttaaatctttaagacgttctttttgcttcacaccaaaacgctgttcttcatcaacaatcaccaatccgagattagaaaaattgacatctttggataataaagcatgcgtgccaatcacaacccgcaccgacccatcgcgcaaaccatctttgacaacccgcgactcacgtgcattcacaagacgagagagctgctcgacccgcaaccccatctcggcaaatcgcgctctgaaatttgaaaaatgctggcgtgcaagcaaggtcgtcggcgcgacaatcaccacttgagttcctgccaaggccgccacataagccgcccgcaaagccacttcggttttaccgaacccgacatctccgcacaccagacgatccatcggttgccctgatttcatatcggataacgtatcatcaatcgcccgcaactggtcttccgtttcctgataaggaaaccgtgaaacaaattcattataatgcccatgatcgatatccagcacctcggcatgatgcaacagccgcttggcagcaatcgccaatagcccttcggccatcaccatcaaatcttttttaacccgcgcttttcgcgcttgccagcctgccccgcccaatttgtcaagatccgttccttcggcattaccgaaccgcgacagcaaatcaatattttcaaccggcacaaacagacgatcaccgcccgcataagtaatcttcaaacaatcatggagcaaacctccggctttaagtgtttcaagcccttcaaaccgcccaaccccgtgatcgacatgaacaaccagatccccgagattcaacgcagacacttcacgcaagaaattatcggccttacgtttacgtccggacttgcgcgacaaccgatcgcccagaatatcctgctcggtcacgactgccaaatcattcgccacaaatccgtgttcaagatgcaacaagaccgccccgacctgaccggatttcaatcgtgaaacctgatgccagctatcaacaggatggggtagacctgccccgccctcttccatcatcaccttcatccggtcacgtgatccttgcgaataacacgccaccaaaatcttacgcccatccttttgtaaggacgcaaaatatttgccgacctcatcgaacaaatttccttcggacaacgcccgcacatcagcaaaatcccgcgcccgccgcgcatccggcaaatcatcaactttcggctcagaaaaagcagaaaggatcagcggattatacccacacaccaaatccaaaaattcgtcatccgacaaataaagttttttaggcggcaaaggatgataagccacccccgtcaacgaaacatcactgccattctttttttgtttacgagccttaaacgagtcatcaagggtcatacgggcttgatagaaatccttgatttgtaccagacgctcaccgcgagactgctcggattgaaaatcaaatgataaaattggcgcgaccacataatcaaagagcgtttccatacgttcatgaaacaacggcaaccaatgctccatccccgcatgacgacgaccatcagaaaccgcttcatacaaaggatgattggccaaagccacaccaaataattcacgataccccgcacgaaaacgggcaatactcgcctcatccagaaagaattcagtcacaggacgcagttcaaaccgatccagaataccagttgtcacctgtgttgacggatcaaagctgcgaatgctctcgacctcatcaccgaacaaatcaagccgcaccggattttcataccctgtcggaaacatgtcgataatgctccctcgaacggcaaattccccttgctcacgaaccgtatcggttcgcgcatacccgttgcccgccaaaaatgcataaagctcctgatctttaatccacccgccgaccttggcaaccagatgagcagtctttaatgcctcttgcggcatcactttctggatcaccgcattcaccgtagtcaaaacgatgcgaggtttgaataacccgtcctctttccattccaaaagacggcataaggatgacacgcgctgcgcaaccagatcgatatgcggcgacacacggtcatagggcaaacaatcccaagccggaaattcgacaatttcaacatcaggcgaaaaaaaccggatcaactccgccaaagacgataaccgcacatcatccagagccacatgaatcaaaacctgtttttgacgcgatgcctccaaagctctcgcggccaaaaaacgcgcatcctgcccttctggcaagccataagcggttttaaatcctgtttgggtctcttgaattttgatctgttcggacatcatgcccgattatttggcaaagctatgcgataaaagcaagtccagaactggagaatcgagctcttgaggcgctttttttcgcgcagagatccaatcatagacatctggatcgttattcataaggatttcttcaaaaacagtcagatcttcggcctcaaaacggttaatgtattgttcggcaaaagatcccattaacaagtccatttcccgcgtcccacggtgccatgcccgaaaagtcaggcgttttcgccaattttcaacggtttcttgtgtatcgacttgagggcgatttccagtcataatatctcctgattattttactaatgaggtactttatgtcagttttagcattcatcaaggaaaatcgtgttctggtcgcaggaataactctcccgcttttactggttggcttattagcctatgcaaaaacgcttcccggaaaaaacgtccccgaccctcaatataaattggtttacacaagccagacatggaatggccaaggaaaaatatactttgatattgatgacaacgggattttaaccaccgagttcaagaaagcagacaacccaagccaaaataaccaacaggtcaaggcttcgatctatatttacagccccaaaaccagcacaacagacacaatcgaaattaaagtttcagatgaagacgcaaaactggaaaaaacaacattatctgttcccgaaatgaacggagtaaaattttcttcaaaaaccatctcaccggatggttatgtctttgaaccctaccattacaaaaatcataccctcatcaccgatatttttatttcgtcatcacgaaactatggcccaaacctgaacaaggacgggcgttatatctcactccctcaagccaacccctattacgggaatcttgaatttttaggatggattatcgaagacaaagtacaaggccaataatcatgacacaaccgaccaccccccaccaaacgcgcgcgcaatctctcgatcaaatccgcacattaattcgcatgcacgacttaaaaatggttgatttatttccgttaatagacacagaaacaaacactgaaaactcaggaaatatgctccaacgcgtcatgatctatatcggcagcgcgttcatctttatgggcatctgcgtctatatcggcatgatctgggatgatatggacagcctgtctcgtgtgattttgactttgggaagcggatttatcgcctttattcttggtctatttgccttgggcgataaaaaattcgacaaagcatcaaccccgctttttctggtcgcatccgctttagaacccacaggtttattcgtttttatggatgaatacctaccacacaccggagatattgccaaagccgcaatgattgtcttcgcctttatggccattcaaaaaacagtcgcctttagcgcaacaaagaaaacgtccctgctcttcttctcggttctgtttttcttcgcatttttatactccctgatctcatggcttgatctggatgaaccatccagcgtcatgacaatggggatcagtatgttgatgatttcatgggggattaccagaacgaaacaccacgccattaccccattttattatttctggggatcgatcatgacggcggccgcgtcttttgattttctgaaagactcaccgctcgatatttttctgatcggtgtatcagcaaccattatttacctcagcactctggcttccagccgcactcttttaacaattggagttctatccttgctggcctatctgggatatttcaccgatgaatatttcaaagatattgttggctggccaattgccttaatcgttttaggcctgatgatgatcggtatcagcgtttttgccgtgaaattgggcaaaaaaattgctaaacaagaggcatgaccaccaaaatcaaccaacgcccgtttattcttgacccgcttttccgttcactcgggacattgaacggcgtggggccaaaatatttaaaactctatgaaaaacttttgggtggcacaaaacttctggatctggtctttcataaaccatcccaattggtcgaacgccattttgtagacagcatcaaagacgcaaaaccggatgataccgtagcccttactgttacaattgataaacacactccatccccgcgcaaatcacagccctatcgcattcgcgcacgggacaaaacaggctttatggagctggtgtttttcaatgcccacggcaactggatcgaaacccaattccccgtcgaaaaaacagtcacgatttgcggcaaaatcgaagattttaaaggccagaaacaaatcatccaccccgaccttctcgacagcgaccaaccggaaaaaaacgaagtcatttatccgctcacagcaggcctgaccaccaaacctctgcgtaaagccattcttgccgctttggaacaaacgcctgccttacccgaatggttggatgcatcccaaaccaaacagcaaaattggccagactggaaatcagcccttctgaatttgcacactccccaaaacccaagtgatttgcaatcatcttccaaaaccagaacccgtttggcctatgacgaatttctggccaatcagctaaccctcgccatcgtgcggcacaaacaaaagaaactcaacggtcgcttgtttgaaaccaatggaaaattacgccaaaaattgatagaaaatcttccttggacattaacttcattccaaaaagaagccctcaaagacattgacaaggacatggggtcaaaagacaggatgctgcgcctgttacaaggcgatgtgggatcaggcaaaaccattgtcgcagcccttgcaatgatgaatgccattgatagcggcacacaagcagccctgatggctccaaccgaaattctggcacgccagcacgcacaaacccttaaaccatttcttgaatcttcaggaatccccttcgtgacgttgaccggacgcgacaaatcaaaaacccgcgccaaaattcttgaagacattgcatcaggccaagccaaaatcatcatcggaacacacgctttgtttcaagaggctattgaattttccgatctgggattagccgtgattgatgaacagcaccgctttggtgtccatcaacgcctgcagctctccagcaaaggccgcggcgtagatgtcttggtcatgacggcaacaccaatcccgcgcacactggcactcacagcctatggcgatatggaagtctcacgcatcatgggcaaacccccgggcagaaaacccgtcgacactcgccttttgccccaagacaatgtcgaagatatgatgatacgtctgggcgaacagatcaaacacggcgtacaaatttactgggtttgccccttggttgaagaatccgaaatccttgacctcgctgcagccgaagaacgctatattattttagaaagcctgttcggcgacaaagtcggtctgattcacggacgcatgaaaccaaaagacaaagacgctgtcatggaaaaattttccaacggcgacatttccattttggtagccaccaccgtcatcgaagtgggagtcaatgtccccaaagccactatcatggtgatcgaacacgctgaacgctttggcttggcacaactgcaccaactgcgcggtcgcgtcggcagaggcggagatcaatcatattgttttctggtttacgccgcaccgatcaatgaaaccgccaaacaacgccttaaaacgcttcgagaaaccgaagacggatttctgattgccgaaaaagatctggaactgcgcggcagcggtgaagtgctggggacaaaacaaagcggtctggaaaactttcgccttgcggatttggcagcccatgccgaccttttgatttccgcccgccaagacgcagccctgttactggaaaaagaccccgaccttgaatcagagcgcggcaaagccctcagaatcttgctctacctcttcgaacgcgatcaggccatttcctatctcagatcaggataagagtaactacccttcagactttccggtctcttttttaggaatatatttcggcgtaatcatgccgccggaaataatcatttttagcccgtcatccaccgacatattgaggtcaatcacttcatcagccggaacaaaaaccaaaaatcctgaagtcgggttcggtgtcgtcggaataaagatattgaccatttctttgtcggtcaaagcctgaacttcaccttcggttttacccgtcagaaagcccatcatgtaaacgcccttgcgcggatattcgatcatcaccacgtcacgaaaagctttggcttgctgccccatcaccatatcgattacttgtttaagtgcaccataaacagttttaacaaccggcaaccgctccatcacataatgggaaagtttaagcaacatccgcccgataaaattgcgggtaaaaatcccgacaacaataaaaaatccgatagcaacaatcacacccaaaccaggtatatctttatcatcggtcaaacgaattggaagaataccgccaactttttcatcaatccaagccagaacagaccaaaccagatataaggacaagccgacaggcgctgtcacaaccagaccggtcaaaaaataattgcgtaatgccgcaaagacccgcgactctttcttaaaaggggtaaccgtctcttcattctgatctttagccatgggtatgttctcctatttgggggacactaccacgcccgatcacgaaacaaaagaggatgaaagcaccccgccatcaggcttaaacatccgcattttccacggaaaccttgtttgcaatggatcaggctcgaacaaccgcagctcgcaattcccgatacggcgaagatcaaccccgtataaaagcccaaaagcacgaaacaccccaccatgggcaacaataagcggaggagcatcatgatctttttcaagaaccggataaagcccgcgccggacacgctgagcaaacccgttttttgtctccccgttcggaggctctaatcctgcactaaaattatcctgtaattgcggccatgaaatcccttcccaatcaccaaactcatgttcgtggatattcggacattcctgaataggcaacccgagaacttcattaacaatataagccgtatcccgcgcgcgcgactgatgactatgataaattgccgaaggcttaaccagaagatgataaagaacagcagccagagcctgagcttgtgcgcgaccatcttccgtcaagggagtatcaacaccaccaccggcagcaatttcaaggcgattatattcactctcaccatggcgcaaaagataaaacggcttaagaggcaatatgcaatcaatcatgtccaaccataccattccatcagtacaaagaaaagcaacccgaacggatttttaaagcgaatttctaaaaacgatattttccccgccattggacgcaaaccgatcgacgaagtcaaaaaagaagacatcatcaagatacttgataaagtcatggcacgcagctctaggatcatggcaaatagaacactggcggccttacgcaagttctttaactggtgcattgaacgtgacctgattaaattctcccccgcctataaaatatcagcccccgctaaaaatatcacccgcgaccgcgtactctcggataaagagttaaaagatatttggaacgcctctcaagaaacagaataaccgctaccactacaccaaagaaatcagcgaagccttggcattgtgggaatcgcatttgcgtgaaatactggaaaaagaccctgtacctcaatgagatacaaattatgttgaaaatagtaactcaatgagatacaataaaaatgaaagacatacttgttaccgttgttgagcatcccaactatttgaaaagggcggagaaacttcttagctcaaaacaaatagaagagatagcggatattttggcctctgatcctgatgtgggtgaaattatgcagggaacggggggatgcagaaaaatgcgctatgcgggagtggaaggaaaaggaaaaagtggaggcgttcgggttatccatctttttgtaaccacagattacgaagtgcatctggttgatatatttggcaagggcgaaaagtcgaatttgactaaagctgaaagaaatgaattggctaaactggcagaaattttaaaaggtgaatgagatgagtgaaagatttgaatcaatccgcaaggggttagaagaggcgattgcttggaaagcgggaaagaagacgggcgcggttgttcatacctatacggcaatggatgttgccaaaattcgtaagaaaacaaagctgacccaaaaagaattttctgaatcatttcttattccgttgtcaactttgcggcaatgggaacaagggcagcgagtcccccaaggtgcagcgcaagcccttttaaaaatcattgataaaaacccaaacgctgccttagcggcgttgcattagatttttttcaaatgttatgaaataagataccccctgaatacgttagtattcagggggtagaaactttgcggtatccgaagataccttatcatagcaacgtatccgacacggttatgctttgattaagataattattgccccatgcaatcataagtgtcaataataattccatacataatcacataaacttttgggagtaggatatgggctatattctgggaattgatattggtatcgcgtctataggatttgcgggcgtgaatcacgatttaaagaaaatcctattttctggtgtccacatttttgaagcggcagaaaatccaaaaacaggagcctctctggcagagcctcgccgtacagcacggggacaacgtcgtgtgattcacagacgggcgcagcgtaaaaatgccattcgtcaattattattaaggcatgggttaaattgcctgtccgttgttgataaaaaatatgaaccaactggaaaaaatacaccccctatttccccatgggatttacgccgcacggcattagatcgaaaattaacggacgaagaattggtcagaattttattccatatcggaaaacatcgcggcttccaatccaacaaaaaaagccaaagcaatgagggtgatgacggaaaagcattaaagggagcgggtgatctggaacaaaaatggatacagtctggcgagaaaacaatcggcgcatatctttccacgcaatctaagaagcgtaatggcaatgaaagctacgacaattttatcaagcgtgattggttgcgcgaagaaatcaaagttatttttgaagcccaaagaaagtttaatcaaataaaagcaacggaagttttgcgtttagagtatgcgggaacaggagaaaaagcaaaaagaaatacacccgaaggcgacggtattgccttttatcagcggcctttgcaatcgtcagaaaaattgattggggactgtacgtttgaaaaaggagaaaaacgcgcccccaaattttcctatacagcggaattatttgttttatggtcacgtttgaacaatacaaaaataaaaattcagaatggggatgaacgatttttaacccaagacgaaaaaaataaattagttaatctagcgcacaagaataaagggggcgtgagctatacccaagcccgcaaggaaattggattaaatgaatcagaacgatttaatatcagttatcgtcagttggataagggtgataattcatgggagaaaattaggaatgaagcagagaaatcgaatttcctaaaattatctggctttcatgctttgcacgaggcattggatacggggagcgcaacagattggcaaaaatggattggctctgaccgtgataaattggatgaagttgcttatattacatcctttatcgaagatggaaaaattattcgcgagaaatatcaaaaattgggtctaaacgaggatcaaattaaaaaattgtgcgaaattaaaaacttcagcaaaacagttgatttatcattaaaggctcttcggaacattcttccagaattggaaaagggactgcgatatgatgaggcgcgcaaggcgctaaactataataatcagccagagaataaaggactttcaaaggttccaaaatttgaagatgtgaggaatcctgttgttaatcgtgccttgggacaaacccgtaaagttatcaatgcctgtatccgtgaatatggcttgcccgatacgattgttgttgagttggcacgggaagttgggaagaattttcgtgatagaaaggatattgaaaaagagcaaaaaacaaatgaagcgcgtcgaaatactgcgaaaacccatattgcagaaattttaggcattatagaagacaatgtaacgggcgaagatattttgaaatatcgcctttggaaagaacaggattgtttctgcccgtattcaggggcttatattacacctgaaatgttaagggattcaacttcagtacagatagaccatattattccctatagtcggtcgtgggataattcctatatgaacaaagttttggttttgacaactgaaaaccagaaaaagaaaaacgatacgccatttgaatatttaggaaaaacaaatcgttgggaagctcttgaagtatttgcacgtcaattaccccctaaaaaagcggaacgacttttgactgaaaattttgatgataaaaaagcgggagaatggaaagaccgtgctttgaacgatacgcggtatatggcgcggcttttaaaatctcatttggagcagagtcttgatttgggtaaaggaaatcgtgtgcaaacccgcaacggatcattgactgcgcacttacggggagcatggggctttcctgacaaaaaccgtcggaatgaccgccaccatgcccttgatgcgattgtgatcgcatgttcaacacaaagtatggttcaaggactaacaaactggaacaaatacgaagccagacgcaaaaatccagcagagcgacctttgccgcctaaaccatgggaatcattccgcgaggatgcaaaagagtctgttaattctatttttgtctctcgtatgcctgtgcggaaaatttctggcgcagcacatgaagatacaattcgtagcattcggaaatcagatgggaagattattcaacgcattaaattgaaagattttaaaaaagatacgcttgaaaatatggttgataaggcgcggaatatcaaactttacgatatattaaaagagcggctggatgcacatggcggggatgcaaagaaagcttttgcaacacctgtttatatgcctgtcaatgacccgtcgaaacctgcaccgcgcattaactctgtccgcattttaaccaatgaaaaatcaggaattgagattaaccacggcttggccagtaatggcgacatggtgcgggtcgatgtgtttaagaaagacaataaattctggcttgtcccaatttatgttcatcatttcgccgaagataagttgccgaataaggcaattatcgcctttaaggacgaatctgaatgggcggaaatgagtgataatgactttatgttctcactttataaaaacgaccttataaaagtaactacaaaaaaagaaattatttttggttattataatggaacacatagaggtacgggcaacctaaatgtgcgaactcatgatagtgacccctcatttggaaaagatggaataaaggagggtattggtatcaaaacttcactaagctttgaaaaattttcagtcgattattttggtcgtaagcataaaatagaaaaggaaaaacgtcttggcgtggcgcactctgatgattcagaacgcggcgcggctatccctgaacaagggacaggtgctgctgcagaataatgatggggattataccttcccgttagaagatattgcggcaattcttttggaatccccgcaagtgtctttgacctcgtcacttttagcaaagtgtcaggatggtggtgtgccgcttattacctgtgatgacacccatattccgaacggtgttttattgccctttctgccccattcacggcaaagtaagattgcgcgaatgcaaattgcgtggtcagaaccattcaaaaaacgcctgtggcaacgcgttgtgcaaaccaaaatatccaatcaggcaaaatgtttaaaaacatgtaagggcgcagaaatcgccacacgtatttttgctctctcgaaactggtagaatcgggagatgtgggaaatgttgaagcgcaagccgcgcgggaatattggactcgtttattcggggatgattttcgccgcgatggctatggaagtatcaatgccgcgctgaactatggctatgctgtactacgcgcatttgtagcgcggtcacaggtggcctatgggttattaccaacctttggtatccatcacgataatgaactcaatgcctttaacctgaccgatgacatgatggaggtattcaggccattggcagatcggcgcatctttataatgcaaaaagaaggtcaattcagtgaggatggaaatttaagcaaagaaaatagagcgcatttggcagcattggccaatgaattatgcgtgatagatggggataaacataatgtcatgaatgcagcggacaaaatggcggcaggattggttacggcgattgaaggaaagagtgcagcgttaatccccttacctgaatttattgtggggaatgacgtgggggaataaccatgggcaagattccacaaccaaaggacagatttatgtggctattcgtcttttttgatcttcctgtgatgacaaagccagagcggaagacagcgacccgatttcgcaattttttgttgaaagacgggtatatgatgatacaattctctgtctatgctcgtatatgtaacggagcagacagagtggataaacaccttttgcgattaaatacgcaaatccctgaaaaagggagtgtcagggtgatccagattaccgataaacaatatgagcgaatgaagattctagttggaacacgcaaaaacaacgaaaaaacaaagaccgagcagctcgttttattttgagcaaactcggtctttatctattaatttcaaacccttaactgagtatctatcatagcataaccgtgtcggatgggaagctatgactcgctcatcgagcgctcgtcggtcgtttcaatcatagcataaccgtgtcggatgggaagctatgacacggaaagaagttaataatgctttaattcaatcatagcataaccgtgtcggatgggaagctatgactatgctagtgtctgtatgtaggttattaaaatcatagcataaccgtgtcggatgggaagctatgactcaacttcaacgcctcttttgttatattctatcatagcataaccgtgtcggatgggaagctatgacgtaaattcgcgtatatcatcaagcgattcaatcatagcataaccgtgtcggatgggaagctatgacggacaaaaagcgtggtatgtgaagaagaaaatcatagcataaccgtgtcggatgggaagctatgacacgcttggctctggggatgatgatgaatatatcatagcataaccgtgtcggatgggaagctatgacatggcaacgtaccagacgatgataatataaatcatagcataaccgtgtcggatgggaagctatgacgtacagactagcataggggtcatgggattgatcatagcataaccgtgtcggatgggaagctatgacaggtcgcgcttgataacctttgcgccatcaatcatagcataaccgtgtcggatgggaagctatgacctgataaatatactttcaaacgtgtaaaatatcatagcataaccgtgtcggatgggaagctatgacattgcttttgaccgcaaggcaaaggttgaaatcatagcataaccgtgtcggatgggaagctatgaccaaattcgccaagaaagccgcgcaatggtaatcatagcataaccgtgtcggatgggaagctatgacttccgaccttaatctcctcggcttgtgcttatcatagcataaccgtgtcggatgggaagctatgacataataaatcaattgaagaggctaggttaatcatagcataaccgtgtcggatgggaagctatgacattagctgttggcgatactacagtcgcggtatcatagcataaccgtgtcggatgggaagctatgactacatggatggattgaaaaaggaaatcacgatcatagcataaccgtgtcggatgggaagctatgactttcaacctatcccgtattcaagtatggcgatcatagcataaccgtgtcggatgggaagctatgacttttccgatttggatattaagcctgcacccatcatagcataaccgtgtcggatgggaagctatgacgtctgtacccgtcaatccgagtcaagtttgatcatagcataaccgtgtcggatgggaagctatgaccacggttgtccatgtgatcccccatttatcatcatagcataaccgtgtcggatgggaagctatgacaataaaccattgttttcgttaccttatctcatcatagcatactctgcattactcacgcagaatcttttttacgccaaaacaaaatatttttggtcacttattggtcacttgggatttaatgaagattttaagaaagccctgtaaggcttggaaatagtggtgaccgcgcaggggatcgaaccctggacctactgattaaaagtcacacaacattattaaaaatcaataacttatagataggtatttgacaaagttatggctgattatgcaataactctgtcaattaacaagccaacaaagcgggggttttttataactctttccaccctgcccaactatgcgggacatggaatgtggggttaataggattaccttgctcgtctgtatacgcttgaaggtagttcataaacacagtctcgttcaaaggtataactggagcctcactggcgtcgtggtatagaccaatgatctcgaacggaagccccagagtaccaattgttgttgggtcaaagttatcagcggcaagaccatctaggacttgtttcccgttaaagggaacagtgctcggcataggattgatgtactgcccgaacaccgagttgcaagcggcttgctgctcctctgtgagttgttcaaaagtcagcccctcggggacgagtataattgcgcggtaggtcatgttgttatcctttgtagctcggagttagttacacgaattgggtagtagcggaattctcggatgtgtccgttaagcggcctattatccgcggtgctattaccaaacttaatcgaaacacgctttgcaaaagacccagagttatccgtaatggtcgtcaacccattgacgctagcggcaaagtcattaaattttgcagcgatggcagctttaacatcctcaaaagcagttatagtactgataaactccgcttgtttaacgcccccaacagagtattgttggttaacatgacttgctgagacgatagcaagtgatgagttactgttagtgtcatactcatataatcgtggggcggtggtggataatgcaaactgctgggcatggatgtaagtagtttcctctattgagcttgcccaagaggataccggtattatgttagtcgcattagcggttagagtatcagatgttcttgttaccgcacttgatgtggttggaatgtaggatgtagcaaaagctccttgttcaagctgaaccccccatagatacatataacctgttgataaactgttttccaaatatagcaggacatttatgcatcctaacggggtcgtgaagagtactgttatacgcacccagcctgtcgaacttagttgtgcataataacttgtgttcgcaataatgtctgcaccatttgtctggtcataaaccctataagatgcatcagataaagtcccacgttttgcgtaaaacgtaaaagcgtatgctgtgctggcggatacggttgttgaagttgatctataggcgtgggctgtattgctaaaatcaaccctagttgcagaattggttccatcaggagcaattccagaattagccgttacagttaagttggaacctacatacgaagtcccattacctgcgctatctgttttgatatttgtcctctgctcctcaatgagtaaacctaaaggctcaccagttgctgggtcgtggtcaaaacgtggctcgttaatagcagccgtttgcatcacaccgttcgcgtcaaaatatgtcccagttgttgagcgggtaaaggtgaaaatatcagagaaaacctcctcattaccatttacggcgtaacgattattagtaaaatccgcccagaaactagggtctgtgtcatctgcctttccttgagtgtaccaaggtagaacactgacactgccatacccatcaacacccaaagccaatcttgaaacgccaagcattatttatcccctttcattttatcctggatctctttgatcctctccatattcacggcacagccttcccaagccatataagtgcccagataggcccgctcgaaatcactttgcgttgccgttgccggctgctcgatgatcgtcggttgccccgcttgcagcagactgtccggtattaactgatccgaacttttgtcggtatctgtcgcgcacccgttcagcaacaagacgctgcccatcagataaagggcgatcatcacgaagcgattccagatccttttctgttgattttgtaaattcatggcggttttcatcttcttccctcgccttttccaatgcatcaatttgggcgttcctgagtcgctcggatgcctctagcttgcctttggctacatccatacctgttttagctttattgcgttccttggtcattaaaacggcataaaacgccaagagcaaaaatgcgatgacaaatccgaccttcatccagatcaggattgcatctttttttatctccagaaatttaaggacggccccaatcatgacaacgccctcttggcggccgcggcatataaatccatgccataccaccaattcaaatcccacggcagaccgacaggcttgccgttttcatggcgcacaattgccctggcaattccgatcaaaaccccgatattctcaacaggcagtgcttcatcagctccgaagccaagcgagtcacacacggccgcaacatatgaatccgtgttattttcatttggcggggcccaacggccgataatttggcgaatggttttcagattatggcggcgataatatgccaggataattttcatcaatgcccgcaatccgtccgaaggggtattgaactgacaaaattccggatcatcctgccgcgacttcaggccaatccatttgtctttcgacaaacggatatttcccggattattgtttctgataccgcgcggcaaacgggacatagttaatccctctcgctgatatacagcgttccgtccgaagaggcccgaataactgcaatatacggtttatgcgctgtttgaccgccgccgatagaaatatctcgcggctgatttgcggcaagatgatgctttgacgtcgttgccgtcacgctactatcgccctgctcgaaataacactcgacagtactttcaatcgtaatgacacgggtcttggcatcaaatgccgttgcatttctggcactggccgctgcaacggcaatcgtctgcgccccacccgatttataacccaaaacaggaatttgcatcccgtcgctatcccttggcattttgctcataacttctctcctatttgttcaatttgttaatcaggacatcaataattttgcggggtaattcgccgctcaaaaactgctcggccaataaggctacacaacagccgaaggcggccgccgcatgatctcccatgccgtgctcaacggcgacagaccccgccagaacacctaatggcgcacccatcaaaatggtcacgacatatcgggatgttgatctggtctgtttttccagaatgaattttgccgtcaagatcgacacaacccacatcgtcaaaaacagatacgggctaatcgcattggccagaaacatgaagaggaaagacaaaatctccccaagcgtttgcataaaagattttaattgaatcatgctatcccccattaaagttttatacagaacaaaccgacgcggtttttcgggcgcgtttcatccgccgtccgcggcgttccgtttgtgccgtctgtcacggtatttgcggttgtgtatgccgtatatgatccggtattcgatttcagaaccccgccgcttgacccgctattaactcccggattcatggcatgtctatgcccctgaaacgcatctgcctcataacttccgaaagtacgcgcgccgtcccatgcacgcgggaaaacagcttcggtcatccagtcttctgtcggcattcttttatttgctgcccaatcgtcatccgcagataggccgcgcgttgttgcaacgccgctgctgtcctgaattgttaattcggtgtttgcgtattcgttccataacagaacaaacaaatcataagtatccgcattggcgcgctctgttgcaccggacgcggcatttccgatcgttaatccgtttaaacgaacatatccgcttggcgcagtttttctggaaaaaatcgcaatctggcccgtttggacgccttgagttttcaaggcataatttgctttagtctcaaaagccatatcccccaaatcatccgcagataggccggaatcaaccaaccagacagcagcacccgtggcaggattagcacaataaaaacgatcccccgatacagtgttcaaccattttgaattccccgaataacccaatgtttcatcatcattaacggtcggatctgtagtggccgcatagttattcaaaggcaaagcggccaatgcggcatctatcaatgcaacatccgccgcaacggcagccgcgtcttcagaggaacttgcggccgcagattccgcggaatattgtgccgtttgcgcagccaaaacggcatcatccagatcatcaatattactggtcgaattaaccagtccggacgcactccatttcaacatctttcccgtttcggctttgggaagaataccgagaatgccggatgtttcatcgggtgcaagcgtcatagaccgactgactttagtcagcaattcttgcgatatataaagcaagcggcgaatatctttattgagtaaagatgatctgaatgatccggattgcggataggccgtctctctgatcggcgatgtatcaccctcaataataacagaggctcccgcagatacaggagacgcgaaagtcaatgtcagagcatcaaaatcaatagtataatttgacgggctaacaataacaccatcaagataaacagccacatcgtcaaccgtctcaatcggaaaatctatatcgaaaacagtctgtccggatgcggcgatatacgccacccgacggtcattcaaatcaacatcattctctgccatattttacctcactgacctattgggccgcgaacctcattcaggcgcacggcatcacgtttacgcatttcaatttccggaagaagctgatcggcatgtttgtctaaaacaacatcatgcgcggcctttgtataatcgcgcacaacacccgatatgaaatttttctgatcctgataatcccgaccgatcgccatatagaacccgatatgacgccccatagggtcttcagccgttgccagattttcaaaaaactctttcatggtctgattgccgtatttcatcagcctgacgccgttgccgcgctctttgaccagatcatcataaatccatggatgatcgcgcagatcaatgcgcacgccgtcaaatacttgggtcttgtcgggcatatcaatgtcgaaatcattcttgagcaaccattgatcgacttttgatcctgtatcctgcgaataatggacaggattcaataggctgaaagcacgctctgccgttccctggatcaagtcttcagacggatggaaatattttatttcttcgccccatatattgcggcgcggcggaacaaattcagaaagaccaggaatacgcgaccgcatcgaatccatcatattgaaaacctgctcttgcgcaggatcaatcgcgcgctcgatggcagcagagccagccggaacaaatgaccccgcaaaacgggataggaattgttctccgtagcgtttcgggtctgacaaagcctctgttaaatcagcaaacccgcgcataaaggttttaccaacgacctgattgcttgcggcaataattccggctgtgaccaattcatccgcctcattttgggcttgaacgtcatacgcctcataattggacaagatttcagacatatccgcagccatcccgagcaaggtcgccaacggctcaaatcgcgcataggaataatacccgtcaccaatcttgattgagtaaggctgccatcctgtgcggcgcaaagccgctttggttgcgggatcagtcggtcctgaccctgtgatctttccgttaagggccatatcattggccataaacataaggcttgaacccatgccgatacgggtcaaagccgtagcccgacgcacaccaccggccgcaatatcttcgcggactttggaagaagcaaaagccaacggcgtgcgctcgaatgtatatttaaaaatattggcaggcgtgcggataaacggcacaacaaatcgcgcccctggaacacgcgacaccatccgttgaaacgcttgcccatattgcccgagctcacgggtgaatgtgccgtattttgcaaacatctcggcatcagccattaaacgttccggcggattggacaaagcatccgcgacataacgcccgatctgcggacgatcgacaccttgggccatagcttcccgcacggccaatgatctgatctgcgcctgatacaaaatcgttttgttatactcatcccccgccagaaggctaccgccgacatatttcgacaataaaccgccccaccaatccagagctttactggcaaggcctgctttcccttcagggtcaagaatatcccgtgccgaactgcgcaccatggcattctcaattttcagaccgccaaattgactttcccctgtgcggaaggcctgcgcggcattcttgatcgccatcttttgggattccattatggaagtccagaattccaatccctcgcgcaacgtcacgggactatctttaattccggccatacccaaacgctccaatcccagattgaacgtggtcagaatattactgcccaagttgacaatatgggtttgcggattggtcaaaagccccaatgtccagacttcctcaattgcctttcctgtccgcgccaacgccccgcctttggtaattgcgttaatctggtcggtcgataaatcgctcaccgcagacagacgccgagccagatctttcccgacatcagccccgccgaaatcagcaagagtctgttccattaaccgcaaattctgcgcaggagatccgcccagattgattgaccaggcttgcaaggcacgccccgcttcggcacgaacgcccataaattctttctgcaccgcatgatgtacggcaaccattttgcgaaaattaaagacatcaatgtccgtggcttcaggccccgcagcctttctggccgcctccatcagcttgtcggttgtatcgtaataaacacgacgcgccgccacgatctgatcggcattaaacgcatccccgacacggcgttccatcatactgtcaaagccgttaatatcctgcgcattcagcaatgtttgcgcgttcgactgttctcctcgacgggccgcctcgatagagatcttcagctcaggcttgttcaccatatcatccatcaattgcttgatgtcat

SEQ ID NO: 3733 - DNA, 23135 bp, synthetic construct
  source 1..23135: mol_type = other DNA
  misc_feature 1..23135: note = Synthetic
gggcaatggcattgctggcaaaagaatggcgtaggtcatgaattctcacgttagccaatcctgctttggccctaatccgacgccagggatgctgtaggtcagtaagatatgatccctccaacttgcccctaatgacatagggattaccttcctgccgctcaatgttcttaagaacttcaacggcggcatcgccaagataaaccgtcttggcgcccgttttactgtcaggtagatgaagttcgttagcttcaaagtccgcatgggcccactcaagtttctggatttccccaaggcggcagccagtgtacatcagtagtcgataagcattgatacaggaatgggtttcttcgccactggcttcaacttcatccaatacctccgcaaggcgaataaattcttccttggataaaaaccgttcccgccctttctcgggatatttcttcacatgtcggcaagggttgctgccatcctgccgcaatccccatatttcggccaaattcatcatcttggataataccccaagtgtccgattagcttgatagggtatatgatggagattatgatgcatggccgccacatcaggcctggcaacatccatgatcttatatttacccagggcaccattgataaaatgctctacggatcttttatattcatatgcggtggaagctttgcagtgcgtagggacatattcttctaaaaacttctttcccagatcagcaatggtcagagccttcttatgagcgcgcaattcttcagaaggatctatgccatgtttgacttgagataatataccaatggtcttggtgcgcgcctgatcgacggtaagggtgccatgtgtaccaatggtgtatttcttctgttttcccttcaggcggcacttaagagcataagtttttttacctgacggccatacccgaatgccaaagcctctaagctctgaatcccagatgacatattcagtatctttagaactcaaggcatctatagcccgcttggttagttttggcatgacagtgcaatcttcataagtttaaaggtaccacataggtaccaaacgaacagtattcagggatgtgcacagaatagcaggtcgccgaactatgtcaagtaaattgagttaaaacaatcagttagatatgtaaatggctttagggagctacaagaatattcaggtcgcagggccattatccaaactcataacctgaaggtcataggttcaaatcctatccccgcaaccaacggaaattgacgccgcccggatttatctgtggcggtgtttttcgttgggtcaacaaaatgcaagatccccgccagatcccccaccagttctatttccagcctgtcccccacgggaaggaggatcacggcctctatcaggctgcgcagggtctctgacgcctgtgtgaggatctccgggtcattcaggctgtcggtgaggcgctccagcttctccgcgtaagcgtcagccatgttggggtggagcagaggggccggaactgcggcttggctcagaatgatctccagatcccctttgcgctgttccagcgtgatcatgcggtccttgaccttggcggcggggatcccctgacacagggcatcgaccagcttgtccacctccttatcgattttgtcatattcccgcctttgggctgcaagggaggcgacctgcgccttgcggctgcggttgatgtctctggtatattccgcgcaaaattccctgaagtaggccggttccatcaagcggcttttgaggccttccatcaccgtggcttccagtgattggcgatccatggtgagcgcgttgtcacaggtgcccttgttgcgccttgtgctgcaggccacatgggtccggctatacatgctgaaaccgccgccgcacttgccgcatttaagcagcccggacagcagatatttggcccgcctgtagccgcccagtgcgttgttgtcctgcatcgggcggcgctggtcgagagtcccctgccgcgccttgaccgcgtcccagaggccttgatcaacaagacggtgatgggggacgtcttttatgatccagtcctcttccgggttgggccgggaaatgcgtttgcccgtctccgggtccttgatatagcgcagccggttccacaccatgcgaccgatatatagctcgttgttcagaataccggtgccccgctggcgattgccattgatggtgctttgtccccagtcccggcctcgtggcccgctgatttgatcttcattaagctggtaagctatggcgcgcggcgacgcgccgtcggcatagtcccggaagatacggctaatgacgtccgcttcccgttgattgatcaccctctcgccccgtaaggggtctccgtcctctcccagcttcttgaggacgtcatagccgtaactgttgccgccgccggacttgcccgcctcgacccgcccgcgcaggccccggcgggtcttgtcggcgaggtctttgagaaacagggcgttcatggtacctttcaggcccacatggagattattgatctcgccttcgctgagggtggtgatcctcaccccggcgaactccatgcgtttatagaggccggcgatgtcctcctgatcccgggacaggcgatccatggcctcggcgacaatcatgtcaaactgtccccgccgcgccgcctcgatcagcgcctgaatgccgggccgcagcagagacgcgccggagacggcgctatccttatagacggccgtcaccgtccagccttccttggcgcagcgctcccggcagagccgcaactggtcttcgatagaggcttctctctgatgatctgaactgtagcgggcataaagggcgacgcgggggctgtggggcatgggttttctcctatgaggtcaggggcgcgggggccgtgtttgctttacctccgtcccctccgttgaggttgcttggttatcattggcggcggacttgcgcagatgccgctgaagagagtctctggcggccagccgtcccaacagctgggcgatgtgccgcagggcgggggcggcggttttttgcacggcgttatcattggcggattggggcggaacggggggtttacggttcatggggcctcgcgtgtttgggaaagggaggcgacaaggaaacccgcaaatcccccgcttgtcaagggggagagtgcatagataacaaggcgttagaggtgccgcaaacgggcgcactgcatcgtgggcgtctttcagcgtacggggtgcatcgggctgcatcatggtccattcttctttcgcgggcattttttttcacaaaaacggtctttttccgaagggagacagcactctggcgggaaaagacgcgggaggggggccataattggtgaatttttggcctgtcccctcccgagtctttttgcttaagcccctcaatcgcccttacgccgccggggcagcttgcgcggctagggcggggtcgaggctgctcgtcatctgctcatggatatcctcgaccttccgggtgcgttcctgcaggaactgacccatcagggcgaactcgcagctgctggcgcggcctgcggtaatatcggtcagggagatcagaatatcgccgatggttttgagctccgaacagctgttctccagaccgcgcagggcggcggtgaagttggtgtccgccggggtctcttctgtctgaggagaaaagaccttaggcggggagatgtgaaggggcgcttcctcttccgcgatgccatagatcgcatcgtcgctggggcgcagggcgtctctcaccacctccagcccgtccttgtcgggcttggccagccgtccggccttcagggcggtgaatttatgctggcagatatgcctgacgagggtgtgcaagtcctccacatggccgaacatggcctccagatccggggggatcacttgatagtcggcgctgaagcgcacctcgcggaaggcgctggccagatgatcgaagatcaactcgccccgccgtccggtccagatcatggcgagttccgggtgcaggctttcggccagcgcccgcaggtcctgcaggggatgtcccggcgggtaggcgaggatatgaaccgccatcagggccgcatagccctctgcggcggcgagattgagcatcagggcggcggcgctgcggtcgagagtggcaaaggcccgtgcgccggacagcagcaattgggcgaggggaaaggcgtgatcataatatttacgggcttgctccagatgcgctgccgcctccgggcggggcggcagcaggaacaggtcgcgggtgatcttgccccggctatagaggacaatgccgcgttcctgtatccggtcataggcgagatacccattgcgcagcttctgatcaatccggcccttggtgtcggcaaaacgcagttgcacgggaaagctgatcttgccggactggttcagttctgccacggcattttccagagcggcgaggatatcccccagatgggccgagacgatgaccatcaggttatagctataggcactctcgccggggtgcaggatgctatccggggtccagtgatcctcggtgaagcagccgtgcagaatgatatggcggacgcggctcggggtataacgatcacgggtcgctgggctggggatggtgcgccggatcagacaggcggcgatatgggtgagatcattctggatctgttccggcaggtgggtgtatgagaatttcatgagattttcccttcacgctcaatcgtcctgtccgcgccacagcccgtcgtcattctctcgaaggagggaatccagaactctgcaggacgatggggggaaatatccgaaaattttacacggtcgggtaagttgttggttaacaagcacagatcatctgtgctaagacattgggtagccatgtcagcctccgttaaggttggtgtggtcagggccatgtcggtgttgtagcaccttcatggtccgattatcgtaaatgcaggaaactctctgcgatctgcagtatgtattggctagatagtcaatacttgaaaaagtgttcaaatgtatacttagattgtacattgtacactttatgaggttaatgtcaattaacaagtacagccatttggtcgaaaaaaaatgattacaggaatgcaggtaaggttaggaagaacagcacttcgattaagtgtacgggatttagcaactaaaacaggcttgactgctaatacaatcaatcgatttgaaaacggttctgatgccaaagggtcaactattcaaaaattacagagttatcttgaaacttcaggcgtagaatttattgccgagaatggtggtggagtaggggttcggctgaagaaataaccttatctgaatattctcattcaggggcagggaaaagcaaaattttgaagtgatttaaagaaagtgtaatcatatacacgccatgcagctagcgtgcgcaaatttaagtgttgcattcatcttgtggttcgtttggcgagccttattcctcaagattttaaaacctctccattaaatcgggacaaatccagtagcgttaaattgatgcattacatagtatcagcgagtggtttggcttaatttcatcaagatatcaacagcaattgggttgttggagccagagattagcgtgttcatatttttattgcttatatgattaaggattatatattttgatctactgccagctttttctagggcgtaaacaaaaagacgtgcttcctttgctgctcctggccgtctgtttgatgcgtatacgataaatgggggaggtggagcggtagtctggttggcatgaaaaagcggggaagcttgttcgagttgttttttactttccccaaaattattgtaaatcaattctgtgaccgattttggacttgacgcagccgcatagggtagatcatatgctattgtgtccactggaatcactaactttaatatactaaaattcaggtcgtgtgccgcgaggtatttctcatctgttgcaataagagaaatgaggtgtgcgccagaggaataaccaataagtgtaatattttccggatctcctttgtatttggtaatatttttatgaacccactttatggcggttgcaatatcctctacctgtgcgggatgttgagcattgctggataaacgataatttatagtaataaacacattatttttatcggcgtaaaatttaccgtgcttctttgccgagtctttatcaccaaatttccatgagccaccacgtacatagattataacaggccttaatttaacggattgttccatattagaaaaattaggaacataaatatcaagtttttgcttaaggttataaccatatgaaacttctttcatgtaaaaatttggtgaaatatatccaatatttgctattgaagaagaacttgttatgagacttattaagaataaggttgagactaaaaatatgcttttcatgttattctccaatagtcatattcggcctattattgagttaattataagaacttcgtcattataggaaaatattatctcaattacaggaattattttcagtttagaagtgtagcttttgaactgaccttttcagattatgatggctaatgcgcccggatgtctgtcttgcaagacgacttcggcgatcccatcgaggaggtcaatcaggcaactctgacgctgtggtttgacgccttctaacgccgcgacggggatgatctgatcaaggcgatttacctcgcccgcgacctgaatgccgctatgggggatatcctggacaggctggacgagctgtctctcttcgaaggcgacgccgaaagttatgttctggagtttgtcgaggatcgcgggctgctggatggcctgccggaaaatctccaaccttacttcgacacggaagcctttgcccgcgacatgctgctcggcggtgatatcgaagaagtggccatcatgggccgccgcttcgtcgtgtgggggtgctgatcatgaccacgacaacagaaatcctgcaatggcgcgagtatcaaattgagctgcgctatgatcccgatccctatcatcaggcggcccgtaacggcgttgcgatggcccatctggagatccgctgtcttcgtccggcgcgggccgctctgccgatcagtgagactgggtatcgctcggtcttcatgccggactgttacctgaaagactacgacagcgccgccgactatgtcacacaatggctcgaatgcgcggcgcagacccgggaatggcaagacagtcttgatcaggcccggcagttgagcctgttctgatgatcaaatctgctggaggggcagattggtaaactgttcctttgcagcaccgcactagattgtctagagttttgtcccgtctctggggcggggatggttattacctttacaacggggtcctgtcatttatgatcaccagtataacgctaggagctaaatacgaaccaaaacggggaaaaccatgagaacaagacaggcggtcatccacgcatctttttatctctcgacccatatccgcttcagtggaaagacgctataccacattgagtttgctaaagagatagacaaagtcacggagttagggtgatgagaagtataaaaaataacaaaactagactgggcccgttgcttatagtgctgagtatcttcttcagtggaaacagtgcttttgctaaggagaatttaaattgcctattttcagaacaggcaaagtttgttgaagcatgtaaagcggtacgtgcagactttctggaattaactcaaaactcacgtgggctatcaaaggaatctaagcatgaaaagttagaaaagctctttcgtgatttaaagcaaattgaagactacggctcaatagaggcatatttggtattaatttcgcagtctgcctattatttagaacaatatgatgtcgctgaatccaaggcaattgaggccttgagttataagcatagatcatcgaaccctgatgctactcatatggggtgggctattttgaccggtgtctatgctgctcaaggcaaaattctctcctctcaagaagctttgaaaaatgctaagaaagggttgacgtgcgcagataagccgcacatctgcgcatacgtactgaaagagaaaggtgttttagagatagctatgcaaaattacggagcagcaaattctgactttgataaagcagccagtatgttttggaaaaaggccgattcttataaggctggcctcatttactatactgcagcggagtttcttgtaacgcgttctgctgaaaatgccattataaactatatgaaggccaaggatttatactgttccatggagcaggagagggtgtgcgagctatattcaagtatgattgacgtaaaagttaggcgtcttaaagaaaataaggggaaatgatatggcaagcgaactacataatggaaatatttagtagcccaatatgaatatccttaagtatcggatttttggccggattcggataggaaaaactcgcacaatcacgccgccagtttgatgtatgggaaggcgttttatcacttctagaggaaccgagaaaattcaagatatagagccttcaataaaaagtgtaatcatacatacacactatgcacctcccgtgctgacacctttggtgccataagatctttaagtcattgaacaggctttgtaaaattgatctacaacgcgattacaggccctgtttttttgatgacaggttgagcaccatgttctggaaaagtcaatattttcaatagcctgggcggtgttttttgtcatcgaaaattccggcttttgtaatcacctttccgtcattcaaaggtggcataaagtggctcgctttgtgggatgggttttcctgtttgatgatgcggatttctattgtgttaggattattccttggtccctgatacacgcgcttcccccatagctggcgtgtgtcaggggcttggtccggggcgggtcaaaatctgatgcagggctggatgagctgcaccggcgcgctgaatatgtggcatgaaaaggaactttgatccaactggcactgatcccagaccatgggggataaggcttagacgggttccttggtgttagggctaaagaattggtgccagtaaatagatgtgcagacggggagttaggggccattggtgctacaccttttatcttgcgctcaaactcactcctcccaatctctattctggcaccattttctgggttgtcttgtcgagcaattcctgatcatccagaacctctttctaatggtcatcttgccagaattttcagtttggcgcagggggtgattttccggggccgcttccagcaaaattgaacgagaaaaaatggagagatttagtgctgttggcttagggcaagataaaaggaacttaggcacggggcgcttaagttattgcctgcacatcctttttaccgacactcaatttttcacaccagagcactatggttttgataaatctttgaatgttcataataaaacaggtgtcgtatattttttataccatatgtttcaatgagttagaggattgaaaaaagtgatatgtttaggtggaaaattgctcagattgcaagcctagaattggtgataattcaagattttctatgcacatttacgctgacagaatccaatatatagaggcgcctcaactcccgctcagaggccagtcccctatgtgcggagtgtacgcgcaaaaaattgatatttgaattaatttgaaggtaacgtctatattgctggttttgacccaagatgaattctgaatagctgaaacctacatccaaaatataattgtaacttcgttcacataaacggaactggatcacttagtctaatcaagaatatttgtataagaatcaaagatgcccctagaaggtaaaccagctaggggcagaaactttgcggtatctttcaataccttaccataacaacgattccgacacggttatgctataagttgcaaaacatcataaaatatgcacttaatatgtcaagttcttttttgggaggttaaaaaatgtcatataatcttggggttgatattgggattgcatctgtggggtttgcaggtgtcaacttaaatgcgcaaaacatactttgttctggggtacatatttttgaagcagcagaaaatccaaaaaccggtgcatcattggctgaaccgcgccgtaccaagcgggggatgcgtagggtattcggcaggcgttcacaaagaaaacgcgctgttcgtcgaatgcttattgagtatggcattgataatattgatgccatagatgtgcaggacaaacgtcataataatgaaaagttgatcaaaaaatccccttgggatttacgtaaagaatcattagagcgcattctaacggatgctgaattttctcgtgttttattccacattgccaaaagacggggctatcaatctaaccgcaagggagcgatagccaatgacactgaaggtaaaaaggccttaagtggagctgtgcaattacaagaagcaatggtgcaaagcggggctgaaacggttggggcttatttggctacgcttgataaaaagcggaacgggcatggctcatatgataattttgtgacccgcgatttattacgccaggaagttcggaagatatttgccgcccaaagacgatatggaaatattaaagcctcaagggagctagaacatgcttttgcaggaaatggcgaagcggataaaaaatatacgttagagggcagtggcattgccttttgtcaacgtgatctacaatcgtcgattggaatggtcggttattgcactttagagccttcagaaaaacgggcccctaaattttcttatagcgcagaactgttcattctttggtcaaagttgaataatgcaaagatacgagacactaaaagcaatgaaagagttttaagtcaggatgaaaaaaacaaactcactgacttggcccataaaaataagagcggcgtaagttttaaacaagcccgtaaaatactgaatttaagcgacgatatgcgctttaatatgagttaccgtaaaattaatgatcgtgatgacacatgggagaaagtgcgggatagagcggaaaagtcagtttggttaattttaaccggctatcaaacgcttaaaagtaaaatggcgacgggtagcgatgatgactggcaacaatggacagggccaaggcgcaatagccttgatgagatttctcatattttgtctttttatgaaagtgagcaggaaattagagatttgctcgcgcctcttgaattgcaagaagaccaaattagctctttgcttacaatcacgaatttcagcagaaccatagatttgtccctgaaagtcgtgcgggcgattttaccctttatgcaaaagggcttaacctatgacaaagcttgcagggaagcgggctataatcatagccaaaaagaaaataaaggtctcactaaaatcccgtcatttaaagatgtgcgcaatcctgtggtaaacagggcgttggcgcagacacgcaaagtgatgaatgccgttattgcccaatacggtatgccagagacaatcataatcgaaatggcacgggacgttggacgttcatttaaagaaagaaaagataaggaaagagatcaaaaaacaaaccaatcttaccgtgaagcggcaaaaaaacatgccgctgaaattctggatattgatcccgataatgtgcggggcggtgacattatcaagtatcggctgtggaaagagcaaaagggtttctgtccctattcaggggtatatatcaatcatcaaatgatgagagatcctgtggcaacgcagatcgaccatatcataccctacagtaggtcttggaacgatagctacatgaataaaattctgtgttgcactgatgaaaaccagatgaaagctaataatacgcccgttgaatattttcaaaaacaaggcagaaatttgaagactctctcggcttttgcaaagggcttgcccaagccgaaagccgataatctattaattgagaattttgatgaagaaaaggccaataaatggaaagatcgcgccttaaatgatactcgttatatcgcaaagctgcttaaaaaccatgtggagcaatctttgggcctagggataggaaaccgtgtgcaagcacgtaatggcgctttgacctcacatttgcgtagtgcatggggttttcccgataaaaaccgccgtaatgatacccaccatgcgattgatgccattgttcttgcctgttcaacccaaagcatggtgcaaaatttaacccgttggaataaatatgaggcccggcgtaaaaacccgcataaacgagccttaccgcctaaaccttgggaaagcttcatacaagacactaaagacgcagtagaacatatttttgtatcccgaatgccggtgcgcaaagttaccggcccggcacatcaagataccatccgcagtattcgtaaggatgatggcaagattatacagcgaattaaagtggcagatttaaagcccgacatgttggaaagaatggtgcataaggagcgcaacattaggctttatactgttttgaaaaaacgtctggatgcgcataaaggcgaccctaaaaaggcttttgcaacaccaatatttatgccaacaaatgaccctgggaaacaggggccgctcattaatgccgtacgtattgaaaccatcgagaaatccggcgttctcattaatgggggcttggcgagcaacggcgatatggtgagggtggatgttttcagaaaaaatggtaaattttttcttgttcccatttatgtacatcattttgttggtggtacactgccaaatagagcaataattgcatataaaccagagggggaatgggaagaaatggaggataaagattttattttctctctctgtaaaaatgacctcctttttatcaaaagcaagaaagatgaatattttggctattacgggggaacggatatcagtactggtgctattggcattactgcacataacagagatccatcttttggtaagaagggagatgggaaagatcgtacaggcgtaaaaacgttgcaatccttcgaaaaatatacagtcgattattttggtaacaaatataaagttcgtaaggagacaaggcttggcgtggcgcacaattctcatccagaaccctgcaaaacttaggctggtcaaaggccaattacaacttgagaacgaaggtggtaagcacagtttgccattggaagatatcattgccctagtgcttgaatcaccgcaaatcagtctgaatgccagtttgttatcatatgcgcaagaccaaggggtagcgatcataacttgcgataaaagccatatgccaaatggtgtgatgctgccctttcatgcgcatagtcgtcaaagccgtgttgcgtatattcaacagtcctgcacaaaagcgcttaaaaaaagattgtggcaaagggtgatacaggcaaaaattatcaatcaagctgtctgcctacaaggggcaggtggtgaggtcaagcgccttataacgctggcaaatcaagtaaagtcgggtgatcctgataatcttgaggctcaagccgcccgttattattggacaagattaatgggcaaaagttttaaaagaggcaataacgaccttgttaatgctgctttgaattatggttatgcaatcatacgggcctatgtggcacgatcacaggttgcttatggtctaatgccgacctttggcttgcatcatgccaatgaattgaattctttcaatctgacagatgacctgatggaggttttacggccttttgttgatcactatgtttttgagatgcaagctgaaggtttgttcagggaaggggagagtttgcctattgaatgccgtcagcatctagccggtgcaggggcatggttatgtgatttagaaggtgaaacccatagtctggcaaacacgtgtgataaaatggcggctgggttagtttgcgcaatggagaataacagccccgcattattgcctctcactgagttcaaaattggtaaattaggatgagtgcggcaaaggatagattcatgtggctatttgttttttatgatttacccacttctacgaaaccagaacgtaaaacagcctcgcgctttagaaattatcttctaaaagatggttatatgatgatacaatactcagtctatgcacgtatttgcaacggtcaggatcgggttgaaaaacatttgcggcgcttagacggcattttaccctcagacgggagtgtaagagtgttaaaaataacagataagcagtatgagaggatgaaaattcttgttggaacgcataaaaataatgaaaaaacaaagaccgaacaacttgttttattttaagatgtccggtctttgttctttattttcagtatcttgtaaccaacctatcatagcataaccgtgtcggaatggaagctatggcagagttatgacatccccggacggtataacaatcatagcataaccgtgtcggaatggaagctatggcacgtccaccgtttacctctctggtggggctatcatagcataaccgtgtcggaatggaagctatggcgtcgaggtttaaatgggttcccgtttcgtgatcatagcataaccgtgtcggaatggaagctatggcttgtggataaggtcacagatgctacagacaatcatagcataaccgtgtcggaatggaagctatggctcgacggcgcaacattcgtttaccggtgtaatcatagcataaccgtgtcggaatggaagctatggctgttttggttatgaaatgtatgaaagcgaaatcatagcataaccgtgtcggaatggaagctatggcgctttacatatcaaatgatgtattatttttatcatagcataaccgtgtcggaatggaagctatggcaagaatatcatgataatgattatgtcaataatcatagcataaccgtgtcggaatggaagctatggcgttacttatcccctcatataataaattgctatcatagcataaccgtgtcggaatggaagctatggcacgccgatcatgtgaaacatgcttttcttcatcatagcataaccgtgtcggaatggaagctatggcagtgaagggtgtgttgtaaagaacaacacaatcatagcataaccgtgtcggaatggaagctatggctcggcggcgcgcactgcggatcaaaaccgcatcatagcataaccgtgtcggaatggaagctatggcggccgcacgcttcatgacaatatgcacttaatcatagcataaccgtgtcggaatggaagctatggccttgatagtagatatattcaaagtttttcaatcatagcataaccgtgtcggaatggaagctatggctcgccgtccattaccccgccgcccgcgtgaatcatagcataaccgtgtcggaatggaagctatggcattatggtgattgttatgcgacgaccccgaatcatagcataaccgtgtcggaatggaagctatggcctacgagatggtcaaaatgggcgggcaatcatcatagcataaccgtgtcggaatggaagctatggctgtttacggttgcggtttcaaggggtcggaatcatagcataaccgtgtcggaatggaagctatggccccacggttataacttgtgccctgctgtatatcatagcataaccgtgtcggaatggaagctatggctaatagcccagcacggcgaatatttcctttatcatagcataaccgtgtcggaatggaagctatggcgctcttgcgataagccttatcgattacgcgatcatagcataaccgtgtcggaatggaagctatggcacggcccagatatagccgcgacgtaataccatcatagcataaccgtgtcggaatggaagctatggctaatgtataaggcatactgtcaagaaaaaaatcatagcataaccgtgtcggaatggaagctatggctgaacatattcaaacaatcgcatatgatcaatcatagcataaccgtgtcggaatggaagctatggcttctttcggcatcagatccgcatattggccatcatagcataaccgtgtcggaatggaagctatggcgtctttaattctgtcctgaagcacatcgacatcatagcataaccgtgtcggaatggaagctatggccgtgggacaccctgccattgaaaacattaaatcatagcataaccgtgtcggaatggaagctatggcataaacgactttccaatccagagagttaaaatcatagcataaccgtgtcggaatggaagctatggcttcgttagagcaaaacttaactcttgaacaatcatagcataaccgtgtcggaatggaagctatggcccaaaaaggctttaaagggaatgaaaaatcatcatagcataaccgtgtcggaatggaagctatggcccgatattccaagcggagaattgcatatccatcatagcataaccgtgtcggaatggaagctatggcggcttcacgctgttctgcttcaacggccagatcatagcataaccgtgtcggaatggaagctatggccacagaggccctaccggtcaccacccttgaatcatagcataaccgtgtcggaatggaagctatggcagcacgcctattatttcttgtgccgtagtgttattcgccgtgtcaacttccgtttatttccagtccccgcaaccagtcttaactattttttttataacgtataactcaaaatagtataaaatacattccccatatattctctttatattctgctaagtcattgatattacacctagcacggttctagcacaaaacctgaaggtcgttgaaacgacctgttcaggcttgctgatcctgtcgtttaacagaaagttaacgtgtcattcccctggaaagagatgctcaacttttttttctgacgtttttatagaaatcgatcaggcccgtggtcgaactatcctgaggctcaaccgtaccgttctggtcgagctgcggcaggatgcggtgcgccaactccttgccaagctccacgccccattgatcgaaagagcacaccttccagatgatgccctgaacgaaaatcttatgttcataaagtgcgatcagcgctccaagagtatgcggatcaatgcgctccatcaggatcgtattggtcgggcggttaccctggtggatcttgtgggacacgaggttattgatataggcttcggacttgcccttggcgcgcagctcggcccgcacttgcgtctcgtcaatgccggtcataagggcctgggtctgggcgataaaatttgccatgagatattcatggtggccacggacgctggtgctgctttccacggcgcctataaaatcggccgggacgatattcttgccctggtggagatattgatagaaggcgtgctggccgttgatgccgagctggccccagatgatcgaacctgtggaatagggtacgtcattgccgtcccaatccaccgacttgccgttgctttccatgtccgcctgctgcagataggcggagaacatgtgcagggactggttatagggcagaatcgcctggctttgcatgccgagaaacgtgctgttccagatgccgatcagagcctgtatcactggcgcattctgttccatgggcgccatttcgaaatggcggtccatggcataggcgccgccgagaaggctttcgaaatgctcgaatcccaggctcagggcgatgggcaggccgatggccgaccagagagaaaaccgcccgccaacccagtcccataaatcatggatattttcctggggcaggccaaacttgagggcgttattgcggttggccgtgacggcaatgaaatgtttctccagagcggtttcttcaaaagacgaagccagtaaccagttgcgcgccgtttcggcgttggtcagggtctcgcgggtggtgaaggtcttggaggaaatcacgaagagcacctgttccgggttcagggggcgcaggacctgggcgatctggacgccgtcgacgttggacacataatgcacgcgtatcctgttgtcgctgtatttctggagggcttcggtgaccatctggggaccgagattggagccgccgatgcctatgttgaccacgtcggtgatcggcttgccagagtagccgcgccactttcccgagcgcacggcatcggtcaggcgtttcatcttgtccagttcctcactgacctgttccatcacatcaatcccgtccacaaggatgggcctggcggatatattgcgcagggcgacatggagaaccgggcggtcctcggtcacattgatgcggtcgccgctaaacatgcgatcgcgccagccttcgacatcgacctcgcgggccaggtcaaagagacccgccatgatgtcatcggtcaccagatttttggaataatcaaacaggatattctcgacctgcagggcatatttctcaaagcgcgccggatcattggcgaacaggtcattcagccgcaaacccgtgccgtctctccgtaatctgtcaagtaaacgccaggatgtggtttgtgtattcataagcttgtaccaagaaaaagaggaagagggggggctatcactcccatcttcctgagttgaggacgaatagtggaaaggaagtatttggttaaagatcatctatccgtgatgtaaggaagatatcgcattaagtttaacgttaaacaaagtaagacgcaagggagaattttgtaataaatcatgtaaatattgaaaaatattttaaaaggaggaagatgtcatgcttagaaagagggacgtgattgtcgtatccacatgctatgataccttttgtctcatcgaggatgaattctctaaatcttccgatggggcagggtgggctgttcctgaaggaataatcgcgtcacccttctggtcaaagagcaaaatgtcatttggattgatgccgagggtaataacattttgactattaaatgtattttgcccttggagcttcacacggatgtctgagtgattctgaagtttggcatagacgtatgttgaatcccccaggttttctatggcatgcggttgtacttctaaaataacatcgcctgacttgaggtgagcatgtatatgttctggtcgtaaaccaagcgttatagtgtcaccaacctctatcagagggtaatgcttgttcaggcatatatttataccaccgtccaggttaacaagtgtttttccgtgttggctatccattactttaccatcaagtaaattgatttttggactgccaatgaagcttgctgtaaaaatattctttgggtgattatagagctccaatggcgttcccatttgagaaattctaccctgatccaaaacaactattctatctgccaaggtcatggcctctatttgatcgtgcgtcacataaatcatcgtactttttaactttttatgtaattttgacaattcatggcgcatctgtacgcgtaattctgtatcaagatttgacaggggttcgtcaaacagaaatatttttggatcgcgaacgatcgtacgtccaatagcaacccgctgtctctgtccacctgaaaggtggctgggcaagcggtcgagatactcactcagttgcaatatgtcggcgacgtgagtgatatgttgatcgatatatgccttatcaagtttcatatttttcaggccaaaacttagattttccctgacggtcatgtgagggtagagggcataagattgaaataccatcgcaacgcctcttttcgaaggcgctgtatttgttacgtccacatcatcaatgaatatttgaccggaagtgacttcttccaacccggcgatcattctcagaattgtggattttccacagccggagggtccgacaaggacgataaattcaccagactgaatatcaaaattaatgtcatggatgatttcatcttcaatgtaggttttaacaaggtctttaatggttaagttagccatgtttctataaattccatacttttgctgtactgtctttaatgattacttctgcctgtatgtcgatttgattacttttaacgctggctttgttcagaagcgcttctgcagcttttcgacctttttgatcggcgtcttgccgcactgtggtcagggcgggtaattcagggcttaggtcatagggggtgatgccatcaaacccggtaattgaaatgcgaccggggagatcaatcttgcgtcggcgacattcttccatggcgccataggccagttgatctgaaaaacagatcagggccgtaatatcaggaacagcattcatcagaatttgggcggcctctgcaccgccttttctgctgttggtgatttcctgaaccagaatattgcttaactcaatatcttcgttgagaagggcggcgcgacatccctggagtcgctggttaacgacgtaattttcagtctcaggttccctctcaaggctaaatagagcttgactgccttcttttagagggaatgtgataatcccgatctttctatgtccaagggaggtgatgtgagaggtcatttcctgcatgacactggcatcattggtcagcacgctgatatgctgaggagactcgaagtcaacgacaacggtcgggagtcctcttgagagggcacgctgggtcgttgggttgctcttatagggtgcatttagaatgtagccatctaccatggcgtccagagattcaaagttatccaggtcgctattctttaacggaataagaacaatatttgtccctctttcttcgcaaaccgtggacacgccacgcaggaaagcaatatcatgtggatcagagaaagcgtaactgagctggtcattgtaaatgatgcctatggcgccgcacaaacctgtccttagtgatctcgcagcaggattggggccgtggtaatttactgattttgcataatccagtatctttttgcgcagcttgactgatactttggacgggttgataaaggcattggaaacagatgtatgcgtaatgccgaggttcgcagcaatagacttgagggtctctttctttcgggccatgtcgttataaaatcctttttcgtggctcaataatatattcctatgcggcacaagagtaagcaaattgcaaagcgttaccggttattgttctcgtggcacatatttcgtttaaagaaaatgtacaacatcctgtttccaatttatagtgaattaagtttaacgttaaatattgacataatcaacagttaagtttaacgttaaacaaatgccaataaataacctattctcgatggcctgtggcaactaaatacggtggaaaaaaatgagttcaaaatatatgagaaacatcaccacagcattttttctggtgcttagcgtttttgtttgcgtctcaggcggcgcacatagcgcagggctgtcgcattcacaaaaaactatttttgaacctcttcagttcaaccttgatcattttaatcatttatatgctcccttggagataaatggcacaaaaatggcagtggtcaatatctacagtgaatatcctgattatcattttgccattgagccggctgaggggtttgcttgtgttgacgatgttgcccgggctattgtgatgttagctggatatttaaaaacccacccgaataaagccattctgaaaaagatgaagatgttgatcgagtttattttgtatatgcagaatgataacggatattttaataacttcatttggcatgatctctccataaatacgggttataaaacgtcggtagcagaaatgaactggtggtcctttcgcgcattatggagccttgaggtggcttatggtctggtgagctctgatgttgatctggtgaatagaatcgcagcctcaattgaccggcttatggtaaacttaaaaagagatctaccattgggagagcagatagccgaaatcaagaacaccatatgggttgctagctggttgcctcagaagtttgctgctgatcaggctgccgtcgccattatgggtctgctgccgcattacgttcggcagaaagatggccgcgttttggatatgatcaatgcgttggctaaaggcattatgcaaatgcaaaaaggcggcaagggggtctatccctacggcatgtttctaagttgggaaaatgaatggcatgcttggggaaatagtcaggcttacgccctgttgctggcggggcagcaattgaaacacccagagtatatagaaagtgcattgcgggaggttgattatttttatccttatttgctcaagaatggcctcgttgaatcgctctcaatcaggcgagatgaagccggatattctgaaatccataaaagacattttccacaaatagcctatggaatacggccaatggtgtatgctgcagccgaggcatatcaggccacgcaagataagaaatatcttgtccttcaggcaaagttaacttcctggttcacaggggacaatattgcgaggagggcgatgtatgatcaagccacgggaagaacctatgatgcgattaactccgcagtgaaaataaatatgaattcaggtgcggagtcgaccattgaaggtttgttggttttacagaaataaaaggcgaatgacgtttatgaaaaagatcagccatatcattgtcatcttcagctcgcttctggtgggcggatgctccggctcagatcagaaggcaaaagcggcgccggaggggaaagtgatcaggttgtgggtagcgcctgatgagtcgcaggaggctttctggaaggttgtggttgcccgatggaatgagagcggcctgggtatgccggtggcgtttgagacaatcccggcggtggaaagttccgagaaagctattctaacagcacttgtggcgggcaatgctcctgatatctcgacgaatatcttctccggatttgccactcaattggttgccttggggcagttgcaagacctttcggtcatggcgggatatccggaattgatcgcacacagacgtatggaaaaaattatacaagggtgggatcagggaggaaaaaaatatgtctttcccctctattccaacccgaccttgatctggtggcggatggatatattgcaaaagcttgggatagacgacgtcccgagaacctatgatgatgtctataagctttcagagaaatacgccgccttggatcaaaaatacggcatgcagcttatcacgggg

SEQ ID NO: 3734 - DNA, 17089 bp, synthetic construct
  misc_feature 1..17089: note = Synthetic
  source 1..17089: mol_type = other DNA
aaatgccctgcacggtgtggttgggcagcattggcaagcacgatgttttgattagttcgcgcactgccaacggggtagactccttttgctctagccgtataggcaaccgcattatgaatgttggtgatgctgccgttaatcccagaggaataaagttgtgtcgtgactgttccgcttgggttgttcgtatcaagcaacacggcatgaacgatgatttgatttttgggaatgaagtcagaggaatgtagatccgttgtgttgcgcatgattacttgattattgaccaatgcccattcaaccaagccctcaaagtttgccgttggcacgacttgccccgaagctacggcactaggctgccctgcatcaatccatgcttgcgctgctgcttggcttgaaaacaaccgcgcccgattcgcccctgtggcattgccaacacgtaccgcccaataggtttgggttttgttgactaagcctgtggggatagtagcaccttctgccatcattaagcgcacggggatagcacgaccattcaaattaacatcgttgcgcaacacttcacgcacttccccattggcattcacccacccaaacgtcacatcggctgcaatgcgtgagatttctccatgtcctgtttcttcagtataagacggtgcaatgagatgctgcgctgcccctacgggttcatcaatcgtgtaaatgaatgaacgctcttgtgccaagcgtgcatcggcaggtgtgtgaatgacgatgtccccactgccttgcgttgttgggatgatgcggttcgtatctgccaccgcatcggcacgtgtgggatagagcgcgaatgtggtgctgctaaggctgcgtgcaaaataggttgtgccattggtgaatcctgcgggaacagagccaccccagttgcgtatcaccacgggaaatccagtcggggtgaggaggtggctggtgcgggtaatcacgcccgttgtggtgttaaacgcgcttggttgcatcaccaaacttcccacttgcggggcaggagcgttgtcttgcaactgcaccacactaatgctataaataaagcgtttatcgcacatggattgcgccatggctaatttggtgttcgcaccgagcatatctaaagttaggcttttaccatccgattcaccatgcgaaaaattagggtcacggctaagaaatccctcaaaataaatactagggaatccgccaacatttccccgcaatggcagctcattaagattgctagtcgaacgtgcaaattgcgcaagattgcccgttttatccttccactcatgtaccatggtttgcgccgtgcatgtgtgcgtacccgttccaccatcggtcaggcttatcgcgccacgctgatagcggtaataatcggcaggaagcatcgtatcattcgtggggaataatggcgtatcattattgggtgagagttcaggcgcaacgggatacaccaccaacgccccgctttcttgcgaaagataataatcagtattcagttgcaatggtgcggggagtgtgccagttgtggtaaaacgcactttggttgcacgcccgaatgcgtcacgattgaacgcccacgtcttttgaatcctcccgcccgatacatccgcagccacaaaggtatctgaaaaattggtgacggcaagattggtatcggtggcaaactccgcataaagtgtaagtgcttcaactgtcgtcaccgtcaccacgttactatatgcactattacccacggagttggtgctgcggtggcgataatcatatgccgtccctagttgcgctaccagcgatgctacttgataatgttgtccagttgttcgcacccgctgggctgcgctcaatccgctgtgccgtaatcgctgctccgccattattaggtagcgtccatgtgagttgcccacctgttgcggttggtgttggcaaggctaggttagatacggctgatggtacggttggctgtgcaggttgcgctccagaagccgttgatgctaataaaagaagtaatgatgacataataattccttgaagatgatgatattagataaacttcaccccatagatgggcgaagttgttgtctaacttcaccccatagatgggcgaagttgttgtctaacttcaccccatagatgggcgaagttgttgtctaacttcaccccatagatgggcgaaattaagagagtttcttaatagcaggggcgcgatcaccaaaccaccatgcaaaagcagccgatgccatgaacaacaccccttcaacgatttgcgtgcgaatatgggtgttctcatctgccaatgtaatccagatcgcccacactaaaagaatgagtaacaaagtgaggagtgggcgcaccaaacgcaacacattattcacccattggcttgttgtgcttgttgcgctatcatggctataggatgctgcgcgcatggcactataggcgtgcgtttcagcaatcgccaattcgcgctccgtctcatgttgacgcacacgcatctgcaactcgtgcagcttcagctcatgctcataatcttgcttcttttcataaagcccgatgatcttactcacccacgagccaagcccacctgcaagtacccctactatcgtttcgatgatcataactcctcctttttattgagttagtccgcgcaccccatatagtcgtttgactaaaaaatgactcattttttatgtcaagaaacgactataccaccatagctggctgcgcttttgtttgtccgcgcaccccatagatgggcgcgcttctacttggcattatggagagggtcacgataagcggaagtgataatcagtggcgcatcgatgatttctctcatgcgttctaacctcgcaatcgcatcatgattcaccaataatgatccatcgcccttgcttgccaactcacgcggtatcagggatcgtgaggttgcgggctgaggggggagggtaataatcggcattgaaaccaatgcgagtgtcgctacaatccatatcatgtagaagtctcgctatgccaaaaacgcacaaaaaatatccccgcagggcgaaccatacggggacttgggctttcaaagattatactctacgggagttgcccattcccttatcataacaacgcttccgacacggttatgctctacaatgttaagggtatcccaaacaaaagacattgtcaacacgccctagaagggaagcgatgacttactataaaaactatttgataggcgtattttttgtgattatgattcacctaataaaacaacataggtacgcatcgtgaaagattttgaagcacggcaaccgctgaagcggcaattagatgaacggaagcgtccaccgtcctttggcacacgtgaagtatggtggtgtcatgtcggagtcaatgtgggctttgaggtgtttggcaagggagcaggctttacacgtcctgtgttgattgttaagaaatatagtggtgctacttttttggggataccgctgactacgaaacacaaagaaccggtttatcgttatcctatgcacatcaaaggagagccatcatatgctctactggatcaggtacgcacgatggatgcaaggaggctaaattcaaagatagaaaaaatttcagaaatacaattttctttaatcaaggacgctttcgtgcgaactgtttttgatctatagcgacaatatctagttagttctagctaaccaaagtttttcgccccccgaagggggcgatattggaccttacgatcatctactgatagagcatcgctactctataaacacattatgcatgaatctcgtgcttttgtcaatgcatattgtcacgtttttactagtgcgcgtttcagtaggttggttcttttttagagcaaccctactgaaaattcgcgcactaattcttatatttatagcgcgacctagccgataggttagttaaaaaacctatcgctacgcgctatagtaggatgcaaaagtcaagcaaaaagcaattatccaccataggaaacacattatgagatataatttaggattagacatgggcattgcatcggttggcattgcagcgatacactccgacacgtaccagattttaatggcagcaacacgtatttttgaggcagcggaagaaccgaaaacgggtgcatcgcttgcgcttcctcgtcgtgtggcgcgtggagggcggcgtgtcattggcagacgcagaaaacgaaaatcagacatacggcagatgttggcacagcaattcacgatggaacgtgcgcagattaatgccatcattgatgcgccacagactagttctgtatgggcattgcgagcggaaggcatagatcgcgccctaacgccagaagaatgggggcgtgtgttgtttcatattgctaagcgtcgtggttttcagtctaaccgcaaagatgcacagcccaatgatgtggaagggaagaaggcactcagtgccgcgaaagccttggaagaggcaatgcttgcagcgaatgccccaaccatcggcgcgtatcttgccacccaagcgaagcaacgcaatggggatgggtgctatgaacattttgttactcgtgatcgtttgcgtgaagaagtcaacctattatttgccaagcaacgtgcgttccaaaacccctatgccgatacggattttgaagcacgctacacgcatggtgctttttaccaacgccccctcgcatcagtggcggataaggtggggatgtgtggatttttccctgatgaaccgcgtgcgcctaaatgttcgtatagtgcggaattatttgtgttatggtcacggctgaataacatcaaaattatcacgaacggcatacaacgtactctcaccttggatgaaatgcgcctgcttgcagaaaaagcgcatcaaagcaaggaagtgacgtataagcaagcgcgcaaggctttgtgcatggatgaagaatcgcgctttaatctttcgtaccgtcaaacggataaaggtgatacgacatggaaatccgtgcgcgatgcagcggaaaaggcgattattgcaaagctgaacggctatcatgcgttaaaagaagcaatggatagtgggagcgttatcgattggcacgcatggtgtgatggcaaacgcaccacccttgatgaaattgcacggattctttctttttatcctgacgcagcgcaacaagaagccatgctgatgccgctcggggtcacgcaggcacaatgcaccaagctgatgaatatcactaactttagcaaaacggtcgatgtatcactcaaggcgatcgctatgctgctaacccatatgcaggaagggatgcgctatgatcaagcgtgcgtggcagcgggaatgcatcatagcacacgcagcaagggtgcgatgcaacgcgttcccatctttgaggatgtacgcaatcctgtagtgaaccgtgccttggcacaagcgcgtaaggtgatcaatgccgtgatcgcccaatatggcttgcctgagtgcatcatcgtggaattggcacgtgaggtgggcaaaaatcgtgatgatcgtaagaaaattgaaatcgaacagaagaaaaatgcagcgatgcgtgaggcttctaaaaaagagattgcggaaatctatggggtacgcgtagaggatatacgaggtgatgatgttcttaagcatcgcctatggaaggaacagcaaggtttctgcccgtattcgtggcaagaaattactccgcaaatgctacgggatgcccatgccacgcagattgatcatatcatcccctatagccgtagtttcgatgattcctacatgaacaaagtgctgtgcattgcttcgcagaaccaagcaaaacaaaataaaacgccgtatgaatatctggatgatcgccgttttgcagcattgcaggcattcgcgcaacgcttgcccaaagcgaagggggatcgcttaatttccacaaccgtggatgaggagggctggaaaacccgcgctctgaatgatacgcgctatatggcacggttgctgaagaaccatctggaaacctcacttcctgtgaaggtgcaaacccgcaacggggcattaacagcgaaattgcgccacctatggggattccctgagaaagaccgcaccacggatcgccatcatgcgttggatgcgattgtgcttgcttgttccacgcaaagcatggtgcagcaggtggcgcaggaatataaagcgcagcggagtgttgagcgaaaacctatccccaaaccatacccaacattccgtgaggatgcatggcaatatgtctatggcacagaagggcaaggaggcatttttgttagccgaatgcccaaccgtaaggtaacaggagcagcgcatcaagataccatccgcagcatccgccatgatgcagagggcaatcagaagattgtgcagcgggtaaagttggcatcggtgaaattggcgcatctggaagcgatggtggataaggagcgcaatcgtgcgctctatgatgtgctgaaagcacggctagaagcgcatggggatgacccaaagaaagcctttgccacccccatctttatgcccacgcgtgacggcaaacccgcaccacgcatccacggcatccgcatcatcaccaatgaaaaaagtggcatcccgatcaatggcgggctagcgagcaatggcgatatggcgcgtgtggatgtgttccgcaaagcaggaaaatatttccttgtgccgatctatgtgcatcatttggcaggcgatgcgttgccgaataaggcaattttggcagggaagcctgaaacgcagtgggaaaccatgcgtgatgaggattttatcttctccctatacaaaaatgatctggtgcggatacgtcgcaaatcagaagaaatacttgggtactataatggaacagatataagcagtgcaagtattgaacttgtgatgcacgataaaggaaacttcttaccagacaaaaaaggaaaaaataagaagaatccatggcggggcattggcgttaaaacattattagggttcgagaaatacactgtagacgtgttgggaaacatatcaaaagaacctgttgcaaaagaggtgcggtgtggcgtggtgcacagtgatgattcagaatccagcgaaattgcgcctgaataaggggcagttgcatctggatcgtgatgagggggaagtgccaaaaaacaagaaggaatagtgtcatgaagagacctctgcatcactctcaatttttgtcatgcccgcgcaggctggcatccataaactactgttgttactagatttctgtcttcgcagaaatgacgaatttgttagttatatgcaagggtttgtaatggacaagatcgcgtggataaacatcttaaacgcctacaagagcatgtacccaaagcgggtagtgttcgcgccctgcaagttaccgatagacaatatggaaggatgcaaattcttgtgggaacaaagcgtaataatgagaaaaatgccccagaacagcttagtttgttctgaggcattttgccattttcatcttgaatttcaagatgttcgtcggaaggtagtatagcataaccgtgtcggaagggatattgtattgaacggcaagcgcatgaaggctggaatcaccttagaagaagatattcatggtaattttttctataatctgaacgatgcttccaagggcttaaaagaaaagagggctaatgttatcaggttagaagcccgagcgttgccctctgtttcagaagagagtcgggtacagcgtaaggttatagccttgcctcccgactcatatgctcatgatacaaaaaaacttctgcaaagtcaagagccattggcggatgatggcattaatttagcgataatcagcgcgaatgatgcatgagattgcctcccttcatgatgcgcctgcggagatattggtaaaatgcatgtacctcattgcctgtgtatgtcatgccaaaggattttattaggcgaattgcaaaaaatctatgtgtcaggattcgttagagatacatatgatcggtatttaggaagcgttgaatataatctttgacaccttcttctaaggtcatgaagggggcatcataccccacctcgcgtaattttgaaatatccgcttgcgtgaaatattgatatttggtgcgtacctcgggtggcatatcaatataatgaaagaggggtttatgtcccatcgcgttgaaggcggcggtggctaaatcttggaaggatcgcgccttgcctgtgccgatattgaacatgcccgatatttcaggatggatgacgaaccataagaggatgtgaatgcaatccatcacatacataaaatcacgcaactgcccgccattagaataatctggatgctccgatttgaacagattcacagggcggttggcacgtacatgggggaagatttgacacagtacgcttgcttgatcacctttgtgatattcatgcggaccgtaaatattgaagaagcgcaatccaatccattgctgcggttgtggttctccacgcgcaagagagcgcgctatatgatagtcaaacgcatatttgctccagccataggcattgagcgggtgcaattttttgatataatcgagcgacatatcatcacgaaaaccatgttcccctgcaccataaacccccgctgatgagccaaacataaagcgtttacgattctcaatcgcccaattacgtagcaccttcgggaaagtgacgttttgttcaaccgccatatcagcatttttttctttggtgttggtcattgcgcctagatgaatgatcatctcaagattcgatttattggcttctagccaaaaaagcaattcattgggggcgatgatctcgtcaggtggaaagccagcaagatttttccatttatccccatctctgagtagatcagcaacgactacccgatcattcgggaagcgttgggtgagtgcagcgactaattgagagccaataaatccagctccgccagtgactaaataggtgcgcataatataccttctgtattatattttcagatttcagtataccccattctttttaacatacgataaagaatcaataaaataccagataattgctgcaaagcacaaagtgcgcgttatcgttgtgccttgtgctttgcttgctcttctaagttttccaatgcggcaatgcgtgtttcaaaacttggatgggtacgaatataatgttcgatatgttctacccattttttccgattggtagggggatattctgtggtttccgcttgatcacgtgcaatttttttctctaatactgattccatcgcatcatagcccactacttttcctgcagtggcatctgcatttaattcttgttgacgacgaaatgccgcataaggagcttctgttgcgatttgggtgaggggaccagcaccaacaaaagcaaagattgaagcggcattttgtttgatcttatcaaacatggacggatctgcatctgttggcttcaagacatgatgtgcgaggaggcagcaccctatttttgcgccccaatccaagacaacccgcccaatcgatacagcgagcgatacgctattatcatgctgatgtgcaagctcatgcgcgatggtggcgcgtaattcatcgggagtggagttagcaattttttgatagccaagcgcaacggtattattattaatatgcatggcttgctgttttgtgtctgagtgatacaaaacgattttaggcgttttgaggtgcattttttcactaagttcgtgaataaatcctatgacctccgcatccgtgattgggtctgcaacatgcgcctcaactgcccctttacgtgccaatgccagcttctcaagtagtgtcacacggtgaggttcaggaaaaacaagttccttgagtgcaagaaaaggttcaaacacttcacgcgatatggtaagaagagcggtgcgtagcttagaattcatagcgttcatcatagcgagtgactatgacattatgatgacgattgtcattgttttgtcatgaatatgcgctactatatcaaagaagattattttttggagtcgtattatggatggtcctagcccaatgagtgccaatatggcgatgtttcagcaaatgcagcaaatgcacgctacgccgggggagcgtttcttgtgctttcctgccttggattatagtgttgggatgcccaacgggttgatgaattataggattggtccgcccttattttcatcgctgagtggtgggaaatttggtccactttctgctcttggtaatagtatgagtcgttgctttgtcgatgtggggacgctgatgaattggtccatggcaggggtagaacagcattcaaacatcacccatgcacatattgagacaccccatatcgaagcaccgcatattcaaggagcgcagattgatgccccgcatatttctgcacctgaaatacgcgctgctgctgcgagtgcgggctttggggatatgggaggcgcaccgattgaagcaccacgtggggtaggcacgcgtccttctgtggcaatgggcatggatatgtaggcgggggttagccttccaaaagatcgcactgagcgcgtagatgcaccaaccagcgcacatgcgcgagcatctgcaagcggttggtgcgtaattgttcatcatccgcattcactaatactttatcaaagaagcgattaagtggctctgtgatggggtagagtgcgtgccacgctgcacgataatccgtgccaagttcctcattgctgcctagtgctgtcaaaacatggtatagatcacgttcttcttcttgctgcaacaggcgttcatcaagtggtacgcgatgtgaggaatcttctaataatcctgctttgcgcacaatattataagcgcgtttataggcggcaatgaaggccgctcccgcatcacttgtgatgatctcggtgagtatgtggctgtattccacaataggcatgatgctggttttgtggcgatgcgtaatcgcttccagcacatcataacggatgccttcatctttcagcatgactttgaggcgttccgtgatgaaatgatagatagtcgttgcaatgtcggggaggggatgtgccataggaggcagtcctttaagagcatgatcgatcatatccatgagggatagttgcttcaatgctggatgcgcccggatgattttaataattcctagagccgtgcgtctgagtgcgaacgggtctttcgatcctgtcggcgcttcccctgcggcaaagaggctgacgagataatccactttatccgcaagtgcaatcatggcagaaataagggcagtgggtgcgctatcatgtgcgcccacaggcagataatgatcacgaatcgcatctgcaacctcggctgcttctccttgcgcaagcgcgtaataacgccccataatcccttgcaattcagggaattcacccaccatgccagtgactaaatctgctttgcataattgtgcagcacgggttatggctgcatcatttggggcaagatagtctgctaggcggacaatacgctgcacgcgtgcatccatcatgccaaggtttttatggaacatcatcgaggataaatcatgcgaccactgatcgagcgttttctttttatcctgctcccaatagaacgccccatcatccaagcgggcgcgcagcacacgttgattgcctgcgatgattttagcaccgccatcatgcgcttcaagattggcgatggtgataaagtgcggggcaattttgccttccgcatccattaaggcgaaatatttctgatggtggcgcatttctaacaccaatacttcaggcggtaatgccaaataagcatcatcaaatgttcccatcaatggcacgggatattccactaatcctgtgacttcatccagcaagcctgcatcgggtttgatggataatccatgcgtttgcgcaatctcatcggcacgcttggcgatcaaggctttgcgctccgctgcatcgaccatcacgttcgcggcagcaagtgcagctttatattcgtgtggatggttgatggtgagttccgcatcgctcataaaacgatgcccacgcgttgtattgcctgccactaaatgcccaaagcgcacaggaagcaccgtatgatcgagcaaacagagaatgctttgcattgggcgcacccatgcatgatcataatccgcccaacgcatcgatttttgccaatgaaatgaagccaatagtgcttccacccatgtggggagtatgtcggataatgccttgcccttttggtggatggtagcaaaatagacatcctctttgccaaccgtgcgcacgtcaagcgcgctacgttccatctgcaccgaggcacaaaagccgtcaatggcggctgcgggagcgttgacttttggtcctttgcgctcaatggtttgatcggggagtagcaaaggcagccccttaatatgcacgcagaggcgacgcggtgtgacatagccatgcacggcatcataggtgatgtgtgcctcagaagcatatttttttagcccttcgcataattgcgtgatggcactttgttgcatacgtgcgggaatttcttcgcataataattcaaggaggaagtctgccatagggtgcctagaaaattttaggatttaatatgattatgctcatcaagcaaaataacggtgggttggtgctgtgctgcttcttccgcgctcatggaagcaaacgcgcaaatgatcaccacgtcatctttctgcactaagcgtgccgccgcaccgttgacgataatatcacgcgatcccggctgcgctgcaatcgcataagtcgtgaaacgtgcgccattattgatgttcaacacatccacttgctcattaggcaaaatgcctgaggcacgcaacaaatctgcatcaatgctgatcgaaccttcataggtgagatcgctgcttgtgataactgcacggtgtaatttagcttttagtagggtaaggaacataggaggctacagagtcataggttatacgatgtgacttctacatacctcataaaaaccaataaattcatcattcctgcgaaggcaggaatccagtcacaaaagtagtttatggatacccttcttaagcgggtatgacaggaattgagagttatgtaaaggtctcacgatgtgaacctactcatttcttgatcaaaatgcaatggggaattatagaagctatgccattaaaaaaatatagggtgcaaatttcatgcgtgctgtatcgttatcgtgtgatggtgatgggatgagggggtgtggtagaagaagcgtaatgcactgagtcagtatcaatatgtgttgaggggggggcaggggaatcaatattttttgtaggtgttatgacggaagcaccaaaggggtcaatccctgttgcgcatattgctacttcacgatcaagtgccattttttcgcttccttgtaatcctgcaataaaacggttgcttaaacgtaataactctgtggattctttgataacaacgccgatggctgctccctttgataaaaaagaaagtgtgagccgtgtgccatgatcaacagtctgttcaatggctttgcatactacaggaatcatcaaaccaagcacaatttttgcaccaatccaaatgactggctctgcaacatcttgtgtttgccctggaccataggcgcgtcgttcaatttcaaatttcaataatttttgtaagcgcggattatcttctgcttggttgcgcgtgatcgcatcttcaagataacgttccgtcatgcgatgcaatatcgggtttgccaattccgttgttttgcttactagccaacgatagggcgttcctaaagcgaaaagagcatcacctaatgcgtgtctgaatgtgttttgttgtggtgttacgtcacgatgcttatccattgccataaaataacacatatggaataacgaaacaacaaaaaataaatgcacaatcataatgacaacgcattataatactgagagttctgcatgactctcccttcttttcatagttggcgcaaggcggttatccataaactactattgttattggattcctgctctttaagcaaagaatgacgaatttgttggttttggggttatggagagacgtcatgctacaaaaatttacgacatatctttgattaagtgagggaaaatttcaccagttctgtatctattaaaaaccataatgatgcagccaatgctgatccgaatcaaagaaggtacgaagatcggggatgttatatttcaacatcgctaagcgttcaacacccataccaaaagcaaagccttgcacctgctgcggatcaagaccgcaggcgcgtaatacatgcggatgtaccatgccgcaccccattacttccaaccaatcatggttgccaccaataatcagcccatccttattgcgggtgcagccaatatcaatttcagcggatggctcagtaaaagggaaaaagctcgggcgaaagcgaatctgcacatcatccttaccaaaaaagaggcgtaaaaaatcgctaatgcagccctttaggtgtcccatatggatgtcacgatcaaccaccagcccttcaacctgatgaaacatcggggtatgggtcacgtccgaatcagagcggaaggtagaaccaggggcgatgatacggatcggaggttgctcgctacgcatagtacgaatttgcacgggcgatgtatgagtgcgtagtacgtaggtggtatcttcagacgctgcatcaatatagaacgtatcttgcatttgccgtgcaggatggtgatcggggatattgagtgcagaaaaattatgatcatcatcttcgatgagtgggcctgtgcgcaccgtgaaccccataagtgcaaaaatatcatggatttcttgcatgacggcactgatagggtgtgtacgacctgtgcgccacggggcagcatcaagggacatatcgaggcgttcacgtcccaaacgctcatgctcggcacgttgctcaagctcaagacgacgcgcatcaagctcagcaataagaagctgtttttgctcgtttaacatctgcccttgggctttgcgcacatcaccatcaagagcggataaggcttttagtgcctcagtgatcactccttttttccccaaaagagaaacacgcacctgctccaacgtcgttagatcagatgcgtggcgaatatgcgctaaatgctccgtactatccatgaagtgaacctacgctgctttgcgctccaacgcttctttcgcttgggcaacaatagctgcaaatgctacaggctcatgtactgccatatctgcaagtactttacggtcaagatcaatccccgcaagattcaagccattgatgaattgcgaatagactaagccatgctcacgaacacccgcattaatacgttgaatccataggctacggaagttacgtttgttggctttgcggtcacggtacgcatattgcaaacctttttcaacacgattacgggcgatacggtaacaattttttgcgcgtcctctatagcctttggctaatttcaaaaactttttgcgacgctcacggcttgcggggttattagtagctcttgtcatgatatttttcctttaatgtaacagtgattaacgaccatatggcatgaattgacgcaaaatctttgcatccgcatcacatgcaatcgttgttccgcgttgtttgcggatgaatgagttagaacgcttcaccataccgtgctgttttccagcatgattacggcgtaccttacctgttcctgttaaactaaagcgtcctttaatactggacttcgtcttcatttttggcatttttctctccataaaaagtgagtggttagatagataaattaatgtgcaatgcacctgcgcttcacgaacctacaaggcagccaaaagcctgcatgttccaagataaagcactatgataatgttcttatatcgattatcatagataaatgcaagtctttactgtggtgtatcacacgcatttgtcttttccgtttcataggcgagaccaacaatttcaggattgcgatctttgtagcgtgtgcgtaattgtttgagtactacgcacgcctctctttttttattcatatgaatgagtgatttggatagtttgtataaattatccgctgctttagtgccgtttggctgatgctcaaaaccacgacgaaacgtatccgcagctttcaagaaatcgctatgtacatagtaggtttcaccaagccaataataggcattgctggagaggtggtgcgatgcatggttggcaataaatgtattaaggcttgtctgcgcttgcttataacgctgctctttgatgagggtgatggctgcaccatattcttcggcaggggatggttctgcacccgaagatttactcggtatatcggctacggtggcgtttaattcttgggaggggacggatgtttttttttgatcttcaagcgttgtggtttcagccgctggcacttcgggtgcgttgcttggttcagaagctgcggcatttgcgggttgtgaagttcccatattcgcgctttccagctcttgaaggcgatattccacatcttcattcatcgatttgacttgacgttggatttgctcaatgccaaatttattttcttcaatttcaccgcgcaagacgcgtaattcttcacgaatcgtggcaagttcaacctgcatggaagataaggatgtgcttgctgtgccagaagtgccaccctgagattgcacagaatcaagacgacgttcgagcgcgcttaggcgaccatctaaattgataggaatgcgttgtgcgtgtgcaggtgatgcgatgatgagtgttaaaacagacaatgcgctaagtgtaagagaagataatttcatcatagtgtcagaatatccgatatagttttttgccttcttatcatagaataaaaaaactcccaacaatatttcatcatttcatcgtgatcatgcgctcattatgttttctgaggtgtgctaaagcaacgcacatgatcctaaaaaaaacttaccctgatcctaaaaatcgtgatgcttcatccctgccaaaaagtttcatgaggatatagggcgcgcttgcgtgccatgttttatgatgatcagcatgatgcgtaggggggagctgattcaaaaactgcatcgcttcatttcgggcta

SEQ ID NO: 3735 - DNA, 14362 bp, synthetic construct
  source 1..14362: mol_type = other DNA
  misc_feature 1..14362: note = Synthetic
cagtccctcaccagcccggagttccagtggcgcagcatcagctactatctgagccgcaccggtatcccgatcaatttcggtatcaccgtggtgctgggcttcatcgtcggcgcggcggtagcggggcagaccttctatatcttcgtcatcgagaacctgcgccagttcggcgcgctgaaggccatcggcgtcaccaataaacagattctgaaaatggtgctactgcaggccgccgtggtggccgccatcggctatggtatcggcatcgggctgtgcgcgctgttcttcttcgccacggccgatgtggcggcgctgaaaggctttgagctgcactggcagatcgccgccggggccgcgggtgccgtggtcgccatcatcacgctggccagcctggcgagcatccgccgcgtgctggtgatcgacccggccatcgtgttccgggggtgaatatggggttggtgcagacaaggaatatcgtgaaggactttcccgccggggagacgaacgtgcgcgtgctgcacgacgtgacggtggatgtgaacgcaggcgagctgaccatgctggtcggtccctccggctgcgggaagacaacgctgctttccatcatgaccggcattttgacgccgagctcgggcgaggtcatcatcgacggcaccaacctcaccgcgctgcgcgaccgtgagaaagtgctgttccgccgtgagcggctgggcttcgtgttccagcagttcaacctcctgcccgccctcactgccgccgagaatgccgccgtgccgctgattgccgccggcgtgccgttcgaggatgccgtggcgcgtgccgaggcaatgctcagggacgtcggcatgggcccgcataccgccaagaagccaaaccagctttccggcggccagcagcagcgcgttgccttcgcccgcgcgctggtgcatcgcccgcgcgtgctggtctgcgacgagccgacctccgcgctcgatgccaccagcggccagcaggtgatggagattctgcgcgctgtcgcattgcagccagattgcgccgtcatcgtggtgacgcatgacaaccgcatctaccatttcgccgaccgcatgatccacatggcggacggccgtatcgaacgcaccgaagcgaggggagagatccatgacgcgtaagacattccggttttccatgatggcgcacgggctgcccttgctggcggcctgcttcgtgcttttcaccgtgaaggagttgctcagcaagcccgccgccgagccgcagacgccgacctatgccccggtcatcgcgccgtacgacgcgcgggtggccggcatcggcatcgtggagcccaaaagcgagctgatttcgctcggcacccatctggatggcatcatcaacaccgtgcatgtggcggtgggcgacaaggtgaagaaaggcgacgccctcttcaccctcgatgagcgcgaaacccgcgcccgcctcgccagcgcacgcgccacgcagcaggaagccgtggtggcactcgccgacgccaagagccagctcgccttctatgaaaagattgccgatcccgccgccgtgagccgcgaggagctgacccgccgccgcttcgccgtgcagcgtgccgaggctacggcgaaggaagcctccgcccgcgtggacgaggtggaaacggaactggcccgcctcaccgtgcgcgcgcccatcgacggcgaaatcctgcgcctcaatgcccgccccggtgaatatgccaagaccggcgtgctcgccgaaccgctggtgacgatgggcgacacctccacgatgcatgtgcgcgtcgaagtggatgaggctgacgcgcaggcggtgaaagccggcaagcctgccaaaggcgcattgcgcagcgccggggacaagaccgtggacctcgctttcgtgcgattcgaaccattattgcaacctaaaggcacactcaccggctcggcaaacgagcgtgtcgacacgcgggtgctgcaggtgatatatgcactgcaaggcaatgatatcggtgcctattccgggcagcagatggatgtcttcattgaggcggagaaggccgaatgagatcgctcctcctcgcttcgctactgctcacggcctgcacgctggatcatacgccaccgggcaccacgcctgcggcaccggacgcgtggactgcgccgctgccggaaggtacctccctgcccggcctgtggtggcaggcctacagcgacgagacactgggcaacctcgtcaccacggcactggaaaacagcccccgccttggcgaggcaaaagcgcgcgtcgccgaagcgcgcggccagcgccgcacggcagagggcgcactctttccgcaggtggatgtggctggcacatcaagccggggcaatcagggcatccgcacctttggcaatcccaacacgctttatgaagccagcttcgatgccagctacgaaatcgatctgttcggtggcaacgcggcgcgggtggacgccgcagaagccgacattcgcgcccgcgaggcaagctatgaggatgcccgcctgaccctcgccgccgaagtggtgcgcgagtacagcgactaccgtcgcctgcaacggcaggccgcgctcaccggcgacaccgtgacgtctcaacgcgaaggactgcgcctgacacgcacccgctttgccgcgggcattgcgaccgatctggaggtggcgcaggccgaatcgctggcgctcgccaccgaggcgcagttgcccccgatcgaacaaggggccaaggctgcgctgctgcgtctctccgtgctgacggccctgccccccgcggaggtgcaggcgcgtctgcaggaggcacggcctgtgccggttcccgatgtcaccccgctgctggagcagcccgccgtagtgctcgcccgtcgtcctgatttggccgccgcggctgcgtcactgcaaaacgccagcgcgctgagcgtggcggagacaacggaactctacccctccatcaccctttccgccctgttcggcgtgcaggacacttccgcgttcggcggtttcaacatctggtcgctgggggcggggctggctgcgccactgctgaatttcgggcgcattgaaggccgcattgacgccgccgaggcgcgcgaggaagcagcctatcaggcttatcgccagtcgacgctggaagccctagccgatgtggagaccgctctctccgacctcgtccagcaacgcaaccgccgccttgtgctggccaaatcggtggaagccgacgcccgcgcgcttatgcttgcccgcacgcgctacaccgacggcatcgtgccgttcctcgacgtgctcaccgccgagcagcaggcgctgaaaagccagctcgccctcgccgatgccgaaggcgctgaggccacggccttcgcctccctaagcaaggcgctggcactgcctgtggccgccccgtgaggtcataatttagtttcgccaaggtacggcaatcccctacatatcatgccctgaatgatatgatgcgtggaggcgtccttatgcagcggggaagggtcattccctcttcggcagtgaccggtgtcgccatcggaagtcaggccgcgccatggacgcactgaaccgcgctcatgtacgctgggccatgccgctcagcgtggcggtgaccgcccttgcgctctggcatccgccaaggttggaagctcaacttgtgctaacgctgctgtctgggcttctgctcggagcgccgcatggcctgacggatatcctgcatttgcctcgcctcggcggcatgctgccaggcgctttagctaagcgctggcccagcctcacaggtatggcactttatgtgatgggcgctggactgtttctgtggacgtggagcctctggccggtggcgaacctgtgcctgtttctgctggtgtccgcctggcatttcggggggcaggatgtgaaggcctatggcggggcgctgcgctatccgcggatgaccggactgagccggggactggggctggtggggatgctgattctgccgcatccggaaaccagtacctatttcaatcaaatgacgaacacccaggcctttcattcacccgaacatgccccctggttggcgggggcactggccctcctctggctcggctcggcgctggcgacgcgacaccgccttttcatgctggaaaccgccctgctcgcaatgttcatttatgtgctgccacccctgattggcttcaccctctatttctgcacgtggcacgcgccgcggcatctcatggaatacggggaatacatcataatacacgcatatgttacatttctatcatatctgacgttttttacgattatactctatcttgttttttcaattttctggactgcctccctctcccttccactctctcaggttgaagcgctcgatacactttggttcttttttagagtgttggctgccctaacgatggttcatgtcatggtggccatcatggaggagaaacggacatgacaaccgcctaccgctatgacctaggaggcatccgcgcccccggcattggccgtctgcatcagaccagcgatgagatggcgcaccctgcgtctgtgcaggtggatgaaaaggcgctgcctgagctttactcataccccaacagccaaaggcctgcccgttcatacctggacatggaagacgcagaaatccagtgcaccattcgcgctgagggcgccggcatccgcgccacgctttactggggtttcttctgcgtcatcgcgctgtgtgtgatcgccaccctcatcaacaatacgggattcgcgcagattgaacagaacatgctggccatgcagcaagaacgtctagccacccgggccgggaatcacggcgcgctggccgatgatctggaaaggctggcgcttggcctgagcgatatccccgaatcagagtcattgcgccgcgcctccgaggagcttcgcaagttcgaccgctaccagtcaaagagtgaggagcaggcggggaccattctcaaaacggtgagcagcaactcgcgcaccgcgctcctgctggcgctggcgtccatcgtcagcggcctcgccatctccaccctcatcggcaagaaattcgcgggcgccatcaatggcctgagcgacacgatgcgcgagctggcacgcggcaacctggacgtggaggtcatgccccgcaccaaggtgggcgtggagctggcccgcatgtacagcgccatctgcatcttcaaggtcaatgccgaggaggtggcgcggctgaaggcgcaagaagagcaactcaaacagcagaaggagcgcgatctgcgcgagaacctggcgcgcatcgcccagatcctcgacgagcagatcatgcaggtgttcgacggcatccgcgccgaccagacctcgctcctctccactgcgacccagatcgaggaagtctccaccgccctgcgccggacggcggaattgaccagcagtatcatgggctcgatgcatgcaagcgcgagccaggtcagcgaggccagtcacgagctggcgacgcagattcaggccatttcctccggtgcccacgatgcccgccagctttccgccgatgccgtcacacaggcgtctgaaagcgtcacgcgcatccgcgaactggaacggctggccgaccgcatcggccagattgtcggcatgatccaagccatctctggcaagaccaatctgctggcactgaacgccaccattgaagccgcgcgggcgggcgatgcgggacgtggtttctccgtcgtggcctcggaggtgaaggacctcgccaaccagacggcgcaggctacggaagaaatcgcctcgcaggtgcaggtcatccgcgacgaggtcaaccgcacggtgcacaacatccacgacatcgcgcaggtgatcgagcgcctctcacgtttttccgccgagattgccgaaaacgtcatcgcccaggcccatgcgacggacgaaatctccaagctcatcagcagcgtctcgaccgaggtgcagcgcgccaaggaatcggtggacgggctgcgcgaggatgcggtggtcacccacaacgttgccgagcatatgaatgtgacgtcacgccagacgtcgcagtcggtggaagagatgagcaaccgcatccaacgtgtgctcaatcaccttacgcaggcggcctgaattacaacccaagaacaaacaaggagaagaaccatggaagagcccgctttcaatctgatgaccctcgccacgcagtatatgttctatgccacctttgcgggcatgcttgcctcggcggtctacatgctgatggagcgcaacaacctcaccccgcgctacagcgctgtggccagcctgtgcaccatggtggtggtgattgcctgcgtgaattacagcttcatgaaaaacatggtcggcatcgatggcgtctacgaatccctcgcccgcttcccgacgcagttccgctatgccgactgggtgctgaccaccccgctcatcctcgcctcactggtcctgctgactaactacccccgccgaggcgcgctgatgaccaagctcatgctggccgacctgatgatgatcgtgctcggctatgtgggcgaggtgagcatcaaccaggcgggcggcggcaccaccaccggctgggtctgcttccttgcctcctgcgcctgcttcgcgttcatcctgctcacgatttacaccgagctgtcgcacgcggccgccgacctgccgatgaacctgcgcgggcagttcgccttcctgcagaatttcgtgctgatcgtgtggatggtctacccgctcggctacatggccccgctcctcggttacaggggtgaattgctggccctgcgcgaactgatttattgcatcgcggaccttaccgccaagggcggcttcggcatcgtcgccatcagcctggccaaacggctctcgctgctggaaatgcaaagcctccaagccacccgcgcgtaagtacccgccctgccctgtcgccggggacttcctggcgacagggcgtgccagtaaagacaccacaccttgcggggcaatgccgtttcactttatagataaataagagaatctggcgcagggagtccgactaacttctccctgtaagccatacaaatgcttatttcttagataaagagcgaaaaatctactcgcatttctactctcacctcctttggattaggatgcagcttaatggctgtcattggatgtcgtccagttgctatgtaagctgaactggatatgctgactctgcaatgtgcatcaggagtttaagttgtattcgctcgattattggcgtttgtgtgatgagctatccgtgcttcatgccgcgcttcttattgttggaaaagacccatctgaaatctctgtatatgtcgaaaaatgggcagtacatgaacgccctgttggatatgaagctgccaaaacggctctcaagaacgccgtacgttcagggcgattaaaagccattatcgccatgaagcatggccaagaggatggaacgaggaagccgaggaaggagaacggcatgacgatatagatggcaaacagtatatcttcaaagtggagcctgactggaatgccacgaccatccatatcgatgatctgcgtgattggcttagaagcagagggtataactccggctttttcttttctcatagcgaacaaaaacccgattttctgaataatcagcacgccaattattcatccaaactcgctgccgcaatcgaagtgtggaatgccgtgacagaaaatccctctctcgcaaaaggtaaatcagtgaaacaggccatgatgatatggcttcgttctcacgcggggcgatttgatttaatcaaagaggatggaaaccccaatgaaagcggaatcgaggaagtcgcaaaggttgcaaactggaacacaaaaggcggcgcacccgaaacaccagtaggctaacctacctccccccctttttactaggcataggttggctttcatgaactgaggggctacacacccctcccccctgttagcagcaaaccataccacccctaccgctgaataacggggcgagttttcttaacccgcctatctatcagcgcacatcgatttcgcccatgttgccctcgtaattcaacaaacgaggagtaaccactatgaaatccaatgagctttccctgaaccaaggcgctgccgacccagcacgtgacagaattctgcgcctgcccgatgtcaaggcacgcactggcctgagtcgcagcagcatctacacttacatcaaggacgggaagtttcctcaccacatcgcgctgggtgagcgcagcgtgggttggtatgagagcgaagtggatgcgtgggtagcatcacgccagcgcgttagccggaaggcgtagggaatcgccttgtgcagcgtttccccatccacaggatcaggcttcggcatacttatacgctgaatgaggtttccgagttgctggttgttcataagaacactgtccgcatgtggctcaagagcggcctcagggcaatcgatgactctcgcccgattctcatttttggggccgacttaaaagcctacctttcgcaaaagcaggccgcgaagaaaacctcatgcaagccccatgagtttttctgcctaaaatgcagagcggcaagaaagccttggggtgagattgtggacatcaccattcgccgcccaaacctcttcaacatacatgcgatatgcgaggtgtgtgacacagccatgaacaaggccgcaggcatcaaaagccttagccaactgcatcaagcgtaccgagtccagcagatacacccaaggcacatagtagagaccctgccacccagcgtgagatgttacttacaagacaaggaaaagaaccagtgaaatacaatgcgaaaaacgagcgaatcaaacgcttctatttttcatatctcaaagatgcgacttttcatatctcaaagatgcgacaggtaaaagcgactcaaccattgagggcattcgcaaatccatcttcatgttcgaggaacatatcggattccgtgactttggagccttgcatcctgagcagatcattgccttcaagaagcgacttcaatttcagcacaaccttcgcacgggaaagagcatcagcattgcgacggtacacaccacgctccagcatttaaaagccttcttccggtggctcgcgttccaacccggtttcaaaagcaaaatccatgtgccagacatcgagtatttcagcctcaccgataagcaggtaagcgccgctaaggcagaaacctacaaagaatcccctaccttggagcagatattctatgtgctgcaatctatgcccacggaaagcgaaatcgccaaacgtaatcaggcattgatagccttcactctccttagcgggatgcgtgacaatgccatcatatccctcaagttgaagcatgtggacatcgtggcaggcctgattcggcaagacccccgcgaggtgaaaaccaagttcagcaagtctattaataccttcttcttccccgtggggggcaacgccaaggagatcgtggtcgcttgggtgaattacctccgcaagaaaaagctattcgggatggatgacccactctttcccaagtcagaaatgggcttgggcgaggatggacttttcaaggcgatgggattgagccgaaaacactggcagaccgcagggccgatgcgcgatattttcaggcagtcatttgagagtgctgggcttcgctattatcaccctcacctgttccggcatacgctggttgccttggggcaaaccatgtgcaagacgcccgaggagttcaaagcttggagtcaaaatctggggcataccgatgtcatgacgaccttcaccagctatggctctctaagcccacatcgccaaggggaattgattcgcggattacagtagttttttactgagtgtagcagtgatgtgaaaataagatgcccccgaaagcaagccttcgggggcagatactttgcggtatcatacgataccttattacagcaacgcgttccgacacggcaatgctatagacctagccataattgataaaattatctatcaatgtcaattgcaaatctcagtgggggagaaaccgcgatgggctacacactaggaattgatatcggcattgcgtctgttgggtttgcaggcgtttcggtaaaagaacaaactattctcacagctggggtacatatttttgatgccgcagaaaaccctaaaaccggcgcatctttagcggagccccgccgtacaaaaaggggaatgaggcgtgtcatccgcaggcgggctgttcgtaaatgtcagctacgcatgcttttccaaaagcatggccttcaatgcgttgaagcgatagataccccctcccccagaaccggtaaagggaatcctcccaaatctccttgggacttccgtaaagaggccctagagcgtcgcctaacagatgaagagttggtgagagcactttttcacataggagcgcatcgcgggtttcagtcaaaccgtaagggggctgaacttaataatttagaggggaagaaggcactcgcgggcgcaaaggagcttgaagtccgcatggaatccgccaatgcaagaactatcggtgcgtttcttgccagtcagccaaaaaagcgtaatggcgatggttcttacgataactttgttacgcggaatttactgcgtgaagaagtgtctgtgattttcgaaatgcaaagaaaactaggaaatcccaaagctacgccagaactgatgcaggagttttccaacctcgcttttttccagaggccgctacagtcttccgaaggaatggtcggcgaatgcacctttgaaaagggagaaaagcgtgcccctaaatgttcctactcagcagagttatttgtcgcatggtcacgcttgaacaataccaagattagaatgatgaatggtgaagatcgcgtccttacacaagaagaaaagcaacggctaatagacaaagcccatgccctcaaatcttttagctataaacaggcgcgtagcgaactccgccttcatgaagaagagcgctttaatatcagctatcgcaaaaccaaagaagcagatgactcttgggagaagatacgcgaagctaccgagaagtcatcttttatagtcttaaaaggttatcatgaattgaaaggggcactggatacagggagtgctctcgactggcagcaatggacaaacactcgccgagtgtcgctggatgacatagcgcgtgttatttcattttatgaggatgagacagaaatccgcacgctgttggcaccgcatggcttgagcgaagcacaaatgcaaggcctgttgaaaatcacaagttttagtcagaccgttgacttgtcacttaaagcaatcgggaaaatcctcccctatatgcagcaaggcatgacttacgacaaagcatgtgacgcagctggctacaatttcaatcgcaaggaaagccaagggcaaaatagagtgccgccctttaaggatgttcgtaatcctgtggtgaatcgggcgctagcacaatcacgcaaggtgatcaatgccatgatccgcacacatggcataccagagacaattatcattgagatggcaagagaggttggaaagcccttcaaagagcgcaaggatattgagcgcgagcaaaagaaaaatgaagcccataggaacgaagcgaaacaacacgctgctgaaattcttggtatgcaccccgataacataagaggagaggagatactaaaacatcgtctgtggaaggagcaggaagggttttgcccttattctggtgtatatattacaccagagatgctgcgggattctttggcaacacaagtagatcatattattccctacagccgctcgtgggacgattcctacatgaacaaagtgctatgcctaacagacgaaaatcaaagcaaacgagagcgcacaccctacgaataccttcatgctacacctagatggaacgcttttgtttcgtttgctgcccgccttccctacaaaaaagctgagcgtatgctcattgaaaatttcgatgaaaagaaggcgaaggattggaaagatcgcgcgttaaacgatacgcgctacatgacccgtttgctaaaaaatcatttggagcaaaaccttggtcttggccaaggcaaccgcgtacagacgcgtaatggccaactcacagcccatcttcgccgctcatgggggttcccagacaaagatcgtcgcaatgaccgccatcatgcactagacgcgattgtcatcgcatgctcaacgcaaggcatggttcaggagctttctaactggaataaatacgaagctaaacgtaagaaccccaccgaaagaccgttgccgccgaagccatgggaaagcttccgtgatgatgcaaaagctgccgtggagaaggtgtttgtcagccgcatgccagtgcgaaaagtgaccggcacggcgcatgaggaaaccatacgtagtattagggaagatggaaccggcaaacggcaaattgttcagcggaagaagctgagttctttaagccttggcgatcttgaaaatctggtggataaagagcgaaacattaaactctacaacgtattaaaagagcggcttgagcaacatggcggcaaacctgataaagcctttgctaccgctatttatatgccaaccaatgaccctacaaaacagggaccgcgcattcatgcggtgaacatcattactaatgaaaagacaggtgttcccatcaatcaaggactagcgagcaacggggacatggtgcgggttgatgtctttaagaaagatgggaagtatcacctcgtgcccatttatgtgcatcatttcgccagcaaatccctacccaatcgcgccatcgttgccttcaaagatgaaaatgaatggccggaaatgaaggacgaagacttcctgttctcattacataaaaatgagtttgtaaggattgttactaagaaggaaaccgttgaaggttattacaacggtacacatcgtggaacaggcgcgatgagcataaggactcatgacagtgatcccggctatggaaaagagggaataaaagagggcattggcgttaagaccgcgttaaaccttgagaaatatactgttgattattttggcataaaaaccagagtgatgaaggaaacgcggcgtggcgtggcggacactgatgattcagaatccgacgaagctgaacctttccaaagggcagataacgctgcgtaatgagcaaggcgaacataccctcccactggaggatatagccgccatcatacttgaatcaccagagatcaccctgacctctgctcttcttagtgcctgtatggagcaaggcgttagcctggttacttgcagtgccactcacacacccaatggagtactgcaacctttcctacctcattcccgtcagagcaaagtagcacgccttcaactttcttggagcgaaccgcttcgcaaacggctatggcaacgcattgttcaggccaaaataaccaatcaggcgttatgcctttcaaagtatcgtggcaaagaagcgtctgcacgccttctggcgctttccaagcaggtgcaatcaggtgatcccaacaatatagaagcccaagccgcgcgggaatattggtcgaaactttttgataaaggcttcattagaagtggctccgatagcgccaatgcagcccttaattatggatatgccatcatccgggcttttgtggctcgttcgcaagtggcctatgggttactccccatatttggcattcatcatgaaaatgagctgaatgcttttaatttgaccgatgatgtcatggaagtgttccggcctcaggcggatgcgctcgtatttcaaatatggcgtgatgcggaattgtctgagaatggacagctgagtaaagagaatcgtcaaaaattggcaacgcttggtgcatccatatgcctgatagacggccagaaacacaatctcatgaatgcatgtgaccgtatgacaaaagggcttgtaagcgccattgaaagcaaaagtgcgctggtgatgccgatgcctcaatttatgacagattgatttttctaatgaggagcgaagccgacgctgaaatgaggtgacgaagcaaggataagagcatgcccagagcagcacgaaaagatagaacaggtaagctccctccaaaggatagatttatgtggattttcgttttctttgatctacccgttggaacaaaaacagagcgaagaaccgcgacgcaatttagaaacttcctattaaaagacggatatatgatgattcaattttctgtctatgccagaatttgtaatgggcaagaaagagtagaaaagcacgtccaacggattagcgctaaaattcctcaaaaaggcagcgtgcgattgatccaaatcaccgataaacaatatgaacggatgaaaattcggcattgttccatt

SEQ ID NO: 3736 - DNA, 5473 bp, synthetic construct
  misc_feature 1..5473: note = Synthetic
  source 1..5473: mol_type = other DNA
aaagagtgcaaccatcaacaaagtatataaagcagtaagaacagcccatagcacaacacgtcgtatagggtgagacataggcttcacctccgataaatcatcagataatgatgcaatcaagccctctgtattttgctttgcgtcacccattttaacccaacatatctttcagtttgttcgttgttctatgtgccgcaaccttaaccgcggaaacactcatatccatctcgcttgcgacttcttttgcgctgtatccttccactttcatcattttgaaaatcttctgttgtttgacaggcagtgattctatcgccttctctatatcctttaattcgccggaagtagcctgaaaggttacattttgtgcaaaaatatctatattttcttttgatcgttcttttaaattcttatctctgtaatatttccgcaaaagatctgtacgtctgaactgtatgatcgcattaagccatggcttaaacggacgatcagaactgtatgaattcaatgatttatgtacggaaattaagacctcctgcgcgatatcttccacccaatcagggttagacaaaccacctgcaatacgagattttataaaaggcaatatatcagttagcagcaccgtgtaagcacgcttatcccccgactgagccttaatagccagatctttccatagttcatttttagaaacatcagtcatctgcgaggttttgcccctctaaagcgcatttaaaagatgcccctgaatggaaaaccaaacaggggcagaactctacggtacaattaagcaccttatcataacaacgatccgacacggttatattatgatgtctaatcatccatggttttgaacaccatgtcaagatcatacaacacaaccacaaaagaggcatggatccaaatttgcttgcccaattaaagttatgacaacaagccagacaaccatatttcaaagtaaaataaaggtggcaatccacacaactttgagtcaagagtgtcatataggagattttatgacgtataatttaggaatagacatcggtattgcttcggttggttttgcaggcgtgaatgcggatctgaaacaaattctattttgtggagcacatatattcgaagccgcagaaaacccgaaaacaggcgcatcgttggccgagccacgccgtgaaaaacgtggaatgcgccgcgttattgggcggcggtctcaacgtaagaaacaaattcgtgcactgctggcgcgacatggtctgcaagatcttgcgcttatagaccaatcaaggcatagccctacccttctctctccatgggatttgcgtaaagaagccttggaaagaaaattaaccgatgcagaatttgcgcgagtcctctttcatattgctaagcggcgcggctttcaatccaaccgcaaaggtgcagaagccaatgataccgatggcaaaaaagccctaagcggtgcaaaagacttgcaagatgccatgatgcgcgccagcacacaaaccattggcgcatatcttgccactctacctaaaaagcgtaatggcgacggcagttacgagcgctttgtaacgcgtgatttattgcgcgaagaagtaaaaataatcttcacagcgcaaaataaattcggcaataacaaagccgcgagcacgcttttacatgactatgcgggcaacggaaaagcacaagacaggaatacgcttgagggtgatggcattgccttttatcaacgccccctgcaatcctcagagcatcttgtcggtgaatgcacatttgaaccttctgaaaaacgcgcaccaaaattctcctatacggctgaactctttgtcttatggacaaaaattaacaatgcccgtattagaagcgttaacggagatgaacgccttttaacgtcagaagaaaaaaacctgctctgtgaactggcgcataagaataagggcggggtcacctataaacaagcacgcaaagtattgagcttatccagtgatgagcgttttaatatcagctatcgtaaaattaaagatagcgataatagttgggaagcaatccgcgatactagcgaagcctcatatttcctaaaactcacagggtatcacgcattaaaagcagcacttgatacaggcagcaccgccgattggcaaagctggattggatcacggaaaaataatttagatgatattgcccgcatcttatctttccatgaagataaaaaacaagtcgatgaaatgttgtccaaacatgcattaagcgaagcacaaaaagaaaatctatgcgcgattaaggggtttagtaaatctattgatttatccctcaaagcggttcgtaagatattgccgcttatgcaaacaggcatgcgctatgatgaagcgtgcaaagagaaatatgaggatcatcacgggaaaaaaggaaataagggcctaaatcttattccaccgtttgaggatatacgtaatcccgtggtaaaccgcgctctggcacaaacgcgtaaagttatcaatgcatgtatccgtaaatacggcatgcctgaaacaatcattatcgagatagcacgtgaagtcggcaagaatttcaaagaccgcaaagacattgaacgcgcacaaaagaaaaacgaagcctatcgtaacgaagcacgccaacatatcgcagagattctcggcattatagaggataatgtgcggggtgaagatattttgcgatatcgtctttggaaagaacaagatggtctatgcccttattctggtgtttatatgacccctgaaattctacgtgacagcgttgcaacacaaattgaccacatcattccctatcgccgttcatggaataattcatacatgaataaagttctgtgctttacagatgaaaaccagaataaaggcaatgaaacgcctgttgaatacttcaatagaacaggacggaaactggcttcactagaaacatttgcacgtcaattaccaccgaagaaagcggataatttacttctggaaaattttgatgaggaaaaggcaggtatgtggaaatcgcgcgccctgaatgatacgcgctatatcgccaaattactgataagccacttaagagataaccttgatctgggtaaaggcaaccatatccaaactcgcaatggttcactgacatttcaattacgcggcgcgtgggggtttcctgacaagaaccgccgcaatgaccgtcatcacgcacttgatgccattgttatcgcatgttctacacagagcatggtgcaacgcctatcaagctgggataaatatgaagcgcgcaagaaaaaaccatccgaacgccctttgccacccaagccatgggatagcttccgcgatgatgccttaatcgcggtaaatgcgatatttgtatcccgcatgcctgtgcataaaataacaggggcagcgcatcaagacacaatccgcagcaaacgttcagacggtaaagttattcagcgcataaaactgaaatcgctcagcctcgccacgcttgagaacatggttgataaagcgcgcaatttcaaactctataacgtcttgaaggaacgcttagacgcacataacggcaaagcagacaaagcctttgctaaaccagtatacatgcccgtaaatgacccaagtaaaaccgcaccacgaattagctccgtacgtattgtgaccaatgaaaaatccggcattgaaattaacgaaggtcttgcaagcaatggcgatatggtgcgtgttgatgtttttcaaaaagatggaaaatattaccttgtgccaatttatgtgcatcattttgttaagaatgaattaccgaataaagcgataatcggggggaaaaacgaaaaagactggctggaaatggatgatacggatttcgtattctctctttctaaaaatgacttggtacaaattcaaagaaaaaaaggaattgaacttgggtattatgtaggaacagatcgcgcaactggcgcaataagcatacgcgcgcatgataatgatcctgaatttggcaaagagggactcatgcgtagtataggcgtaaaaacccttctatctttcgaaaaatattcagttaattatttcggtgaaaaacataaagtaggaaaggagaaacggcttggcgtggcgcagtgtaatggtacaaaacccagcaaagctcagcctcaaacggggacagctacatctggaaaatgatggtggggtgcataccctgccgattgaggatataaccgccctcattttagaatcctcgcaaatcacggtgtcctcgacgctcctctctgcctgtcaggagcatggcgttgcggttatcacctgtgacgatacacatatgccaaacggcgttttattgccgtttcaaccccactcaaggcaaagccgtgtatctcacctgcaaatatcatggacgcaaagcctcaagaaacgcctctggcaacgcgttattcaatgcaaaatcacaaatcaagcgatttgccttagaaatatcgctggcaaggatgaagccaaacgcctctacgctttggcgcaacgcgtaaattcaggtgaccccaaaaatatagaggcacaagccgcacgtgattattggccacgtttaatggggaagaatttcaggcgcagcggaaatgacacgaccaacgccgcactgaattatggttataccgtgctgcgcgcttttgttgcacgttcgcaagtggcttatggcttactgccaacatttggtatccatcactgtaatgaactgaatgcctttaatctcacagatgacatgatggaggtatttcgcccctttgtggatgacatggtgtatgcgttaaaagccagtggagaccttgacgcaaagaacgcgcaactctctcttgaggtgcgacaaaatttagcgaatatcggcaatgtaacctgcgtaatagatggcaatactcataccattgccaatgcctgtgataagctgagcattggattggttaatgcgattgagggcaagagcccagctctgcttatcttacctgaaatgaagattagaaaggcgtcatcatgacggcaacaaaggatcgattcatgtggttatttgtattttttgatttaccaaccaaaaccaagccagagaggcgtgccgcagcacgctttcgaaatttccttctcaaagacggatatatgatgatacaattctctgtctatgcacgaatctgcaatggaaaagatcgtgttgataaacatatgcaacgcttgcaagggattttacccgaaaaaggtagtattcgggcgatgcaaatcacagataaacaatatgaacggacaaaaattcttgttggaacaaagaaaaacaatgaagaaacaaagaccgaacagctcgttttattctaaaactatccggtctttatctgtatatatcaacaccttaccatggtatctatcataacataaccgtgtcggatgggaagctatgacttacagtagtttttaaactttataacttgaatcataacataaccgtgtcggatgggaagcta

SEQ ID NO: 3737 - DNA, 5149 bp, synthetic construct
  source 1..5149: mol_type = other DNA
  misc_feature 1..5149: note = Synthetic
ttatggatagcattaccgtagctattcctggactcatttatagggggcgggtcaaatcgggggaatgtatgttctgccgggcggacttgtataaagaaatcagagaaaaaacatctgtaatagctgcaaggcgcgttcaaactttgggcgtggcgaaaagcctgagggaggggggaaacgcttgtgtccgagaaaggcggatatttggtttgttttggtcgtgaaggcgatgtccggcatctctgtaaaaaagaagaggtgatgcgggttttaaaaaagataaccccgccggataaaatccggcggggttagaactttgcggtgtttaaaacaccttatcataacaacgcgttccgacacggctatgctatgaaacaagacgataatgtaatctagggttgtgtttgtcaagggagtttattattttttttaagatatttttatggaggcatattatgaaatatacattgggtgttgatgttggcattgcatcgattggttttgctggtgtgaatattttgtcgcaaagcattccattttgcggtgtgcatatttttgaagctgcggaaaacccgaaagacggcgcctcgctggccgcgccccgccgcgaaaaacgtggtatgcgtcgtgtgatcagccgcagagcgcaacgtaaaaaagcactgagatgtctgtttaggcggcatggcttcggcaatgtcgatgccgctatagatgccgcgccttttgcgccgccggagaaatcagtttgggatttgcgcaaggaagcgcttgagcgtctgctgacggagggagagtttattcgtgttctgttccatatagccaaacggcgcggtttccagtccaaccgcaagggcggggaggataatgatacggaaggtaaaaaagcgctttccggtgcgcgggagctacaagaggcaatgagagctgcggccgcgcccacaatcggcgcctatctggcgacgctggataaaaaacgcaacggtgacggttcgtatgaacggtttgtcacgcgcgagttgctgcgcgaggaagttagaaaaatattcgaggcacaggcgcgtttcggcaacgcaaaggcgacacctgaattgctcactgactacgcgggaagcggcaagaaggaagagagaaatacgccggaaggagacggtatcgctttttatcaaaggccgttgagatcgtccgaagacctggtcggattttgcacgctggagcctgccgagaaaagggcaccaaggttttcgtacacggcggaattgttcgttttgtggtcaaagttgaacaatacccggatcagaaacgtcgacggtcgcgagcgggagctgactttggatgaaaaaaacaggttggccgaaaaggcgcatatgctgaagtcgctcagttacaagcaggcaagaaaagatctcggccttcaggacgaagagcgttttaacctgagctatcgcaaaataagcgaagaagacaatacctgggagaagatacgagatgctgccgagaaagcggattttctgaaacttcccggctatcatgcgctcaaaggcgttctgggtgcaggcggtgatatggcatggcagaaatggacaacggaatcaggccgaaagaagctggacgaagttgcgcgcatcctgtcgttttatgaagacaggaaagaggtggacgcattgcttgccgctttggatattgattttcagcagcgggaagaactggcaaaaataacccatttctccaaagttgtggatctgtctctcaaagccatccgcaatattctgccgcatatgcagcaagggttaacgtatgacaaagcctgtgatgccgcagggtacagtcgaaaacagaacaaaaaactgaaaaaggttcctgtttttgaagatgtacgtaaccctgttgtcaaccgcgctctggcgcaggcgcgcaaggtgatcaatgcctgtatccgtgaatacgacatgccggaaagcattattgttgaaatgtcgcgcgaccttggtcgttctttcaaggacagaaaaaatattgaacgggagcaaaagaaaaaccaagcctatcgcgaagaggcgcgtcatcatatcgcggagattattggcgttgttccagagaatgtttcaggcgaagaaattcttaaataccgtctatggaaagaacaaaaggcgttatgctgttattgcggaagtgagattacgcccgctatgcttaaggatgccgtggcaacgcaaatcgaccatatcttgccgtacagtcgttcgtggaacgattcatatatgaataaggtgatatgccatacctcctgcaaccaggaaaaagcaaacagaaccccgtatgaatggctcgccggcacgccaggatgggagagcgtcgtgctttttgccagacagttgccgcccagaaaagcggagcatttgttgatgcaaaattttgacgacgagaaagccgggcagtggaaagaccgtgccttgaatgacacgcgatatattgccaagttgctaaaaaaccatttggaaaactctttggatctgggtgacggggtgcgtgtgcaaacacgtaatggcgcgcttacggccaatttgcgcagagcgtgggggctgggcaagaggcgcgacaatgacagacatcatgccgtcgatgcgatcgtgctggcttgctctacgcaggccatggtgcaacagcatgcaaactggaacaaatatgaggccagacgcaagaatccggcggcgcggcctgcgccgccaagcccttgggagaacttccggcaggatgtgatgaacaaggtcttcggcgagaaaaacgcgcagggaatacgcgaaggtggcatttttgtttcgcgtatgccggttcggaaagtcacgggcgccgcgcatgaggaaacaattcgcagtatccgcaaatcggacggaaaggctatacagcgggtcaagctgtctgcgctgacaccggcgcgtctggaggatattgttgataaagaacgcaatatcaagctctatagcgtattgaaagagcggcttgatgcgcatggcgggaaaccggacaaggcttttgctgagccggtatatatgcctacaaacgatccggccaagaaggggccgcgcatcaactctgtgcgggttgtcacgaacgaaaagagcggcgtgccgatcaatggaggccttgctagcaatggagacatggtgcgcgtggatgttttcctgaaagagggcaagtattatcttgtgccgatttacgtacatcattttgcgcaagataaattgccgaataaggcgattgttgccaataagcctgaagatgaatggccggaaatggatgacagagatttcattttttctctttataagaatgaccttgtcatgatccggagtaagaaggaagaattttgggggtattacgcaggtacagacaggagtgtggcatctatcagtataaaatgccatgatgcggataagtcagtttggaatagtggacaaaaaacgggcattggcgttaaaactttgctatcctttgaaaagtattcggtagattactttgggaatatcttcccaaagcactcaccaggtattcgggagaaaagacgtggcgtggcgcagcgtgatgattcaaaatccggcgcggctgagcctgtccaaagggcagctgcaactggagaatgatgacggcgtcacatccttgccgctcgaggatattggctgcatcgttcttgaaagtccgcaaattacgctcagctctgctttgctggggcggtgtcaggatatgggagtatgtgttgttacatgtgatgacacgcatatgcccaacggtgttctgcatcctttcatgccgcattcccggcaaagcaaggttgcgaaaatacaggtgagctggtcagcagctctaaaaaaacgtatttggcaaaatatcataaaacaaaaaatcaatgcgcaagctgaagtgctggaaatttttaatgaagctccttcagccgcaaaggctttacgcgcgatgagcaagttggtggcttccggtgatccgggaaacgttgaggcacaggcggcgcggcaatattggggggcattattcggcgcgtcattccgccggcatcagggtgatatcgtgaatggtgcgcttaattacggctatgccattttacgcgcaacgctcgcgcgctccgttacatcctatggtcttttacctgcattcggggtgcatcatgacagcgatctgaatgcctttaaccttgtggatgatctcatagagccctacaggtcatttgtggacaggcgggtcaaattgctggtgctcgaaaaaggcctttcgatggaagaccgcctgacaaaagaacaccggcaagcactggcagagctgttgaaggaaacgtgtcgtttttccgacggacatcaaagtctcttgaatgcggcggacaggacagccgccagtctcgtgtcggccatcgaaaagaaagatgcgtcaaaagttgaattcccgtctatgccggacccgctggtagcaagcgcatgctgaacaaggatcgttttatgtggctgtttgtgttttttgatttgcccgtgaagacgaagtcagagcgccgcgttgcgacaagctttcgcaatttccttatcaaggacggttatatgatgctgcaatggtccgtttacgcccgtgtctgcaatgggcaggaaagggttgacaagcatatgcttcgactgcaaagtgttttacctaaaaacggaagcgtgcgtgtgttgcagataacggacaagcagtacgaacgcatgaaaatcttgattggaaagcggacgattcgtgaaaaaacaaagaccgaacaactccttttattttgaagctatccggcctttgccttatttttcagcggtttatcgttaatcgatcatagcatagccgtgtcggatgggaagctatgacccttttgcgatttctttctcaagccagcggatcatagcatagccgtgtcggatgggaagctatgaccgttaaagatgccgatgcggactgcacataatcatagcatagccgtgtcggatgggaagctatgacctcgaagcggattgcgttcatgaccacgccatcatagcatagccgtgtcggatgggaagctatgacctgcgggctaaagccctttgcccgcatggcatcatagcatagccgtgtcggatgggaagct

SEQ ID NO: 3738 - DNA, 23306 bp, synthetic construct
  source 1..23306: mol_type = other DNA
  misc_feature 1..23306: note = Synthetic
gccgaggccttcagcgaggccgcctccagccagggcgccgccctgagcggcacgatgcgcctgggcatcatccccaccatcgcgccctacctggcccccgttctcatcgacggcctgcgcgaggccctgccccagatggacctggacctgcgtgagatggtcaccggggacaacctcgaccagctcgcccaggggcgcctcgacgccgccatcatcgccctggaggacgacctccagcgcaccaccgcgatcccgatgttcgacgagccgctcgtcgtcctcaccgccgccggccacccctgggccggccgcacggacgtgagccccaccgagctcgacgaccagcccctcctcctgctcgacgagggcaactgcctgcgcgaccagaccctggccctgtgccaacgctacggctcccagcccccggtcgcggtggccaccaccctgtcgacggtgacccgcatggtcgcccacggctcgggcgtgacgatcatccccgagggggcgctccagctgctgaccccctcctcggagtacggcatcgcccgtttcggcgacgagtcgccgatgcgccgcatgggcctggtgcaccgggtctcctcctcccgcggcgccgacttcgcccagctggccgagctcatctcgcgcctggtcaaacaggccaacctgcctgtcacccccgtcacggaccaggctgcggcctgagctgtccttgggggcaccccttgccgacggcgcacgctcgattcctttccgctcgacagcgccccgcaagccgtgacccgggccgcccaggcgactagcctgcccctatgacgggcggcaccgacggcggcacccgggcgacgacgcgcaccgggcggccgctgacctgcgtcgtcatcaacccctccaagccgcgcgccaccgccgcggtgcgctccctgctggagggcgagctgcgcgaggccggctatgccgggcccgtgtggttggagacgagcgtctccgagcccggcacgatgcaggcgcgcctggccctggcggccggggcgagcctggtggtggccgccggcggtgacggaacggtgcgctcggtggcggccggcctggccggcaccggcgcccagatgggcatcgtcccgctgggcacggcgaacctggcggcccgcaacctcggggtgccggtcggggacgctcgggccgcagcccgagtggtggcccacggcgtcgaccttcccgccgacctggcctgggtacgcaccgagccctggtctgaccccggcgccctccccgacccggcaccgacgggagccccctgcgggcgggcagactccacaccctccacacccctgacgggccgagccgcagcagccccgccggactccccgcccgcagccgccgacccggccgactcccggcagctgtcggccgaggcggcccgggccgtgcacaccatccagagggcgacccgccggccgcatcagtggacccggcccacactcggcgacgagcacgcctgcatggtggtggccgggatcggattcgacgccggactggtggcctccacgcgcccggccctcaaggcgagggtcggttggggcgcctacgcgctggcggccatggagaacctgggctctccgcgcatggacctggtgcttagcctcctggacgaggccggcgcgcggcgcgtggagcgcctgcgggcccgcaacctgctggtggccaacggcggccgcctcccggccgggatcaccctgctgccgcaggcccgcaccgatgacggcctgctcgacgtcgccgccatcgacacggtggcgggcctggcgggctggagctcactggcgcgccaggtgctgccgccctacgcggcgcactactccgagtccggccgctcgctggggcgggtgatgctgcgccgcggcggggaggtggccgtccagctctcggcgccggccctggtggaggtcgacggagacctgctggcgcccacgcagagcatgcgggtgcgtatcgaccccggggcgctgctcatccgccgcccagcggcctgagagccgacgcagccggggcaggtgcgggccagggcggcctgagcccgcctcactcctcccagaagtcggcgacgtcgatcgcccctccgctggcctcgaagtcggcgcgcacggcccggcgcagctcggcgtcgtgcagccagtccagggcgacggcggccagcccgtaggcgccgtcgagcgcggccgcgtccccggtgggggcgctggcagcctcggtcatggcgggggtgtggagggcgacgtcgggccggtcggtgaccttgatgagcgggtggatgccggggatgcgctgggacacgttgccgaagtcggtgccggcggcgatggtctcgggcaggacgccggcggccagggggtcgcggccgcgctcgcgctgggagcgcacccaggaggtcagcagggggccgttgtcgcggacggggacctcgttgcagtactcggaggtgaggatctcaacgcccgtaccggtcatgagggcggcgccgtggaggacctcctcgacccgctcggcgatctccttgagggtctcgaggtacttcgagcgcaccatgatggacagctcggtgcgctcggggatgatgttggggacctggccgccgtcggtgatgatggcgtggagacggtccatggggagcatctgctggcgcagcaggccgatgccggtcagggccagggtggcggcgtccagggcgttgcggcccatgaagggctgggaggcggcgtgggccggcacgccgtggaagatgacgcgcaggcgccgcacgcccagccaggtctggtgggtgacgtcgtgggcgtaggagtgggtctggatggcggcgtcgacgccgtcgagcatgccgcgcacggccaggatctccttggcggtcgagttctcctcggcgggcgtggtctgcaggacgacgcggccgggcagggagcctgggcgggtgcgggccagggcggccagggcgaggaaggcgcccacggagttggcgcacatgacgttgtggccgcagccgtggccgatgccgggcagggcgtcgtactcggcgaggatggcgatggtgccggccgactcaccggagcctccggccgccgcgtccgcacctgcggctccggggatctcggcgcgcagggcggtgtccatgccgtagacgccgacctcgggctcaatgccgtggcggcgcaggagctcggcgaccgtggccacggcgtggtgctcctcgtagccggtctcggggtggtcgtggatgtcgtgggagagctcgacgatctgcggggccagctcggcgacgacctcacccagggcggcgcgcacggcagtgggggctccggcgtcgtcgggcagggccggtgccgggccgacgacaccgcggcgctcctcggtctcggcgagtatgcgctcctggatggcgccggaggggacggtggggcgggtcaggtcgttcaggtcgcgcatggctctatcttggcccagccggcctccccgcgctcagtcgcgaggtgcggcgagccgacgggccgcgtcgacgacgacggcgcgctgacgttcgtgcgcctcctcatcctcgaggggcccgcacagcatccgggccacctgaggcacggtggaccaccagccggtcagcgacatgagcatgaccatgagcgcccccgggtcgatgtcccgggtgaggacgccggagtcctggccactgcgcaccccggcgatcttgcgctgatagtgctcgcgccgcagctcctcctcgggtacctcatcgtcgaaggtgagggcctcccagcacaggagccggataagctcggggcgctgccggtggtagtcgtagaggcgcccggcgtagtcccccgcatcctcgccgtcgtcgaaggcgggcggtacggcctcggcagccctggtcagctcgtcgcgcaggactgccgagaataagcggtccttggagccgaagtagttgtagacgcgctccttgttgacgccggcccgcttggcgatccgctcgacggtggtcccagcgggcccacgacgggtgaactcgactgtggcggcgtccttgatcttgcgcttggtcccctcggtgtcccaggccatgacaccccgtctcccgtgtccgcgagcgccggcggcaaactccaacgctaccgttgcaactactcctccagtctactagggtcatttccaacgcttacgttggaaaggggttctcatgtctcccgtgcaccgacccgatcaacatcccgacgtcccccactcccccgagtcctcgacccagtcgacgactcggtcggcctctcccgtctaccccgccggcagcggcgcaaccgccgccctcgtggtcaccgcgctgctcgtcctcacccagctgtacgccgccattcccctgctcgccccaatctcgaccgacctccatggcaatgccactgtcgccctgtcgacggccttcagcctcacttacgccgcaggcttcctcatctgggggccggtctccgaccactacggcaggaggaggaccatggcgctcgcgctggggacccttaccgtctccaccgtctgctgcgccctggctccgtcgctcccagtcctcgcggccctgcgcgcgatccagggcctgagcgcttccggtttcgcacctgtggccctggcctacctgtccgaggcgctggcaccaccgaggcgagccggggcgatcggggcgatgtcgacgtcgttcctcgtggcaggcatctttggccaggtgctggcctcgctggtcgcgctgcacctggggtggcggtggttcttccctctgtgcggcggactgctggccgtggccctggcggtcgtcctcgccgccgtgcacgacgccgcctccagcccttcgggctcctcgcttcgggggcagttcgcatcgctgggccggctcgcagtcaggccggcggttctggcgctcagcctggcgcacgtcacgctgctcatggtgttcgtcgccatgtacacggggatcggcggccatctggagtcgctgggcatgcggccgtcgacgatcattctcgttcgcctgatggccctgccggccatgttcctcagcctcgtggcgggccggctcacggccaggtggtcctgggcgcagatagcccggctgggcttcggggtgtcggcattgggcatgctcggtgaggcactgctggcgcagagcctagtgggcctggtggccggcagcatcgtgtacgtcgccggggtagcgctggctgcgccggcaatgattagcctctatggactggtctccgcacccaaccgcggcagtggcatggcgctcaacgggttcatcctgttcgtcggcacgagcgtcggcccgctcctggcgacgtcgtcgcccaccttccggacgctggctctcatcctggccggcatcctggccatggcactggtcgcgatcgccggtttcaaggcactggccgacgccgaccgctgactgccacccacacggcgggagcggccgtccccatcgaggacgtacttttgcaacgaggactgcgttctcccccagatggcgacggggagatcccagtggcctggaggaaagcacagtcctcgatcggaaagtacgttccgggcgagaaccgcagccaccacggcggcccacccggcccgccttaccccgtcctcagctgaagagcgaggcggccaccatggtgtcgccctccttgatgcccggggggatcgcgaacagcgccgaggcctcgtgcttgaggtactcctggagggcgtcgctcttggtcatgcggtccaggatcgggtagaagttcgtgcgcgggtcacgcacgaaggcgatgaagaacaggccggtctgcagctgccccagggagtcggagccgtcggtgtagttgtagccgcggcgcagcatccggcgcccctggttctgctccggtgagacgacggcgatgtgcgcgtcggccggcacgagcgtctcgcccttgtcgtccttggccttgtagtccacggccgtgaactcctcggaggacttcgtggggttggtgatgctcagcggcgccccgtagcgcttgtcgcgccccatggtctgttcctgctcgatgagccgcagccggtcccagatctcggcgagcatgcggatgcgccgggccacgtagtaggtgccgcccgtcatccactcggctgcggcgtcgtcgcccttctggacccacaggtgcttgttgagctggtcggtggagtcctcggccttgatgttgttggtgccgtccttgaagccgaagaggttgcgcggcgtctcctggtccacggaggtcgacgacgtgcgcccgtagccgacctggctccaccgcagtgtggcggtcccgaaggcgatgcgggtgaggttgcggatcgcgtggacgcacacctgggcgtcgttggagcaggcctggacgagcaggtcgccgtcggattgggcggcgtggagctggtcgccggcgaaggagggcatgccctccttgaggacggcgggcatcttggcggccaggccgaagcggtccttgccgtcggcgtcgacgaacaggcccttgcccacgccgaaggtgatggtcaggccgttgggcttgtagccccaggcctcgccggtgtccttgggcggcagctgcttgttggagctgggctggccgccgatgagctcaccggcggtcatctgctcggcggccacggcccattcggacaggagggttttcaggtcctcgacgtcggtggcggagacgtcgaaggccgcggtgaacatgttgtcctgggcgggggtggtgatccccgcctggtggtcaccccggaaggggtaggtcgtgaggatggcctcctcggggcggtgggaggcctcccaggcgcggccgccggccacaccggccaggcccgcgagcgcggcacccaggcccgcaccggtgaacatggcacggcggctagtgcccttggcactaggcttcccggcctgtccgggtttccccgtcgcatccggcttctccggctggtcagccgcgtcggatgcgctcacctcatcgggctgctccgccgcgtcgggggccgaggcgctgttacccggtccctccgacgtcggggcctgcggctcctgctgcgcctgcgcggtctcgtcctggggctcatccagggtctcgtcctgggccgcgtcgtcggcgaccggggaggtgtccgactcgtgggccggcttgccactcactgctgtctccttccggggtgtccgggttgtcggggtgccgccgcctcagaggatggttccggcgaccttggacagcgactcgctcagggcgttgacggcgtcggagaacttgcgctgcttgtcggtgtaggcgttcttgtcgggggtctcgccggcgtccttctggaccgcggcgatggtggagtagtccacgtaggtgggctggccgttggaggcctttccggaggcctcggccgcgacgagcttctcaaccgccgcgaactgggtggtgatcttctctgcgagcttggcgtccttcttcttcacgagctcctcgacgttgccgtaggcgaccttggcgccctcgacattggcttggaagtcgtagaggtcggtgtgggagaaggtctcctcctcgccgacgatcttggagctggcgacctcctcgaggaggccggaggcgccgttggcgacgtcctcgagctcgagctcgaacttcttcccgccggcgccggtgatgttcccgtagacgaggtcgtagagcgacttggtgtcggcgttgagctggtcggcgaccttcttgcgggcggcgtcgtcggcgaacttgaagggactggaggagtcctgggcccacaggtcggcctcgatgcggtgccatccggtccatccggcgaggacgtccttgtccgtgacggccttgccggcgccggaggcgaggtcctggacgcgggtgtccagggcggcgtcgaggtcgccggcctccttgaggccgaaggactcggcggtgggctcgatgcgctcgtagaactggcgcgccagcgggtagaggctcttggcggtggcggtgtcgccggaggtgtaggcggtgacgaagccctgggtggcggtgaggagctggccggtctggtcgcgcacgtaggcggtgtagttggtgacggcggcctcgcgcgccttggtctcgtcggcactgatgtcgacggcggcgcccttggtgatcttcagttcggtgacgcccttgagctcgccgaccatgttgggcttgcaggcggcgtagtaggtgccctccttgagggaggtggtgagcttcgtggtggtgccggggccgatgttctcctgctcggagacgatctggagcttgtcctcggtgaggatctccagctcgttgggggccgagccggagttggtgatggtgaaggtgaccacgcccgaggggaaggaggtggaggagagcttgcaggcgtcgtcggtgagggtcaccgtgatctcctgggacgcccccgagccggaggcgccgcccttggcgttcttggggttgtcggcgcaggcggccaggcccaggcccatggcggtcagggggagcagggtgaggacgttgcgtcgcttgatggtgggcatggtctttcctttgtgaggagtggcgtggacagggggtggggagggaggtcggggtggtcaggaggtcgcgacggcgtcgggctcgtcggcgtcggactcgtcaacgctcacggcggccggggtggccggagcggactcgactgcacgtccgggcgagggccatcggcccgcgatctggagggtgaggaggaccagggtcgggacgatgtagacccaccagcccacgacctgcaggacagtgggctggaggttgaactggaacatggcctggagcagcacgtagagccagtggaagggcgaggcgccgtcgggcaggtagcgggacaggtcccaggcgtggttcgtgaagccgggaagaacactcgcctcctgcaggtcaccgacgccgtaggcgacgatgccggcggcgacgacgacgaggaagtagccggtcacggcgaagaagacgcgcaggttgatgcgcaccgcgccctggtagatgaggacgcccagcacgatggccaggacgaggccggtgatgacgcccgccgtcgtctgcatggtggagctctcgatgctggagcgcacggtggcccacacgaacagggcggtctcgactccctcgcgcccgacggcgacgacggcgatccagacgacgccccagccggagctgcctgcggagagggacttggacagcgatccctccagttcgcccttgagctcacgggcgttcttccccatccagaagatcatccaggtcaccatgccgacggcgacgaaggacagggtgccgccgaggatctcctgggcctggaaggtgagggtcttggggccccaggtcatgatggcgccggcgaccagcgggatcagcgccgccaggccgaccccgagccacagcttgggcagggcatcgcggcggtcggccttgacgaggtaggcgacgatgatgctgacaacgagcgccgcctccaggccctccctcagggcgatgagcaggttggcgagaaacactcgacctccaagtcacgaatcaatctcaggtcacgacggtcaaggtaagcctagccttaggcgatctcaccaccaaagactcttgtttctcgcgctcgtgtgggatttagcccagtttctccggtcacaccggcccgggtcgccctgggagcgccccggggcgtttgcccggtcgagggttgcggccgactagcactggttccttgcccccacacgcttccgccacctccggcgcgctcacgccgagaccctcttaggaccaagatcccgccatgatggtgctatactggctacgactgaattcctagtaaacttcgccatgtttgcggagtggactgctccaccggctcgcccaccggcaagccgacctggctgcccggtctcatgctgagaccgggcagttttcttacgccagccccataatacgtccgaatgtggtatgcatctctcatgtctgctcaccaccttcgcgtggggatcgacgtcggcacccattctgtcggactcgcaacgctgcgggttgacgagcagggaacccccatcgagctcctctcagcgctgtcacacatccatgactccgggatcggcaaggaaggacaaaaggatcacgacacccgtaagaagctctccggtgttgctcgacgcacccggcacctgctgcgtaatagacgcaagcggctccagcagctcgacaaggtgctgctcggcctgggcttcccgatccccaagccaggagagttcctcgacccgagcgagcaaaccgacccataccgggtgtggagggtgcgtgctcggctggtcgaggagaaactccccgaggaccagcgtggtccagccatctccatggcggtgcgccacattgcgcggcaccgggggtggcgcaacccatactcgacggtcgagtccctattgtcacccgcagaggaatcgtctttcatgaaggcgctgcgcaagcgcatcatgacgaaaacaggcgaggtcctcgacgatgacatcacccccgggcaggcgatggcccaggtggcactgacccacaagatctacatgcgtggcccggagggcattctcggcaagctgcaccagagcgacaacgccaacgagatccggaagatctgcgcccgacagggcgtctctaccgatgtctgcaagcagctgctgcgggccgttttcaaggcggattctccacgtggctcagccgtctcccgtgtggctcccgacccacttcccggtcagggctccttccgacgcgccccgaagtgcgatccggagttccagcggttccggatcatctccatcgtggccaacctccgcatcagcgaggccacaggagagaatcggccgctgacggcggacgagcgccgccaggtagttgctttcctcacaggggactcgcaagccgacttggcctgggttgatgtcgccgagaaactaggcgtgcatcgcagagacctacgaggaaccgctgtcctaacagacgacggcgagcgatctgcggcaaggccgcccttcgacgccactgaccgcatcatgcgccagaccaagatccgttcgctgaagacctggtgggaaaaggccaacagcgagcagcggggcgccatgattcgttacctctacgaagaacctaccgactcggagtgcgccgaggtcattgctgagctgccggaggaggaccaggccaagctcgattccctccaccttccagccggccgtgcggcgtactcacgggagtcattgacggccctcagtgaccacatgctggcgacaactgacgatctgcatgaggcacgtaagcagctcttcggtgtcgatgactcatggacccctccagctgaagccataaacaccccggttggtaatccgtccgtcgaccggactctcaagatcgtcggacggtacctcgctgcggccgagagtatgtggggtacgcctgacctcattcatgttgagcatgttcgcgatggcttcaccagcgaacgcatggcagaggagcgagacaaggcggacagacgtcgctacgacgataaccagaaagcgatacagaaaattcgacaggactatggtaaggagggatacataagccgaggtgacatcgtgcgtcacgatgcattagagttgcaaggaagtgcctgcttgtactgcgggacgacaatcgatcgccacacatgccagctggaccacattgttccacaggccggcccaggttcgaacaatcgccgcgggaacctcgtggcagtatgcgagcgctgcaaccgttcaaagtcgaacactccgttcgcagtgtgggcacagacctgcgggatccctgacgtcggcgtgaaggaagctattggtcgagtacgaggctggcgcaaacagactcctaacacatcatccgaagacctgacacgccttaagaaggaggtcatcgctcgtcttcggcgcacccaggaggatccggagatcgatgagcgcagcatggagtccgtggcttggatggccaacgaactgcaccatcgcattgcggccgcctatcccgagaccactgtcatggtctaccgaggctctatcaccgcagcagctcgcaaggcggccgggatcgactcccgtatcaacctgatcggtgagaaggggcgcaaggatcgccttgaccgccgacaccacgccgtggacgcgggtgttgtagcactcatggagccaagcgttgccaagaccttggcagaacggtcaagtattcgcggagaacagcgcctcagcggtcagaagcaaacttggaagcaatacacaggctcgaccgtgggggcgcgagagcacttcgagatgtggcggagccacatgcttcgcctcacggagttgttcaatgagcgcttggcagcagataaagtgtacgtcacccaaaacattcgccttcgactatctgacggcaacgcacatactgttaatccgtcaaaattagtctcccaccgcctcggcgacggattgacagtgcagcagatcgaccgagcctacactcccgcactgtggtgcgcactcacccgggagaaggacttcgacgagaagaacggtcttcccgcacgggaggaccgcgcgatcagagttcacggtcaggaaatcagctctgccgattgcattcaagtcttctccaaaagaaagaaaaccaggagcgactgcgacgaaccccccttcggggctatagcagtgcgcggcggtttcgttgaaattgggccatcaattcaccacgcccgtatctatcgcatcgacggagacgaaccatcctacgcgatgctccgcgtcttcactcatgacctgctcagtcagcggcacggagatctcttctctgcagtcatcccaccccagtcgatcagtatgagatgtgcgaccacagaactccgtcaggccatctctacagctagggccacttatttaggatgggttgtgtccggagacgaactacacgttcccgtcgaaacattcacaacacacaagatcggaagttttcttaaagattaccccaacactacgcactggcgtatctgtgggtacgactctgaaactattctaattcttagaccaaaagttctttcagcagaaggattgagcgattcaagcagtatcgcagaatatatcattaaagacagagggtggcgtgtaacaattaacaagctggccaaagtacatccaactgtcgtgcgacgcgacgccctgggccgacctcggtattccagcagatccaatctccccgtctcctggaccatcgactgagggccacccatggacacggcatggcgcatcattgactgttcgtcgctggaggggcgcatcacctcggatcgcggggctatctgtgtccacccagacgacggcggtgagcgtcgggtcccaacggccgatgtggcggtcgtcctcatgggtccccacgtgagcttttcgacggctgtcgtgcatcgcctactgggcgccaacgtcgtcgtgttgttctgcgactggcggggagtccccgagggtgccgcctacccgtggcatgagcatggtcgcgtgggcgctaggcaacgggcgcagtcgcagctctccgaaccacggaggaagaatgcgtggggacgcctggtgaaggcgaaggtgttggggcaggcaactgtgctgcgtcagaaggatcgtccggcggcagtccggctcaaggagatggcgcgttcggtgcgctcgggtgacccggagaacgtcgaggctcatgccgctcgcttgtattggtcccggctgttcgcctccgagggtgattttctccgacgtccggaggcggaggatcatcgcaacagctgcttgaactacggctacgcggtcctgcgcgcccacggaattcgtgcagtggtgagcgctgggctcagcccgacgctcggcctgttccaccacgggcgcggcaatatgttcaacctggtggatgacatcatcgagccctttcgccctgcggtggatgacgctgtactgcatctggatcctgatgtgagtcccgcggagcggcaggtgaagcaggttctggtggctgcggttcagcagccgttccgtgacgatggcgccgcgctaccaaccgtcttggaggagctggctcagcacttgggccagtactgtgaaggggaccgagcccgcttggatgtcccatcttggaccggacctaggcgtgactcctgatggcggatgatccagtgtggtgcgtggtcatgttcgatctgccggtggcgacgaaaaagcagcgcaaggaggcgagtcgcttccgccaccttctcctggatgagggcttctggatgctccagtacagcgtctacgtccgttactccccgaccgtggccggcgagcctcgcagggtgggctcactcaagagtaacctgccacgcggcggtgaggtgaggatgctgtatgtcaccgaccgcgagtggtcgcgcacgctctgtttccgcaacgaagagcctgtcgaggccgagccggagccccaacagctcatgatcttctaacctctgacggggcgtttgcgctggtcagaccctcttgacagacgtttctgaagtctatcaaggggtctggtgactgaatcccagcgcgcacgcggggtgggcgtcgtgggcgtgaagtctatcaaggggtctggtgactgaatcccagcgttcagaccaccaccagagccgcaaagggaagtctatcaaggggtctggtgactgaatcccagcgggtctccgatcatgcggacggtggcgcgaagtctatcaaggggtctggtgactgaatcccagcgcgtgggggagctggcaccggacccggcgaagtctatcaaggggtctggtgactgaatcccagctgtccacagctccggtacggggtcccgcgaagtctatcaaggggtctggtgactgaatcccagctgtcgtggccacgaccgccggcgtcgttgaagtctatcaaggggtctggtgactgaatcccagcccgcggatgtagtcgtcgatccactgcagaagtctatcaaggggtctggtgactgaatcccagccgaagcgaaggtgtcacacgtattgtaagaagtctatcaaggggtctggtgactgaatcccagctggcgaaccgtgccggctacccggagaagaagtctatcaaggggtctggtgactgaatcccagcgtcagccgtttccgcacccctctcccttgaagtctatcaaggggtctggtgactgaatcccagctttctgttgacgtgtggggcttatgcccgaagtctatcaaggggtctggtgactgattcccagctcaatccccgtccatccggcaaggatacgaagtctatcaaggggtctggtgactgaatcccagcggacttcctgtccccttgtgatgactctgaagtctatcaaggggtctggtgactgaatcccagcgaacaggacaacgggacgatcaaggtcggaagtctatcaaggggtctggtgactgaatcccagccgggcgggcatgaccctgtccgacacgggaagtctatcaaggggtctggtgactgaatcccagcagatggtcacctggatggctcaggcggagaagtctatcaaggggtctggtgactgaatcccagctggcgtcctggtgggttgatgcgggtgggaagtctatcaaggggtctggtgactgaatcccagtctgacctacaccagggcctctgagtcacgaagtctatcaaggggtctggtgactaaatcccagcggcgagttgacatgtgcgcagggcagcggaggctccggcgtcgtcgggcagatccggtgcccggccgacgacaccgggacgctcctcatcctcggcaagtatgcgctcctggatggcggcggaggggacggcgggggcgggtcaggccgttcaggtcgcccgagagtccatcgtggcccagccacccgcgccgggggagccaccgccccatcgaggacttagtttcggtaccaggactgcgctgtcccccatacgactgcgcggagatcccagtagcctggaggacaacgcagtcctcgatcggaaagtacgtcctcggcggcggcacaggcgacgacaacacgacgggcggtgcgccagcggagaagagctccgcctgcgcaccaccccggggaaggagggtgggagcgagggcgcgccgtccgcgtcgcctcagtctcgcccccacccgtgagtcagccgttcgcgcagcctcagctcgtcgagtcctcgctctccgaggtgcccgcagcagcacccgggctcccgacggcatcgccaccaccgacggcatcaccggtccgccccgtggccacagagcccccgccggacatcgcggcaccgacctccacctcggcccgcgcgtcggcctcctccttgagccgggtgttgaccttctcgacgtccagccgcaggagcaggaagaggatgagcgcgttagccgccagcggcaaccacacgtacatgatgtagatcatctggatggcggactccggctgaaccttgaggtccccgtcgtacccggaggctgccagcagccacccggacagggccgtgccgagcccaccaccaaccttcacgccgagcgacgtgcaggagaacatgagcccgtcgatgcgcttaccggtacgcagccaggtgtgctccgaagcctcggcgatgagggcgttgagcgtgccctgcagcgagctcatacccagggccgcgaccccggagaggatcagcatgagcgggaggctgttcatgtaagcggccacgagcaccccgagccgccccagggtcgcgatgacatagccgacgatgttgatccggtacatgctcccgaagcgactcaccaccagtggcgtgaccaggagcccgatcatgagcggaatgttgatggcccaggagaaagtcttcagcaggtcctcatcccccaggacgtacttcatgaagtagatacccatgttgagcatcgccgtgaagatctgggtgagcaggaagacgatgaggatgatgaggtagtacttgttggatacgagcatcttggccgactcccccactgagagcttgtcctcctggggctcgtcctcaccctccagctcctcaggcgacagctccttgaccgagagcaccgagagcgtgttgaccgccaggccgagcagcgcgtagatgatcgccatcgtccgccagccgacggcgccgccgccgaatagggccacaccgcccacggtaacgctctggatgagcaggttcgttccgaaggcgaacatgaagcggatggagcccatctgcacacgctcggccccgttgcgggtgatgagagcggtcagcgaggagtaggcgatgttgttggccgtgaagaagacggcgttgagcagcgtataggcgatgaagaaccaggcgtacttggcggtgtcccccaggctcgtggggatcgcgaagatcgcgatgagcatggcggcacagcccacgaacccccacagcatccacggacgggccttacccatccgcgtgttggtgcggtccagcagcgccccgaagatgatgtcggagaagccgtcgaagagccgggagaccatcatgagcgtgccgacgacgcccgcattcagcccggcggtgtccgtcaggtagatcatgacgaaggcggacaggagcacgtagacgacgttgccggcgacgtcgcccgatccgtaacccaccttgttgtaccacctcaggtacttcctctcactggccgcctccaggccgcttcctgcggtgggggcgccgaccgtcttagcggcggagtcgctgctcatggtttcacctcgttgtgagtgctggcgtgggagataagggggttgagcaggaaatggagctccatccccagctcctgactgtcgacctggtaacggggccgcagggcgggcccgcagctgttggatccgataccggccatggcggcatccaggcacaggaccgtgctgcccgaaggcgtcaactcggtgttgcgtcggcgcgcggccagctcctcctgcgtgtatcgggaggcattgaaggagaagggggtcagcccgacagcggccaggctcagcccgcctccggagaggacgaccttgttgcagtcggcgtggctgccgttctcctgaggcctgatgtagtcctcgtggaggtcgacgacgtcggcactgaaggccccgtggtagctggcgcggtgcttgtcgatgtagctctcctgtgggcccagtccgtagtagtcgacctggctcatggactcgggcaggaagaggcgcagtcccaggcgcggcaggctggggaagcccagcgtccggcgcagtcgcatgttcaggctcaggacgccgtcgtcggtgagggtccagacgagccgtccgtgcagggcgggctggaccgagggcgccacgaggccgacgtcggcgctgatggtgacgcgcccgggctcctcgttgacgtcgacgccgtaggcgcgggccacggcctggtggtagtgggcgcgctcccactccaggcgcgcgtggcggtcgttgtcggtgggcgcccgccagatgttgagctccaccgggcgctgaaggagctcgcggccctccgatgacagggacacgggcaggccggtgcgcgtgtcgatggtgcagctgagacggtcactgtcgacctcgatccgggtgcccttccgcctgaccggcaggcgggtctcgccgatggggcggtcggcgagtgaggcgacccaccggtggcgcctgtcggcgttgcgcagggcgatctcgtcgaagcccaggacgtggccggcggcccgcagcgagtcgggtcgggcgagccggtaggtgaccagcaggtggcagcgtccggtgggcgggaccttcggttcgcagcgcagcatgacgctcgtgcgcggcgggacgggctcgaccaggtcgaggtcctcgcggtccacgacgacgccgtcgcagcgcacctcataggagatgcgcaggtactgggacaggtcggtgtggtcgaggtcgttgtggatggtgagcaggccctcctcctggtcgtactcgatgacgcgggcggggcgctggacgttcttgagctcggcgagtcccgggtgggggacgcggtcgggcgagacgagcccgtcgacgcagaagttgccgtcgtggacggcctcgtcgtggtcgccgccgtagagctggatcggccggccgtcatcgctggtcccggcggtgaccgcgtggtcgcaccactcccacacgaagccgccgcacatgcgctcgtcggctcggatgatctcccagtagtcctcgaggtcgccggggctgttgcccatggcgtggcagtactccacgaggatgaagggcttatcggggtcggagtccaggtagtcgcggatctcctcgatggccgggtacatgcggctgtacaggtcgatgcaggagtagtcgtagcggcgcttggagtcgcggtagtaggagctctcgtagtgagtcagccgcgtggggtcgaagtccttggcccagaagagcgccgcctcgagggtgcagccgtaggagcactcgttgccggcggaccaggagatgatgctggggcggttcttctcgcggtggacgcacagcctcatgcggtcgacggtggcctcggtccactcagggttgtcggcgatgggctcgttccagtgctcgacctggttgtcccaggaggggtcggccaggaagcggctctgggtgccatggctctcgttgtcggcctcggacatgacgtagaagccgtgctcgtcgcacagctggtagaagcgcgggtcgttggggtagtgggagctgcgcaccgcgttgatgttgtgctccttcatcaggcgcaggtcccacagcatgtgctccaggtcgacgacgggcccggtggtcgggtcggagtcgtgccggttgacgccgcgcagggtgatgggccggccgttgaggtgcacgacggcgtcgctcacctcgacctcgcggatgcccacccggtcggtgatgacctcacccggcgtggtgatgaccagggtgtagaggtaggggtcctcggcgctccacaggtgaggggcctccacggtgagccgggcgcggtgggtgtagccgtcgtcgccggcgaagggctccagctcaccggcggccaccacggcgccgtcgtggtcgatgagctcgacggaggtggggacgggcccgccccggtaggtgccctggatcctgaccagggcggtggccgggccggcgtcgaggccggtgccggagatcgggcccagtgaggtggtggtgacgtagtcgaacaggacggcggccgggcggctcaggaggtagacgtcgcggaagatgccgctggtgcggaacttgtcctggtcctccaggtaggtgccgtcgcaccacttgagcactaggacggccaggcggttggcgccggggcgcaggagctcggtgacgtcgaactccgcggaggcgtgggagacctggctgtagccgacgtaggtgccgttgagccacacgtagaagcaggagtccacgccctcgaaggtcaggtaggtgctgggggcggcggggtccggggtgtagtcgaagtcgcggatgtaggcgccgcaggggttgtcctgggggacgtagggcgggtcgaaggggatggggtagcggacgttggtgtactggtggtggtcgtaacccaggtgctgccaggtgctgggcacctgaatcatggtgaagccctccgggaggtgggcggggtccgcctggccgggctcgtcgccgtcggacgtgccgacgggggcgtcctgctcccagaagggctcggtcagctcgtggatgctgggcaggtagcggaaggcccactggccgctgagcaggtggaagcggtcggagtcctcccgcctccaggggctggtggcgatggggcgggatgcgggcacgtagtaggagcggggcggcagcgtgtgttcatggaggacgtcgaggtcctcgaagtgtctcggaacgatcattgttcggctccccatggggttgacgggaacagaggacgcgcagcagtgcgacgcctgcgtggtgacgttaacatactagatggtagcctgcttcgctaggtgtatctaccgacagaatctcgattcagcacttcccgaggcggatctctatggcaacgtcacaatgcgccgggacgtggacgcccatggcactcctgataacctctcgccatgccagggcagagccgaggggcgcagggagcgccgtcgatgagcgacgtggcccgcctggcgggagtctccgctcagacggtctcccgcgtggcggcgggctcggagcacgtccgtcccgacacccgcgaacgggtcctgcgcgcaatgaaccagctcggctactcccccaaccgcgccgcccaggccctgcgccgcggctccttcaagacgatcggcgtgctgacccagcagatccagcgcaccggggaggccctgaccaccgcgggcgtgctggaagccgccaccgccgtcggctacgccgtcaacctcgtccaggtggagcaccccgcctccaacgacctgcgcgaggccgtctaccgactctcccaccaggccattgacgggcttgtcatcgtgcaggcaggtcgggccggacgcgagcagctggtactgcccccctcgatgccggtggcggtctcggactccacgctcatggactactacccctcggccagcgccgaccaggtcggcggggtgcgcgacgccgtcacacaccttctggaattggggcaccgcaccgtccaccacgtgtgtgggcccgaggactcccagtccgccctcatccgcaaggccacctgggccaggaccctgcgggaggccggcagagacgtccccgagacggtgtccggcggctgggaggcagcagcgggctatgaggccggcctgcgcctggccgcggacccggaggtgacggccgtcttctgcgccaatgacgagctggccctggggctcatccgggccatgcacgagcagggcaggcgggttcccaccgacgtctcagtggtcggcttcgacggcctggacgtgggcgagtacagcttcccgccgttgaccaccgtgcgccaggacttcaggaggcacggccgcgagatggtgagcctggtgctggagcaggcgggctccgggaccctggacggcagccgcagcatcatcatccccaccgagttcctcgtgcgcggctcgaccgccccgccggccgcctgagcgcggcgcaacatcggcccagccacccacgctgcgggagccaccgccccatcgaggacttacttttggcaccaggactgcgctctcccccagatgactgcggggagatcccagtagcctggaggacaacgcagtcctcgatcggaaagtacgtcctcggcgcaaaccgcagccacccctccggcccagcccggcccgcggacccgccctcggctcagccggcttgcggcaggaggatggaggcccccagggcgaaggggtagccgggtttgaggatgcactggacgaccggctgcgccatctccaggacgctgtcggcgtcgaggccctcctcgccgttggggccggcctcggccacgaggtcggagtaggggatggtgagatcgagcagggccatgccgtcccggtgggtggcggagtcccaggcgccgccctccatctcctgcagggtccccaggtggaagctcatgacgccgtggtcgtcgacctgcgcgggcacggacaggatgtggtgcggctcggggtcgcgcggcgcacgcagggtgaacaggatgatgccgccgtcgcgggcggcgcgcagcatgacgcggccaatgtggatgccgaagccgacgatatcgaagaccccctccatggcctccgcataggtcagcggcgcctccaggggaatgggggctccctcaccggggtcgttgatggcgcggcggcccgacggcgtggccgccttgagcagcaggaggcggccggcgtcggtcaggacgccggtctcgacacgctcctgccacccagccggggcctgggcggggccgggctcggactccaccagccccatgcccaggacggtggacaggtcggtgccgtcggcgggccggtgccaggtgatggtggcgtcgtcgtgccagatgggcaggaccccgttgaaggggatgccgaagcgcacgtgctcgcgctcgccgtcgacgggccgggagttatcgacatgactgacgtggctggtgtgccggccggaccgactctccggccctgcgccgccggcaccattgtcctgcggtcctgccaggtactcgctcatga

SEQ ID NO: 3739 - DNA, 23288 bp, synthetic construct
  misc_feature 1..23288: note = Synthetic
  source 1..23288: mol_type = other DNA
cgaggccgcctccagccagggcgccgccctgagcggcacgatgcgcctgggcatcatccccaccatcgcgccctacctggcccccgttctcatcgacggcctgcgcgaggccctgccccagatggacctggacctgcgtgagatggtcaccggggacaacctcgaccagctcgcccaggggcgcctcgacgccgccatcatcgccctggaggacgacctccagcgcaccaccgcaatcccgatgttcgacgagccgctcgtcgtcctcaccgccgccggccacccctgggccggccgcacggacgtgagccccaccgagctcgacgaccagcccctcctcctgctcgacgagggcaactgcctgcgcgaccagaccctggccctgtgccaacgctacggctcccagcccccggtcgcggtggccaccaccctgtcgacggtgacccgcatggtcgcccacggctcgggcgtgacgatcatccccgagggggcgctccagctgctgaccccctcctcggagtacggcatcgcccgtttcggcgacgagtcgccgatgcgccgcatgggcctggtacaccgggtctcctcctcccgcggcgccgacttcgcccagctggccgagctcatctcgcgcctggtcaaacaggccaacctgcctgtcacccccgtcacggaccctgctgcggcctgagctgtccttgggggctccccttgccggcggcgcacgctcgattcctttccgctcgacagcgccccgcaagccgtgacccgggccgcccaggcgactagcctgcccctatgacgggcggcaccgacggcggcacccgggcgacgacgcgcaccgggcggccactggcctgcgtcgtcgtcaacccctccaagccgcgcgccaccgccgcggtgcgctccctgctggagggcgagctgcgcgaggccggctatgccgggcccgtgtggttggagacgagcgtctccgagcccggcacgatgcaggcgcgcctggccctggcggccggggcgagcctggtggtggccgccggcggtgacggaacggtgcgctcggtggcggccggcctggccggcaccggcgcccagatgggcatcgtcccactgggcacggcgaacctggcggcccgcaacctcggggtgccggtcggggacgctcgggccgcggcccgggtggtggcccacggcatcgaccttcccgccgacctggcctgggtacgcaccgagccctggtccgatcccgacgtcgcccccgacccagcaccggcgggagacccccacgggcgggcgggctccgcacccctgacgggccgagccgcagcagcctcgccggactccccgcccactccggccgacccggccgactcccggcagctgtcggccgaggcggcccgggccgtgcacaccatccagagggcgacccgccggccgcatcagtggacccggcccacactcggcgacgagcacgcctgcatggtggtggccgggatcggattcgacgccggactggtggcctccacgcgcccggccctcaaggcgagggtcggttggggcgcctacgcgctggcggccatggagaacctgggctctccgcgcatggacctagtgctcagcctccgggacgaggccggcgcgcggcgcgtggagcgcctgcgggcccgcaacctgctggtggccaacggcggccggctcccggccggaatcaccctgctgccgcaggcccgcaccgatgacggcctgctcgacgtcgccgccatcgacacggtggcgggtttggcgggctggagctcgctggcgcgccaggtgctgccgccctacgcggcgcactactccgagtccggccgctcactgggtcgggtgatgctgcggcgcagcggggaggtggccgtccagctctcggcgccggccctggtggaggtcgacggcgacctgctggcgcctacgcagagcatgcgggtgcgtatcgaccccggggcgctgctcatccgccgcccggcggcctgagagccgacgcgactggggaggccggggcaggtgcgggccaggacggcctgggaggccggggcgcgcccgcctcactcctcccagaagtcggcgacgtcgatcgccccgccagtggcctcgaagtcggcgcgcacggcccggcgcagctcggcgtcgtgcagccagtccagggcgacggcggccagcccgtaggcgccgtcgagcgctgccgcgtccccggtgggggcgccggcggcctcggtcatggcgggggtgtggagggcgacgtcgggccggtcggtgaccttgatgagcgggtggatgccggggatgcgctgggacacgttgccgaagtcggtgccggcggcgatggtctcgggcaggaccccggcggccagggggtcgcggccgcgctcgcgctgggagcgcacccaggaggtcagcagggggccgttgtcgcggacggggacctcattgcagtactcggaggtgaggatctcaacgcccgtgccggtcatgagggcggcgccgtggaggacctcctcgacccgctcggcgatctccttgagggtctcgaggtacttcgagcgcaccatgatggacagctcggtgcgctcggggatgatgttggggacctggccaccgtcggtgatgatggcgtggaggcggtccatggggagcatctgctggcgcagcaggccgatgccggtcagggccagagtggcggcgtccagggcgttgcggcccatgaagggctgggaggcggcgtgggccggcacgccgtggaagatgacgcgcaggcggcgcacgcccagccaggtctggtgggtgacgtcgtgggcgtaggagtgggtctggatggcggcgtcgacgccgtcgagcatgccgcgcacggccaggatctccttggcggtcgagttctcctcggcgggcgtggtctgcaggacgacgcggccgggcagggagcccgggcgggtgcgggccagggcggccagggcgaggaaggcgcccacggagttggcgcacatgacgttgtgtccgcagccgtggccgatgccgggcagggcgtcgtactcggcgaggatggcgatggtgccggccgactcaccggaccctccggccgccgcgtccgcgcctgcggccccggggatctcggcgcgcagggcggtgtccatgccgtagacgccgacctcgggctcaatgccgtggcggcgcaggaactcggcgaccgtggccacggcgtggtgctcctcgtagccggtctcggggtggtcgtggatgtcgtgggagagctcgacgatctgcggggccagctcggcgacggcctgccccagggcggcgcgcagagcggtgggggctccggcgtcgtcgggcagggccggcgccgggccgacgacgccgcggcgctcctcggtctcggcgagcatgcgctcctggatggcgccggaggggacggttgggcgggtcaggtcgttcaggtcgcgcatggccctatcttggcccagccggcctccccacgctcagtcgcgaggtgcggcgagccgacgggccgcgtcgacgacgacggcgcgctgacgttcgtgcgcctcctcatcctcgaggggcccgcacagcatccgggccacctggggcacggtggaccaccagccggtcagcgacatgagcatgagcatgagtgccccggggtcgacgtcccgggtcaggacgccggagtcctggccactgcgcaccccggcgatcttgcgctgatagtgctcgcgccgcagctcctcctcgggcacctcgtcgtcgaaggtgagggcctcccagcacagcagccggatgagctcggggcgttgccggtggtagtcgtagaggcgcccggcgtagtcccccgcatcctcgccgtcatcgaaggcgggcggaacggcctcggcagccctggtcagctcgtcgcgcaggactgcggagaacaagcggtccttggagccgaagtagttgtagacgcgctccttgttgaccccggcccgcttggcgatccgctcgacggtggtccctgcaggcccacggagagtgaactcggcggtggcggcgtccttgatcttgcgcttggtcccctcggtgtcccaggccatgacactccgtctcccgtgtccgcgagcgccggcggcaaactccaacgctaccgttgcaactactcctccagtctactagggtcatttccaacgcctacgttggaaaggggttctcatgtctcccgtgcaccgacccgatcaacatcccgacgtcccccactcccccgagtcctcgacccagtcgacgactcggtcggcctctcccgcctaccccgccggcagcggcgcgaccgccgccctcgtggtcaccgcgctactcgtcctcacccagctgtacgccgccattcccctgctcaccccgatctcgaccgacctccatggcaacgccacggcagccctgtcgacggccttcagcctcacttacgccgcaggcttcctcatctgggggccggtctccgaccactacggcaggaggaggaccatggcgctcgcgctggggaccctcaccgtctccaccgtctgctgcgccctggcgccgtcgctcccagtcctcgcggccctgcgcgcgatccagggcctgagcgcttccggtttcgcacccgtggccctggcctacctgtccgaggcgctggcgccaccgaggcgggccggggcgatcggggcgatgtcgacgtcgttcctcgtggcgggcatctttggccaggtgctggcctcgctggtcgcgctgcacctggggtggcggtggttcttccctctgtgcggcggactgctggccgtggccctggcggtcgtcctcgccgtcgtgcacgacgccgcctccagcccttcgggctcctcgcttcgggggcagttcgcatcgctgggccggctcgcagtcaggccggcggttctggcgctcagcctggcgcacgtcacgctgctcatggtgttcgtcgccatgtacacggggatcggcggccatctggagtcgctgggcatgcggccgtcgacgatcatcctcattcgcctggcggccctgccggccatgttcctcagcctcgtggcgggccggctcgcggccaggtggtcctgggcgcagctagcccggctgggcttcggggtgtcgacattgggcatgctcggtgaggcactgctggcgcagagcctggtgggcctggtggccggcagcatcgtgtacgtcgccggggtagcgctggctgcaccggcaatgatcagcctctatggactggtttccgcacccaaccgcggtagtggcatggcgctcaacgggttcatcctgttcgtcggcacgagcgccggcccgctcccggcgacgtcgtcgcccaccttccggacgctggctctcatcctggccggcatcctggccgtggcactggtcgcgatcaccggtttcaaggcactggccgacgccgaccgctgactgccacccgcacggcgagagccaccgccccatcgaggacgtacttttgcaacgaggactgcgttctcccccagatggcgacggggagatcccagtggcctggaggaaaacgcagtcctcgatcggaaagtacgttccgggcgcgaaccgcagtcaccactgcggcccgcccggcccgcctcaccccgtcctcagctgaagagcgaggcggccaccatggtgtcgccctccttgatgcccggggggatcgcgaacagcgccgaggcctcgtgcttgaggtactcctggagggcgtcgctcttagtcatgcggtccaggatcgggtagaagttcgtgcgcgggtcacgcacgaaggcgatgaagaacaggccggtctgcagctgccccagggagtcggagccgtcggtgtagttgtagccgcggcgcagcatccggcgcccctggttctgctccggtgagacgacggcgatatgcgcgtcggccggcacgagcgtctcgcccttgtcgtccttggccttgtagtccacggccgtgaactcctcggaggccttcgtggggttggcgatgctcagcggcgccccgtagcgcttgtcgcgccccatggtctgttcctgctcgatgagccgcagccggtcccagatctcggcgagcatgcggatgcgccgggccacgtagtaggtgccgcccgtcatccactcggctgcggcgtcatcgcccttctggacccataggtgcttgttgagctggtcggaggagtcctcggccttgatgttgttggtgccgtccttgaagccgaagaggttgcgcggcgtctcctggtccacggaggtcgacgacgtgcgcccgtagccgacctggctccaccgcagtgtggcggtcccgaaggcgatgcgggtgaggttgcggatcgcgtggacgcacacctgggcgtcgttggagcaggcctggatgagcaggtcgccgtcggactgggcggcgtggagctggtcgccggcgaaggagggcatgccctccttgaggacggcgggcatcttggcggccaggccgaagcggtccttgccgtcggcgtcgacgaacaggctcttacccacgccgaaggtgatggtcagtccgttgggcttgtagccccaggcctcaccggtgtccttgggcggcagctgcttgttggagctgggctggccgccgatgagctcaccggcggtcatctgctcggcggccacggcccattcggacaagagggttttcaggtcctcgacgtcggtggcggagacgtcgaaggccgcggtgaacatgttgtcctgggcgggggtggtgatccccgcctggtggtcaccccggaaggggtaggtcgtgaggatggcctcctcgggccggcgggaggcctcccaggcacggccgccggccacaccggccaggcccgcgagcgcggcgcccaggcccgcaccggtgaacatggcacggcggctagtgcccttggctccgggcttccccgtcgcatccggcttctccggctggtcagccgcgtcggatgcgctcacctcatcgggctgctccgccgcgtcgggggccgagtcgctgttacccgggccctccgacgtcggggcctgcgactcctgctgcgcctgcgcggtctcgtcctggggctcatccagggtctcgtcctgggccgcgtcgtcggcgaccggggaggtgtccgactcgtgggccggcttgccactcactgctgtctccttccggggtgtccgggttgtcggggtgccgccgcctcagaggatggttccggcaaccttggacagcgactcgctcagggcgttgacggcgtcggagaacttgcgctgcttgtcggtgtaggcgttcttgtcgggggtctcgccggcgtccttctggaccgcggcgatggtggagtagtccacgtaggtgggctggccgttggaggcctttccggagacctcggccgcgacgagcttctcaaccgccgcgaactgggtggtgatcttctccgcgagcttggcgtccttcttcttcacgagctcctcgacgttgccataggcgaccttggcgccctcgacattggcctggaagtcgtagaggtcggtgtgggagaaggtctcctcctcgccgacgatcttggagctggcgacctcctcgaggaggccggaggcgccgttggcgacgtcctcgagctcgagctcgaacttcttcccaccggcgccggtgatgttcccgtagacgaggtcgtagagcgacttggtgtcggcgttgagctggtcggcgaccttcttgcgggcggcgtcgtcggcgaacttgaagggactggaggagtcctgggcccacaggtcggcctcgatgcggtgccatccggtccatccggcgaggacgtccttatccgtgacggccttgccggcgccggaggcgaggtcctggacgcgggtgtccagggcggcgtcgaggtcgccggcctccttgaggccgaaggactcagcggtgggctcgatgcgctcgtagaactggcgcgccagcgggtagaggctcttggcggtggcggtgtcgccggaggtgtaggcggtgacgaagccctgggtggcggtgaggagctggccggtctggtcgcgcacgtaggcggtgtagttggtgacggcggcctcgcgcgccttggtctcgtcggcactgatgtcgacggcggcgcccttggtgatcttcagctcggtgacgcccttgagctcgccgaccatattgggcttgcaggcggcgtagtaggtgccctccttgagggacgtggtgagcttcgtggtggtgccggggccgatgttctcctgctcggagacgatctggagcttgtcctcggtgaggatctccagctcgttgggggccgagccggagttggtgatggtgaaggtgaccacgcccgaggggaaggaggtcgaggagagcttgcaggcgtcgtcggtgagcgtcaccgtgatctcctgggacgcccccgagccggaggcgccgcccttggcgttcttggggttgtcggcgcaggcggccaggcccaggcccatggcggtcaggggaagcagggtgaggacgttgcgtcgcttgatggtgggcatggtctttcctttgtgaggagtggcgtggacagggggtggggagagaggtcggggtggtcaggaggtcacgacggcgtcgggctcctcggcgtcggactcgtcagcgctcacggcggccggagcggactcgactgcgcgcgcgggcgagggccatcggcccgcgatctggagggtgaggagcaccagggtcgggacgatgtagacccaccagcccacgacctgcaggacagtgggctggaggttgaactggaacatggcctggagcagcacgtagagccagtggaagggcgaggcgccgtcgggcaggtagcgggacaggtcccaggcgtggttcgtgaagccgggaagaacactcgcctcctgcaggtcaccgacgccgtaggcgacgatgccggcggcaacgacgacgaggaagtagccggtcacggcgaagaagacgcgcaggttgatgcgcaccgcaccctggtagatgagcacgcccagcacgatggccagaacgaggccggtgatgacgcccgccgtcgtctgcatggtggagctctcaatactggagcgcacggtggcccacacgaacagggcggtctccactccctcgcgcccgacggcgacgacggcgatccagacgacgccccagccggagctgcctgcggacagggacttggacagtgatccctccagctcgcccttgagctcacgggcgttcttccccatccagaagatcatccaggtcaccatgccgacggcgacgaaggacagggtgccgccgaggatctcctgggcctggaaggtgagggtcttgggaccccaggtcatgatggcgccggcgaccagcgggatcagcgccgccagcccgaccccgagccacagcttgggcagggcatcgcggcggtcggccttgacgaggtaggcgacgatgatgctgacaacgagcgccgcctccagtccttccctcagggcgatgagcaggttggcgaggaacactcgacctccaagtcacgaatcaatctcaagtcacgacggtcgaggtaagcctagccttagacgatctcaccaccaaagactcgcgtttctctcgttcgtgtggggtgaagcccagtttctccggtcacaccggtccgcgcgccccaaagcaccccacagtctccccgggccctcgcccggtcggggacgcctggcgcggccgacacgagacccaggcgcccgctcccttccgccacttctggcgcactctcaccgagactcgcttgaggccgagactccagcccagatggtgctacactggcggcgactgaattcctagtaaccttcgccatgtttgcggagtggactgctccaccggcgcacccaacggcaagccggtctgactgcccgatctcatattgagaccgggcagttttcttacgccaccctcacactgtgcccgagcgtggtatgcatctcccatgcctgctcaccaccttcgcgtggggatcgacgtcggcacccattccgtcgggctcgcaacgctgcgggtcgacgaccaggggacccccatcgagctcctctcagcgctgtcacacatccatgactccgggatcggcaaggaaggacaaaaggatcacgacacccgtaagaagctctccggtgttgcccgacgcacccgacacctgctgcgtaatcgacgcgagcggctccagcagctcgacaaggtgctggtcgacctcggattcccaatcccgaagccagaagagtaccccgacctcagcgagcgaaccgacccataccgggtatggcgggtgcgcgctcggctggtcgaagagacgctgcccgaggagctgcgcggcccggccatctccatggcggtgcgccacattgcgcggcatcgggggtggcgcaacccgtactcgaaggtcgagtcgctgttgtcacccgcagaggaatcgtctttcatgaaggcgctgcgcaagcgcatcatgacgaaaacgggcgaggtcctcgacgacgacatcacccccgggcaggcgatggcccaggtggcactgacccacaagatctacatgcgcggcccggagggcattctcggcaagctgcaccagagcgacaacgccaatgagatccggaagatctgcgcccgccagggcatctcttccgatgtctgcaagcaactgctgcgagccgtcttcaaggcggagtctccacgcggttcagccgtctctcgcgtggctcccgacccgcttcccggtcagggctccttccggcgcgcgccgaagtgcgatccggagtttcagcggttccggatcatctccattgtggctaacctccgcatcagcgaaaccaagggagagaatcggccactgacagtggacgagcgccgccaggtggttgccttcctcatggaggactcgcaagccgacctgacctgggttgacgtggctgagaagctaagagtctcccgtcaggctctgcggggtaccgcgatgctcaccgccgatggtgagcggtcggccgctcaacctccgatcgatgtcaccgaccagatcatgcgcaagaccaagatcagcgcgctaaagacctggtgggacaaggccgacgccgaacgacggggcgccatggtccgttacctctatgaggggcttgaggactcggagtgcgccgaggtcattgccaagctgccggagaaggaccacgccaagctcgattctctccacctcccagccggacgtgcggcatattctcgggagtcattgacggccctcagtgaccacatgctggagacgaccaacgatcttcatgaggcgcgcaagcggctcttcggcgtcgatgactcatgggcccctccggccgagcctgtgggcgccccagtgggcaacccgtcagtcgaccggactctcaagatcgtcgcacggtacctctctgcggttgagagtatatggggcacgcctgaggtcattcatgtggagcatgttcgcgatggcttcaccagcgagcgcacagcagaggagcgagataaggcgaataggagtcgccacaacgacaaccagaaagcgatagagaagattcaacacgactacggcaaggagggatacataagccgtggtgacatcgtgcgcttccatgccttaaagttacaaggaagcgcctgcttgtactgtgggacaacaatcggttaccacacatgccaactggaccacatcgttccacaggccggcccaggttcgaacaatcgccgtgggaatcttgtggccgtctgcgagcgctgcaaccattcgaagtcgaacactccgttcgcagtgtgggcccagaagtgcgggatccctcacgtcggagtgaaggaagccattagtcgagtaaacgggtgggttgaacataaccatagcacatcatccggagacttgacgcgcctaaagaaggaggtcatcgctcgtcttcggcgcacccaaaaggatccagagatcgatgagcgcagcatggagtccgtggcctggatggccaacgagctacaccatcgcattgcggccgcctaccccgagaccactgtcatggtctaccgaggctctatcaccgcagcagctcgcaaggcggccagcatcgagtcccgcatcaacctgatcggagagaaaggacgcaaggatcgccttgaccgccgacaccatgccgtggatgcaagcgttgtggcactcatggaaccaagtgttgccaagaccttggcagaacggtcaagtcttcgcggggaacagcgcctcactggccaagaacagacctggaagcagtacacaggattgaccgtgggcgcgcgagagcgcttcgaggcgtggcgtggccacatgcatcggctcacggagttgttcaacgagagtttggcagcagatgaagtgtacgtcacccaaaatattcgccttcgactatctgacggcagcgcgcacaccgtcaaagcatcaaaactagtctcccaccgcctcggcgacggactgacagtacaacagatcgaccgggcctgcactcccgcactgtggtgcgcactcactcgggagatagacttcgatgagaagaacggccttcccgcacgggaggaccgcgtgatcagagttcatggtcaggaaatcagctccgccgattgcattcaagttttctccaaaagaaagaaaaccaaaagcgatcgagacgaagctcctttcggggctatcgcagtgcgcggcggattcgtcgaaattgggtcatcaattcatcacgcccgcatctaccgcatcgagggcgagaagcccgcctacgcgatgctccgcgtcttcactcatgacctgctcagtcagcggcacggggatctcttctctgcggtcatcccaccccagtcgatcagcatgagatgcgctgccacagaactccgccaggctatctctgaaggcagggccacttatctaggatggatcgtttcaggcgacgaactacatattcccgtcgaaacattcacgacacacaagatcggaagtttccttaaagactaccccaacaccacacgctggcgcatctgtggatacgactctgaaactatgctaattctaaaaccaagaattctttcagcagaaggattaaacaattcaagtgacatcgcagagtatgtaattaaaaataaagggtggcgtgtagctattaacaaattagccaaagtgcatcctactgttgttcggcgcgatgccctaggccgccctcgacattccagcagatctaatctgcccgtcacctggtctattgagtgaggatcgccgatggacaccgcctggcgcatcattgactgctcgtcactggaggggcgcatcacctcggatcgaggagcaatctgcatccaccaggatgacggcggtgagcatcggatcccaacagccgatgtggcggtcgtcctcatgggtcctcgcgtgagcttctcgacggccgtcgtgcatcgcctgctgggcgcggatgtcatcgtgctgttctgcgactggcggggcgtccccgagggcgccgcctatccatggcatgagcacggtcgcgttggggccaggcagctggcgcagtcgcagctctctgaaccgcggaggaagaatgcgtggggtcgcctggtgagggcgaaggtgctggggcaggcgactgttctgcgtcagaaggatcgtcctgcggcagcccgactcaaggagatggcgcgttcggtgcgctcgggtgacccggagaacgtcgaggctcatgccgctcgcctgtactggtcccggctgttcgcctccgagggtcattttctccggcgcccggaggcggaggatcaccgcaacagctgcttgaactacggttatgcggtcctgcgcgcgcacgggatccgtgcggtggtgagcgctgggctcagcccaacgctcggcctgttccaccatgggcgaggcaatatgttcaacctggtggatgacatcattgaacccttccgccccgcggtggatgacgctgtactgcatctggatcctgatgcgagtcccgcggagcggcaggtgaagcaggttctggttgctgcggtgcaacagccattccgtgacgacggcgctacgctcccaaccgtcttggaggagctggctcagcacttgggtcagtactgtgaaggggaccgagcccgcttggatgtcccgtcgtggaccggtcctaggcatgagtcctgatggcggatgatccagtgtggtgcgtggtcatgttcgatctgccggtggcgacgaagaagcagcgcaaggaggcgactcgtttccggcaccttctcctggatgagggtttctggatgctccagtacagcgtctacgtccgttactccccgaccgtcgccggcgagcctcgcagggtgggctcgatcaagcgtaacctgccacgcggcggtgaggtgaggatgctgtacgtcaccgaccgcgagtggtcgcgcacgctctgtttccgcaacgaagagcccgttgaggctgagtcagagccccaacaactcatgatcttctgacctctgacgaggtgtttacactggtcagacccccttgacagacgtttcagaagtctatcaaggggtctggtgactgaatcccagctggttttcagggcctcgtcgaactcagggaagtctatcaaggggtctggtgactgaatcccagcccggcggcaagctccacgcctacgtcgggaagtctatcaaggggtctggtgactgaatcccagctgatggttctgctggtgttgcagccggtgaagtctatcaaggggtctggtaactgaatcccagcgtgggtaggcgcagtgacgctgacccctgaagtctatcaaggggtctggtgactgaatcccagcgtcaggcgttctccgcgtccagccggatgaagtctatcaaggggtctggtgactgaatcccagcggggtcccgctgtccacctgtgtgtggcgaagtctatcaaggggtctggtgactgaatcccagcggcgtggaaggcccgtcggcggccctcggaagtctatcaaggggtctggtgactaaatcccagcggcaaggtgacatgtgcgcagggcagcgggggctccggcatcgtcgggcagatccggtgccggccgacgacgccgcggcgcgcctcggtctggcgagcatgcgtccctggatggcgccggggggacggtgggggtgggtcaggtcgttcaggccgcgcgcgagtccaccgccgccctcactgcatgagccactccctcatcgaggacttactttcggtaccaggactgcgctgtcccccatacgactgcgcggagatcccagtagcctggaggacaacgtagtcctcgatcggaaagtacgtcctcggtggcgtcacaggcgacgacaacacgacgggcggcgcgccagcggagaagagctccgccagcgcaccgccccgggaaggaaggtgggggcgagggcgcgccatccgcgcacctcagtctcgccccccacccgtgagtcaagccgctcgcgcagcctcagctcgtcgagcctccgctctgcgcggcgcccgaactcccggcatcgccaccggcggcgccaccaccgacggtgtcatcggtccgccccgtggccacagagcccccgccggacatcgcggcaccgacctccacctcggcccgcgcgtcggcctcttccttgagtcgggtgttgaccttctcgacgtcgagccgcatgagcaggaagaggatgatcgcgttggccgccagcggcaaccacacgtacatgacgtagatcatctggatggcggactccggctgaaccttgaggtccccgtcgtacccggaggctgccagcagccacccggacagggccgtgccgagcccgccgcccaccttcacgccgagcgacgtgcaggagaacatgagcccgtcgatgcgcttaccggtgcgcagccaggtgtgctccgaggcctcggcgatgagggcgttgagcgtgccctgcagcgagctcatacccagggccgcgacgccggagaggatcagcatgagcgggaggctgttcatgtaagcggccacgagcaccccgagccgccccagggtcgcgatgacatagccgacgatgttaatccggtacatgctcccgaagcgactcaccaccaccggcgtgatgaggagcccgatcatgagcgggatgttgatggaccaggcgaaggtcttcagcaggtcctcgtcccccaggacgtacttcatgaagtagatacccatgttgagcatcgccgtgaagatctgagtgaggaggaagacgatgaggatgatgaggtagtacttgttggacaccagcatcttggccgactccgccaccgagagcttgtcctcctcgggctcctcctcacccacgagctcctcgggtggcagctccttgaccgagaagactgagagcgtgttgaccgccaggccgagcagcgcgtagatgatcgccatcgtccgccagccgctcgcgccgccgccgaacatggccacgccgcccacggtggcactctggatgagcaggttcgtcccgaaggcgaacatgaaacggatggagcccatctgcacgcgctcggccccgttgcgggtgatgagcgcggtcagcgaggagtaggcgatgttgttggccgtgaagaagacggcgttgagcagcgtataggcgatgaagaaccaggcgtacttagcagtgttccccaaactcgtggggatcgcgaagatcgcgatgagcaggacggcacagcccacgaacccccacagcatccacgggcgggccttccccatccgcgtgttggtgcggtccagcagcgccccgaagatgatgtcggagaagccgtcgaagagccgggagaccatcatgagcgtaccgacgacgcccgcattcagcccggcggtgtccgtcaggtagatcatgacgaaggcggacaggagcacgtagacgacgttgccggcgacgtcgcccgatccgtagcccaccttgttgtaccacttcaggtaccttctctcgctggccgcctccagtccgattcctgctgcgggggcgccggtcttcttgccggcggagtcgctgctcatagcgtcacctcgttgtgagtgctggtgtgggtgatgtgggggttgagcaggagatggagctccatccccagctcctggctgtcgacctggtagcggggccgcagggcgggcccgcagctgttggatccgatgccggccatggcggcgtcgaggcacaggaccgtgcagcccgacggcgtcagctcggtgttgcgtcgccgcgcggccagctcctcctgcgtgtagcgggaggcgttgaaggagaagggggtcggcccgacagcggccagaatcagcccacctccggagaggaggaccttgttgcagtcggcgtggctgccgttctcctggggccggatgtagtcctcgtggaggtcgacgacgtcggcgctgaaggccccgtggtagctggcgcggtgcttgtcgacgtagctctcctgcgggcccaggccgtagtagtcgacctggctcatggactcgggcaggaagaggcgcagccccaggcgcggcaggctggggaagcccagcgtccggcgcagtcgcatgttcaggctcaggacgccgtcgtcagtgagggtccagacgagccgtccgtgcagggcgggctggaccgagggcgccacgaggccgacgtcggcgctgatggtgacgcgcccgggctcctcgttgacgtcgacgccgtaggcgcgggccacggcctggtggtagtgggcgcgctcccactccaggcgcgcgtggcggtcgttgtcggtgggcgcccgccagatgttgagctccaccgggcgctgaaggagctcgcggccctccgatgacagggacacgggcaggccggtgcgcgtgtcgatggtgcagctgagacggtcactgtcgacctcgatccgggtgccctcccgcctgaccggcaggcgggtctcgccgatggggcggtcggcgagtgaggcgacccaccggtggcgcctgtcggcgttgcgcagggcgatctcgtcgaagcccaggacgtggccggcggcccgcagcgagtcgggtcgggcgagccggtaggtgaccagcaggtggcagcgtccggtgggcggaaccttcggttcgcagcgcagcatgacgctcgtgcgcggcgggacgggttccaccaggtcgaggtcctcgcggtccacgacgacgccgtcgcagcgcacctcgtaggagatgcgcaggtactgggacaggtcggtgtggtcgaggtcgttgtggatggtgagcaggccctcctcctggtcgtactcgatgacgcgggcggggcgctggacgttcttgagctcggcgagtcccgggtgggggacgcggtcgggcgagacgagcccgtcgacgcagaagttgccgtcgtggacggcctcgtcgtggtcgccgccgaagaggtggatcggccggccgtcgtcgctggtcccggcggtgaccgcgtggtcgcaccactcccacacgaagcctccgcacatgcgctcgtcggcccggatgatctcccagtagtcctcgaggtcgccggggctgttgcccatggcgtggcagtactccacgaggatgaagggcttgtcggggtcggagtcgaggtagtcgcggatctcctcgatggccgggtacatgcggctgtacaggtcgatgcaggagtagtcgtagcggcgcttggagtcccggtagtaggagctctcgtagtgagtcagccgcgtggggtcgaagtccttggcccagaagagcgccgcctcgagggtgcagccgtaggagcactcgttgccggcggaccaggagatgatgctggggcggttcttctcgcggtggacgcacagcctcatgcggtcgacggtggcctcggtccactcagggttgtcggcgatgggctcgttccagtgctcgacctggttgtcccaggatgggtcggccaggaagcggctctgggtgccgtggctctcgttgtcggcctcggacatgacgtagaagccgtgctcgtcgcacagctggtagaagcgcgggtcgttggggtagtgggagctgcgcaccgcgttgatgttgtgctccttcatcaggcgcaggtcccacagcatgtgctccaggtcgacgacgggtccggtaaccgggtcggagtcgtgccggttgacgccgcgcagggtgatgggccggccgttgaggtgcacgacggcgtcgctcaccgcgacctcacggatgcccacccggtcggtgatgacctcacccggcgtggtgatgaccagggtgtagaggtaagggtcctcggcgctccacaggtgaggggcctccacggtgagccgggcgcggtgggtgtagccgtcgtcgccagcgaagggctccagctctccggcggccaccactgcgccgtcgtggtcgatgagctcgacatgggtggggacggccccgccccggtaggcgccctggatcctgaccagggcggtggccggggcggcgtcgaggccggtgccggacaccgggccgagcgaggtggtggtgacgtagtcgaacaggacggcggccgggcggctcaggaggtagacgtcgcggaagatgccgctggtgcggaacttgtcctggtcctccaggtaggtgccgtcgcaccacttgagcaccaggacggccaggcggttggcgccggggcgcaggagctcggtgacgtcgaactccgcggaggcgtgggagacctggctgtagccgacgtaggtgccgttgagccacacgtagaagcaggagtccacgccctcgaaggtcaggtaggtgctgggggcggcggggtccggggtgtagtcgaagtcgcggatgtaggcgccgcaggggttgtcctgggggacgtagggcggatcgaaggggatggggtagcggacgttggtgtactggtggtggtcgtagcccaggtgctgccaggtgctgggcacctgaatcatggtgaagccctccgggaggtgggcggggtccgcctggccgggctcgtcgccgtcggacgtgccgacgggggcgtcctgctcccagaagggctcggtcagctcgtggatgctgggcaggtagcggaaggcccactggccgctgagcaggtggaagcgatcggagtcctcccgcctccaggggctggtggcgatggggcgggatgcgggcacgtagtaggagcggggcggcagcgtgtgttcatggaggacgtcgaggtcctcgaagtgtttcggaacgatcattgttcagctccccagggggttgacgggaacagaggacgagcagcggtgcgacgcctgcgtgatgacgttaacatactagatggtagcctgcttcgctaggtgtatctaccgacaaattctcggttcaccacccccatgacggatttccatggcaacgtcaccattccgccgggacgtggatgtccctgacactcctgataacctctcgccatgccagggcagagccgaggggcgcagggagcgccgtcgatgagcgacgtggcccgcctggcgggagtctccgctcagacggtctcccgcgtggcggcgggctcggagcacgtccgtcccgacacccgcgaacgggtcctgcgcgcaatgaaccagctcggctactcccccaaccgcgccgctcaggccctgcgtcgcggctccttcaagacgatcggcgtgctgacccagcagatccagcgcaccggggaggccctgaccaccgcgggcgtgctggaggccgccaccgccgtcggctacgccgtcaacctcgtccaggtggagcaccccgcctccgaggagctgcgcgaggccgtctaccggctctcccaccaggccattgacgggctcgtcgtcgtgcaggccgggcgggcggggcgcgagcagctggccctgccgccctcgatgccggtggcggtctcggactccacgctcgtggactactacccctcggccagcgccgaccaggtcggcggggtgcgcgaggccgtcacgcaccttctggagctggggcaccgcaccgtccaccacgtgtgcgggcccaaggactcccagtccagcctcatccgcagagccacctgggccaggaccctacgggaggcgggacgggaggttcccgagccagtacccggcgactgggaggccgcagcgggctatgaggccggcctgcgcctggccgcggacccggaggtgacggccgtcttctgcgccaacgacgagctggccctcgggctcatccgggccatgcacgaacagggcaggcgggttcccgccgacgtctcagtcgtcggcttcgacggcctggccgtgggcgaatacaccttcccgccgttgaccactgtgcgccaggacttcaggaggcacggccgcgagatggtgagcctggtgctggagcaggcgggctccgggacccgggacggccgcagcgtcatcatccccaccgagttcctcgtgcgcggctcgaccgccccgccggccgcctgagcgcggcgcgacgtcggcccggccagcctcgctgcgggagccaccgccccatcgaggacttactttcggtaccaggactgcgctgtcccccagatgactgcggggagagcccagtagcttggaggacaacgcagtcctcgatcggaaagtaagtcctcggcgcgaaccgcagccgccactccggcccagtcccggcccgcgggcccgccctcggctcagtcggcctgcggcaggaggatggaggcccccagggcgaaggggtagccgggtttgagaatgcactggacgaccggctgcgccatctccaggacgctgtcggcgtcgaggccctcctcgccgttggggccggcctcggccacgaggtcggagtaggggatggtgaggtcgagcagggccatgccgtcgcgatgggtggcggagtcccaggcgccgccctccatctcctgcagagtccccaggtggaagctcatgacgccgtggtcgtcgacctgcgcgggcacggacaggatgtgatgcggctcggggtcgcgcggcgcacgcagggtgaacacgataatgccgccgtcgcgggcggcgcgcagcatgatgcggccgatgtggatgccgaagccgacgatgtcaaagaccccctccatggcctccgcataggtcagcggcgcctccaggggaatgggggctccctcaccggggtcgttgatggcgcggcggcccgacggcgtggccgccttgagcagcaggaggcggccggcgtcggtcaggacgccggtctcgacacgctcctgccacccggccggggcctgggcagggccgggctcggactccaccagccccatgcccaggacggtggacaggtcggtgccgtcggcgggccggtgccaggtgatggtggcgtcgtcgtgccagatgggaacgacgccgttgaaggggatgccgaagcgcacgtgctcgcgctcgccgtcgacgggccgggagttatcgacatgactgacgtggctggtgtgccggccggaccgactcgccggccctgcgccgccggcaccattgtcctgcggtcctgccaggtactcgctcatgagcccagcctaactgccgctcggtcgccccgtgcgctcgcacggccggcaagccgctcctccttgcgggcgtgctcccactggtggacctgccgggccgagagcgccagcagcgccaggacctggagcgcactggtgacgaccaggccgagcgtggcctggcggaccccgaggctcgagacctgaaccatgtcagtggcgatacccaggaccagggtcgccatgagggcgatgcggccacgcgggtgcccgtgccaggccgccacccccagggcggcggtgatgagcgtcaggccgccagacaccgtggcgatgagggcgacgacggcggtgaccgcccccgggtcctcctccgggaatggggcggcctccagcacctgggtgatgtcgatgcgggccacgcgcagaatctcgaccaccaccatgagcccgatgagcaccagggcgatgacgagctggctggggcggcggcgtcgggcctggaggtcggccaggcgggcctgctgcagggagagcccggcatcggatccggggaccacctcgttgaggtcgagcacatggagggcgccgtcggtgaccacccggtcccctcccccgttcttgtcgtggtaggaggtgaagacgtccggccagatctcgagctcggcggcctcgttggcccagcggacgtcgtcgacgacgtagttgcgctcgatgtcgatgtcggcgtcgatcttgtgggt

SEQ ID NO: 3740 - DNA, 23288 bp, synthetic construct
  misc_feature 1..23288: note = Synthetic
  source 1..23288: mol_type = other DNA
gcccttcgcgcgcgacgccgtcctggccgccgaggccttcaacgaggccgcctccagccagggggccgccctgagcggcacgatgcgcctgggcatcatccccaccatcgctccctacctggcacccatcctccttgacggtctgcgcgaggccctgcctcagatggagctggacctgcgtgagatggtcaccggggacaacctcgaccagctcgcccagggacgcctcgacgccgcgatcatctccctggaggacgacctgcagcgcaccaccgcgatcccgatgttcgacgagcagctcgtcatcctcaccgccgcggatcacccctgggccggccgcacggacgtgagcccggccgagctcgacagccagcccctcctgctgctcgacgagggcaactgcctgcgtgaccagaccctgtccctgtgccagcgctacggcacccagccgccgatcgcggtggccaccaccctgtccacagtgacccgcatggtcgcccacggctccggcgtgacggtcatccccgagggggcgctccagttgctcaccccctccacggagtacggcgtcgcccgcttcggcggcgaggtgccgctgcgccgtatgggtctggtccaccgggtctcctcctcccgcggcgccgacttcgcccagctggccagcctcatctcgcgtctggtgagcgagaccgacctgcccaccatcccggtcaagcccttggccgcggcctgagcgcggcctggggctccgcccctgcaccgggctcacatcgtcttgggttcgtctccgcggccccaggaccgtgaccgaggctgcatgggcggctaacctgcccctatgaccggcttcaccgacggcgggacccggaccacgacgcgccccggccagccgttggcctgcgtcatcatcaacccctccaagcgtcgcaccaccaccgcggtgcggggtgtgctggagcgcgagctgcgtgaggccgggtacgccggaccggtgtggctggagacgagcgtgtccgagcccggcaccatgcaggcgcgcctggccctggccgccggggcccggctggtggtggccgcaggcggcgacggaaccgtgcgctcggtggcggccggcgtggccggtacggaagcgcggatgggcatcatccccctgggtacggcgaacctggcggcccgcaacctcggggtgccggtcggcgccccgagggcggcggctcgagtggccgcccacggggtcgacctgcccgccgacctggcctgggtgaggaccgaggcctggaccgctcccgacgtcgggccgggcaggaccgaatccgccgaaaccaccggtgaggcggacacgctgggcggcgacaccgccaccaacgccccctttcctgacggctcgcctccctcaaccgacccgacgggcgcagccgatacgaccacctccccacggctgtcggccgaggccgcccgagcggtgcgcacgatccagcgggcgacccgcaagccccgtcagtgggcccgccccacactcggtgacgagcacgcctgcatggtggtggccgggatcggtttcgacgccgggctggtggcctccacgcgcccggccctcaaggcgcgagtcggctggggcgcctacgccctggcggccatggagaacctgggctcaccgcgcatggacctggtgctcagtctcctggacgagaccggccagcggcgcgtggagcgcctgagagcccgcaacctgctggtggccaacggcggtcgcctgccggccgggatcaccctgctgcccgaggcgcgcaccgacgacggcctgctcgacatcgccgccatcgacacggtggcgggcctggcgggctggagctccctggcgcgccaggtgctgccgccctacgcagcgcgctactccgaaccgagtcgctccctgggacgggtggtgctgcgacgcggcggggaggtggccgtccagctctcggcgccggccctggtggaggtcgacggcgacctgctggcgcccacgcagggcatgcgggtgcgcatcgaccccggggcgctgctcatccgccgcccgccgacctgagagccggagcggccggagcggcgccccggctcactcctcccagaagccggcgacgtcgatcgccccgccggtggcctcgaagtcggcgcggacggcccggcgcagctcggcgtcgtgcagccagtccagggccacggcggccagcccataggcgccgtcaagcgcggccgcgtccccggtgggggcgccggcagcctcggtcatggcgcgggtgtggagggcgacgtcgggccggtcggtgaccttgatgagcgggtggatgccgggcacgcgctgggagacgttgccgaagtccgtgccggcggcgatcgtctcaggaaggaccccgggggccagggggtcgcggccccgctcgcgctgggagcgcgcccaggaggcgagcagggggccgttgtcgcgcacggggacctcgttgctgtcctcggaggtgaggatctcgacgccggttccggtcatgagggctgcgccgtggaggacctcctcgacccgctcggtgatctccttgagggtctcgaggtacttggagcgcaccatgatggacagctcggtgcgctcggggatgatgttggggacctggccgccgtcggtgatgatggcgtggaggcggtccatggggagcatctgctggcgcagcaggccgatgccggtcagggccagggtggcggcgtccagggcgttgcggcccatgaagggctgggaggcggcgtgggcgggcactccgtggaagacgacctccatgcggcgcaccccgagccaggtctgatgagtgacgtcatgggcgtatgagtgggtctggatggcggcgtcgacgccgtcgagcatgccgcgcacggacaggatctccttggcggtcgagttctcctcggcgggcgtggtctgcaggacgacgcggccgggaagggctccggggcgggtgcaggccagggaggccagggcgaggaaggcgcccacggagttggcgcacatgacgttgtggccgcagccgtggccgatgccgggcagggcgtcgtactcggcgaggatcgcgatggtaccggccggctgaccggcgtctccggccgctgcgtcagcggcaccggccccgacggtcccggagatctcggcgcgcagggcggtgtccatgccgtagacgccgacctcgggctcgataccgtggcggcgcaggagcgcggcgaccgtggcgacggcgtggtgctcctcgtagccggtctcggggtgagcgtggatgtcctgggagagctcgatgatctgcggggccagctcggcgacagcctcccccagggcggcgcgcaggtcggcgggggctccggcgtcgtcgggcaggaccggggccgggccgacgacgccgcggcgctcctcggtctcggcgatcatgcgctcctggatggcgccggagggggtggtggggcgggtgaggtcattcaggtcgcgcatagggcaatcatgcccagccgacgcccgtattgcacgggggtcgggttcccctggccagggcatgggtgcactccacgaagatccggaccccgcgcagtatggacggctcccggccagtacgacccgaggctcgtgcagtagccaccgggggccgcacaccacccaggttctcggcgtctactcgcggggcgcggcgagccggcgggccgcttcgacgacgacggcgcgccggcgatcatgctcctcctcgtccaggggcccgcacagcatccgcgccacctggggcgcagtggaccaccagcccgtcagggacatgatcatgagcatgagcgcaccggggtcgacgtcgcgggtcagggcgccggagtcctgaccgctgcgcatcccggcgatcttgcgctggtagtgctcccgccgcagctcctcctccggcacctcgtcgtcgaaggtgagagcctcccagcacagcagccggatgagctcggggcgttgccggtggtagtcgtacaggcgcccggcgtagtcccccacatcctccccctcgtcgaaggcgggaggcacggcctcggccaccttggtcagctcatcgcgcaggactgcggagaacaggcggtccttggagccgaagtagttgtagacgcgctccttgttgacccccgcccgcttggcgatgcgttcgacggtcgtccccgcgggcccgtggcgggtgaactcggccgtggcggcatccttgatcttccgcttggtcccctcggtatcccaggccatgacgccttctcccgtatccgcgagcgccagcagcaaactccaacgctaccgttgcaactacctctccagtctactagggtcatttccaacgcttacgttggaaaggggttctcatgtctcctgcgcaccgacccgatcagcatcccgacgtcgcccactcccccgagccgtccgcccagtcgacgactcggccggcctcccccgcctaccccgccggcagcagcgccaccgcgactctcgtggtcaccgcactgctcgtcctcacgcagctctatgcagccatccccctgctcgccccgatctcggccgatctccacggcaacgccactgtcgccctgtcgacggccttcagcctcacctacgccgcgggcttcctcatctgggggccggtctccgaccactacggcaggagaaggacgatggcgctcgcgctggggatcctcactgtctccaccggctgctgcgccctggccccgtccctgccggcactcgcagccctgcgcgcgattcagggcctgagcgcctccggcttcgcacccgtggccctggcctacctgtccgaggcgctggcgccgcacaggcgggccggggcgatcggggcgatgtcgacgtcgttcctcgtggcgggcatcgtcggccaggtcctggcctcgctggtcgcactgcacctggggtggcgatggttcttccccctgtgcggcgggctgctggctgtggccctggcggccgtcctcgccgtcgtgcacgacgccgctcacgcctccggcccctcgggctcctcgcttcgggggcagttcgcatcgctgggacggcttgcgctcagacctgcggttctggcgctcagcctggcgcacgtcacgctactcatggtgttcgtcgccatgtacacggggatcggcggccacctggagtcgctgggcatgcggccttcgacgatcattctcatccgcctggcggccctgccggccatgttcctcagtctcggcgccggccggttcgccgcaaggcggtcctgggcgcagatagcgcggctcggcttcggagtgtcggcgttgggcatgctcggtgaggccctgctcgcgggcagcctggcgggcctggtggccgccagcgtcgtctacgtggccggggtcgcgctggccgcgccggcgatgatcagcctctacggacaggtgtccgcccccaaccgcggcagcggcatggcactcaacgggttcatcctgttcgtcggcacgagcgccggcccgctcctggcgacgtcgtcgcccaccttccgagccctgaccttggcactgaccgggatcctggtcctggcactggccgcggtcaccgcgttcaaggcgctggccggcgccgaccactgaaccacccgcactgcgggagccgccccgcctcgacttcagctgaagagcgaggcggccaccatggtgtcgcccttctcgatgcccggcgggatcgcgaacagggccgaggcctcgtgcttgaggtactcctggagggcgtcgctcttggtcatgcggtccaggatcgggtagaagttcgtccgcgggtcacgtacgaaggcgatgaagaacaacccggtctgcagcagccccagggagtcggagccgtcggtgtagttgtagccgcggcgcagcatccggcgcccctggttctgctccggtgagacgacggcgatatgcgcgtcggccggcacgagcgtctcgcccttgtcgtccttggccgcgtagtccacggtcgtgaactcctcggaggacttcgtggggttggcgatgctcagcggcgccccgtagcgcttgtcgcgtcccatggtctgctcctgctcgatgagccgcaggcgatcccagacctcggcgagcatgcggatgcgccgcgccacgtagtaggtgccaccggccatccaggacgccgcggcgtcgtcgcccggctggacccacaggtgctcgttgagctggtcggcgggatcctcggccttgatgttgttggtgccgtccttgaagccgaacaggttgcgcggcgtctcctggtccacggaggtcgacgacgtccgcccgtagccgacctggctccaccgcagggtggcggtcccgaaggcgatacgggtgaggttgcggatcgcgtggacgcagacctgggcgtcgttggagcatgcctggatcagcaggtcgccgtccgactgggcggcgtggagctggtcgccggagaaggagggcatgccctccttgagaatcgccggcatcttggcggccaggccgaagcggtccttgccatcggcgtcgacgaacaggcccttgcccacgccgaaggtgatggtcaggccgttgggcttgtagccccaggcctcaccggtgtccttgggcggcagctgcttgttggagctgggctggcccccgatgagctcgccggcggtcatctgctcggcggccacggcccagtcggacaggagggttttcagctcctcgacgtcggtggtggagacatcgaaggccgcggtgaacatgttgtcctgggcgggggtggtgatccccgcctggtggtcgccgcggaaggggtaggtcgtgaggatggcctcctcgggtcgctgggaggcctcccaggcgcgcccaccggcgacaccggccaggcccgcgagcgcggcccccaggcccgcgccggtgaacatggcgcggcggctggttcccttgccgccgggcttcccagtccgtccaggtttcccggactcatccggcctccccggcttttcatccttatcggacgtgctggcgtcctcagactgttccgccgcgcccgaggccagagagccgtcacccgggtcttccgacgtcggggcctgcgactcctgctgcgcctgcgccgcctccgcggcggtcgcgtcatccgcgaccggggaggtctccggctcgtcgaccggcttgccactcactgctgactccttccagggcgtccgggttgctctggcctcgcggcctcagaggatggtcccggcgaccttggacaaggactcgctcagggcgttgacggcgtcggagaacttgcgctgcgtgtcggtgtaggagttcttgtccggagcctcgccggcgtccttctgcaccgcagcgatggtggagtagtccgcgtaggtgggctcgccgttggcggccttcccggagacgtgggcctcgacgagcttctcaaccgccgcgaactgggtggtgatcttctcggcgagcttggcgtccttcttcttcatgaggtcctcgacattgccgtaggcgaccttggcgccctcaacattggccttgaagtcgtagaggtcagtgtgggagaaggtctcctcctcgccgacgatcttggtggtggcgacctcctcgaggagggaggaggcgccgttggcaacgtcctcgagcccgagctcgaacttcttcccaccggtgccggtgatgtttccgtagacgaggtcgtagagtgacttggtgtcggtgttgagctggtcggccaccttcttgcgggcggcgtcgtcggcgaacttgaaggggctggaggagtcctggacccacaggtcggcctcgatgcggtgccatccggtccagccggagatgacctccttgtcggtgacggccttaccggcacctgcggcaaggtcctggacgcgggtgtccagggcgctgtcgaggtctccggcctccttgacgccgaaggactcggcggtgggctcgatgcgctcgtagaactggcgcgccagcgggtagaggctcttggcagtggcggtgtcgccggaggtgtaggcagtgacgaagctctgggtggcggtcaggagctggccggcctgatcacgcacgtaggcggtgtagttcttgacggcgtcctcgcgcgccttggcctcatcggcgctgacgtcgacggcggcgcccttggtgatcttcagctcggtgacacccttgagctcgccgaccatgttgggcttgcaggccgcgtagcaggtgccctccttgagggaggtggtgagcttcgtggtggtgccggggccgatgttctcctgctcggagatgatctggagcttgtcctcggtgagaacctcgaactcgttgggcaccgtgccggagttggtgatggtgaaggtgacgacacccgaggggaaggacgtggacgagagcttgcaggagtcgtcggtgagggtcaccgtgatctcctgggccttgccggatcccgaggcaccgcccttggcgttcttggggttgtcggcgcaggctgccagacccagccccatggcggtcagaggaagcatggcgagcacgttgcgtcgcttgatggtgggcatctgtctttcctttacgaagaagcggtggtggatcaggggtgggtcagggtctgtggaggcggtcaggaggcctcgacggcgtcgacggaggcctgcgcgccggcgtcgaccttctcgatgccgtccttctggcgcggcgcgggccaccgccccatgatctggagggtgagcaacacgagggtcggcacgatgtagaggcaccagcccagcacctgcagcacggagggctggaggttgagctggaacatggcctcgagcagcacgtagagccagtggaggggcgaggtgttggccggcaggtaggaggacaggtcccaggcgtggcttgtgtggccgggcaggaggcccgcctcctggaggtcgccgatgccgtaggcgacgatgccggcggccacgacgatgaggaagtagccggtcacggcgaagaagatgcggaggttgatgcgcaccgcgccctggtagatgaggacgcccagcacaatggccaggacgaggcccgtgacgacgcccgccgtcgtctgcatgatggaggtctcgatgctggagcgcacggtggcccacacgaacagggccgtctccacgccctcgcgcccgacggcgacgacggcgatccagacgacgccccagccggagccgccctcggcgagagtcttggacagcgagccctccagctcgcccttgagctcgcgggcgttcttccccatccagaagatcatccaggtcaccaggccgacggcgacgaaggacaggaggcctccgaggatctcctgggcctggaaggtgagggtcttgggcccccaggtcatgatggcgccggcgaccagtgggaccagtgccgccagcccgacccccaaccacagcttgggcagggcgtcccggcggtcggacttgaccaggtaggcgacgatgatgctgacaacgagtgccgcctccaggccttccctcagggcaatgagcaggttggcgagaaacactcgacctccacgtcatgtatcaatctcagatcactacggtcgaggtaagcctagccttagacgatctcatcaccaaagactcacgtttatcgcgctcatgtgggatgaagcccagtttcgtcggtcacaccgacccacgtcgctctggggtactccgggggcactccacagtctccacgggacgttcgcccggtcgggcacgcctggcggccgacacaagaccctgacacccgcacccttccaccacttccagcgcccgcacaccgagactctctcaagaccgaggatccagccctggtagtgctatactggtagcgactgaattcctagtaaccttcgccatgtttgcggagtggactgctccaccgcctagccggtctgactgcccgatctcacatcgagaccgggcagttttttacgtcaacctcacgatgagcccgagtgtggtatgcatctctcatgtctgctcaccaccttcgcgtggggatcgacgtcggtacccattcagtcgggctcgcaacgctgcgggttgacgaccacggtacccccatcgagctcctttcagcactgtcacacatccacgactccggggtcggcaaggaagggaaaaaggatcacgatactcgtaagaagctctccggcatcgcccgccgcgcccggcgcctgctgcatcaccgacgcacacagctccagcaacttgacgaggtgctgcgcgacctgggcttcccgatccccacgccaggagagttcctcgacctaaatgagcaaaccgacccgtaccgggtgtggagggtgcgtgcccgattggtcgaggagaaactccccgaggagctgcgcggcccggccatctccatggcagtgcgccacattgcgcggcaccgggggtggcgcaacccgtactcgaaggttgaatcgctgttgtcacccgcagaggaatccccgttcatgaaggcattgcgtgagcgcatcttggcgaccacgggcgaggttcttgacgacggcatcacccccgggcaggcgatggcccaggtggcgctaacccacaacatcagcatgcgtggcccggagggtattctcggcaagctgcatcagagcgacaacgccaatgagatccggaagatctgcgcccgacagggcgtctctcccgatgtctgcaagcagctactgcgagccgttttcaaggcggattctccacgtggctcagccgtctcccgtgtggctcccgacccgcttcccggtcagggctccttccggcgcgcgccgaagtgcgatccggagttccagcgcttccggatcatctccatcgtcgccaatctccgcatcagcgagaccaaaggagagaatcggccgctgacagcggacgagcgccgccacgtggtcaccttcctcacggaggactcgcaagccgacctgacctgggttgacgtggccgagaaactaggcgtgcatcgcagggacctacgaggaaccgctgtacacacagacgacggcgaacgatctgcggcaaggccgcccatcgacgccacagaccgcatcatgcgccagaccaagatcagttcactaaagacctggtgggaggaggctgacagcgagcagcggggcgccatgattcgttacctctacgaagaccctaccgactcggagtgcgccgagatcattgccgagctgccggaggaggaccaggctaagctcgactccctccaccttccagccggccgcgcggcgtactcgcgggagtcattgacggctctcagtgaccacatgcttgcgacgactgacgatctgcacgaggcacgtaagcggctcttcggcgtcgatgactcatgggctcctccagctgaagctataaatgctccggttggcaatccgtccgtcgaccggactctcaaaatcgtcggacggtacctctctgcggtcgaaagtatgtggggtacacctgaggtcattcacgtggagcatgttcgtgacgggttcaccagcgagcgcatggcagacgagcgagataaggcgaacaggcgtcgctacaacgacaaccaggaagcgatgaagaagattcaacgcgactacggcaaggagggatacataagccgaggtgacatcgtgcgcttggacgccttagagttacaaggatgcgcctgcttgtactgtgggacgacaatcggttaccacacatgccagctggaccacatcgttcctcaggctggcccaggatcgaacaatcgccgcgggaatcttgtggctgtctgcgagcgctgcaaccgttcgaagtctaacaccccattcgcagtgtgggcacagaagtgcgggatccctcacgtcggagtgaaggaagctattggtcgagtgcgaggctggcgcaaacagactcctaacacatcatccgaagacctgacacgccttaagaaggaggtcatcgctcgtcttcggcgcacccaggaggatccggagatcgatgagcgcagcatggagtctgtggcttggatggccaatgagctgcaccatcgcattgcggccgcctatcccgagaccactgtcatggtctaccgaggctctatcaccgcagcagctcgcaaggcggccggcatcgactcccgcatcaacctgatcggagagaaaggacgcaaggatcgaatcgaccgccgacaccacgctgtggacgcgagtgttgtggcactcatggaggcaagtgttgccaagaccttggcagaacgatcaagtcttcgcggggaacagcgactcactggcaaggagcagacctggaagcagtacacgggctcgaccgtgggggcgcgagagcacttcgagatgtggcggggccacatgcttcatctcaccgagttgttcaacgagcgcctggcagaagataaagtgtacgtcacccaaaacattcgccttcgactatctgacggcaacgcacatactgttaatccgtcaaaattagtctcccaccgcctcggcgacggattgacagtgcagcagatcgaccgcgcctgcactcccgcactgtggtgcgcactcactcgggagaaggacttcgacgagaagaacggtcttcccgcacgggaggaccgcgcgatcagagttcacggtcacgaaattaagtcttccgactacattcaagtattttccaaacgaaagaagacagatagcgatcgagacgagaccccctttggggctatcgccgtgcgcggcggattcgttgaaatcgggccatcaattcatcacgcccgcatctaccgtgtcgagggcaagaagcccgtctacgcgatgctccgcgtcttcactcatgacctgctcagtcagcggcacggggatctcttctctgcagtcatcccaccccagtcgatcagcatgaggtgcgctgagccgaagcttcggaaggccatcaccacaggcaatgccacctatctgggatgggtcgtggtgggtgacgaactggagatcaacgttgactccttcacaaagtacgccattgggcgtttccttgaagactttcccaacaccacacgctggcgcatatgtggttacgacaccaacagtaagctgacattgaaaccaatagtccttgccgcggaaggattagagaatccaagtagcgccgtgaatgaaatcgttgaactcaaaggatggcgagtcgccattaacgtactgaccaaagtacatcctactgttgttcggcgcgacgccctagggcgccctcggtattccagcagatctaatctcccaacctcctggactatcgagtgaggatggccgatggactcagcctggcgcatcattgactgttcgtcgctggaggggcgcatcaccgcggatcgcggagcaatctgcatccaccaggatgacggcggtgagcatcgggtcccgacagccgatgtggcggtgatcctcatgggcccccacgtgagcttctcgacggctgtcgtgcatcgtctaggcgcggatgtcgtcgtgctgttctgcgactggcggggcgtccccgaaggcgccgcctatccgtggcatgagcatggtcgcgttggggccaggcagctggcgcagtcgcagctctctgagccgcggcggaagaatgcttggggtcgcctggtaagagcgaaggtgttggggcaggcgactgttctgcttcagaaggatcgtcctgcggcggcccggctcaaggagatggcgcgttcggtgcgctcgggtgacccggagaatgtcgaggcccatgccgctcgcctgtactggtcccggctgttcgcctccgagggtgtttttctccggcgcccggaggcggaggatcaccgcaacagctgcttgaactacggctatgcagtcctgcgcgctcacgggatccgagcggtggtgagcgccgggcttagcccgacgctcgggctgttccatcacggacgcggcaatatgttcaacctggtggatgacatcatcgaacccttccgtcctgcggtggatgatgctgtgctgcatctggatcttgatgcgagtcccgctgagcggcaggtgaagcaggttctggttgctgcagtgcaacagccgttccgtgacgacggcgctacgctcccaaccgtcttggaggagctggctcagcacttgggtcagtactgtgagggggaccgagcccgcttggatgtcccatcttggaccggacctaggcgtgagtcctgatggcggatgatccagtgtggtgcgtggtcatgttcgatctgccggttgcgacgaaggagcagcgcaaggaggcgactcgtttccggcaccttctcctggatgagggtttctggatgctccagtacagcgtctacgtccgttactccccaaccgtggccggcgagcctcgcagggtgggctcgatcaagagtagcctgccgcgcggaggtgaggtgaggatgctgtatgtcaccgaccgcgagtggtcgcgcacgctctgtttccgcaacgaagagcccgttgagcctgagtcagagccccaacagctcatgatcttctgacctctgacgaggtgtttacgctggtcagacccccttgacagacgtttctgaagtctatcaaggggtctggtgactgaatcccagcccaggcttctcgttgctgaccgtgaccggaagtctatcaaggggtctggtgactgaatcccagcgccagggaacgcgccgtgatgagcaggggaagtctatcaaggggtctggtgactgaatcccagcacatgcccaagtcctggcgccgtgacttgaagtctatcaaggggtctggtgactgaatcccagcgaaggggccaggcccgacggtcagtcctgaagtctatcaaggggtctggtgactgaatcccagcgcatgctgttgtcctctttccagtgctcgaagtctatcaaggggtctggtgactgaatcccagcagcctgactccatggcgatgaagaccgagaagtctatcaaggggtctggtgactgaatcccagcgtggcgtcgatgccggcgcggcgtaggggaagtctatcaaggggtctggtgactgaatcccagcttgtgcccgaagaccccacgcagcaacggaagtctatcaaggggtctggtgactgaatcccagcggcgaggtgacatgtgctcagggcggcgggggctccggcgtcgtcgggcagggccagtgcccggccgacgacgccgcggcgttcctcggtctggcgagcatgcgctcctggatggcgccggaggggacggtggggcgggtcaggtcgttcaggtggcgcgtgagtccatcgtggcccagccacccgcgccgcgggagccaccaccccatcgaggacttactttcggcaccaggactgcgttctcccccagaagacggcggggaaaccccagtagcctggaggacaacgcagtgctcgatcggaaagtaagtcctcggtggcgacgcaggcgaagacaacacgacgggcagcgcgccagcggagaagaactccgcctgcactccgcccctgggaaggcgggtgggggcgagggcgcacggtccgtgtcgcctcagtctcgcccccacccgtgagtcacgccgctcacgcagcctcagctcgtcgagtcctcgccctccgaggtgcccaccgtgccatccgagcttccgacgacatcacccccaccgacggcgccgccggcctcacctaaaaccacggagcccccgccggccaccccgacgccgacctccgcctcggcccgcgtatcggcctcctccttgagccgggtgttgaccttctcgacgtcgagccgcatgagcaggaagaggatgagcgcgttggccacgagcggcaaccacacgtacatgacgtagatcatctggatggcggactccggctggaccttgaggttcccgtcgtacccggaggcggccagcagccacccggagagggccgtgccgaggccgccgcccaccttcacgccgagcgaggtgcaggagaacatgagcccgtcgatgcgtttgccggtgcgcagccaggtgttctccgaggcctcggcgatgagggcgttgagcgtgccctgcagcgagctcatacccagagccgcgaccccggagaagaacagcatgagcgcaaggctgtccatgtaagcggccacgagtaccccgagccgccccagggtcgcgatgacatagccgatgatgttgatccggtacatgcctccgaaccggctcaccaccaacggcgtgatgaggagcccgatcatgagggggacatagatggaccaggcgaaggtcttcagcaggtcctcatcgcccagcacgtacttcatgaagtagatgcccatgttgagcatggccgtgaagatctgggtgaggaggaagacgatgaggatgatgaggtagtacttgttggacacgagaatcttggccgactcccccaccgagagcttgtcctcctggggctcgtcctcaccctccagctcctcgggcggcagctccttgaccgagaacactaagagcgtgttgaccgccaggccgagcagcgcgtagatgatcgccatcgtccgccagccgctcgcgccgccaccgaacagggccacaccacccaccgtggcgctctggatgagcaggttcgtcccgaaggcgaacacgaaacggatggagcccatctgcacgcgctcagccccgttgcgggtgatgagagcggtcagcgaggagtaggcgatgttgttggccgtgtagaacacggcgttgagcagcgtgtaggcgatgaagaaccaggcgtacttagcaatgttccccaggctcgtggggatcgcgaagatcgcgatgatcaggatggcacagcccacgaacccccagagcatccacgggcgagctttacccatccgcgtgttggtgcggtccagcagcgtcccgaagatgaggtcggagaatccgtcgaagatgcgggaaaccatcaaaagcgtggcgacgacgcccgcatccagcccgacggtgtccgtcaggtagatcatgacgaaggaggtcagcaggacgtaaacgacgttgccggcgacgtcgcccgatccgtagcccaccttgttgtaccacttcaggtacttcctctcgctggccgcctccagtccgattcctgctgcgggggcgccggtcttcttgccggcagagtcgctgctcatagcgtcacctcgttgtgagtgctggtgtgggagacaagggggttgagcaggagatggagctccatccccagctcctggctgtcgacctggtagcggggccgcagggcgggcccgcagctgttggatccgataccggccatggcggcgtcgaggcacaggaccgtgctgcccgacggcgtcagatcggtgttgcggtgccgcgcggccagctcctcctgcgtgtaacgggaggcgttgaaggagaagggggtcggcccgacgacggccaggctcagcccgcctccggagacgatcaccttgttgcagtcggcgtggctgccgttctcctggggccggatgtagtcctcgtggaggtcgacgacctcggcgctgaaggccccgtggtggctggcgcggcgcttgtcgacgtagctctcctgcgggcccagtccgtagtagtcgacctgactcatggactcgggcaggaagaggcgcagccccaggcgcggcaggctcgggaagcccaacgtccggcgcagccgcattcccagactcaggacgccgtcgtcggtgaggctccagagaagtcgcccgtgcagagcgggctggaccgagggcgccacgaggccgacgtcggcgctgacggtgacccgaccgggctcctcatcgacctcgacgccgtaggcgcgggccacggcctggtggtagtgggcgcgttcccactccaggcgcacgtggcggtcgttgtcggtgggcgcccgccagatgttgagctcgaccgggcggtccaggagctcgcgcccctcggtggacagcgagacgggcaggccggtgcgcatgtcgatggcgcagctcagcctgtcgctgtcgatctcgatccgagtgccctcacgtctgaccggaagtcgggtctcaccgatagggcggttggcgagcgcggcgacccaccggtggcgcctgtcggcgttgcgcagggcgatctcgtcgaagcccaggacgtggccggcggccagcagcgagtccgggcgcgcgagccggtaggtgaccagcaggtggcagcggccggtgggcgggacattcggctcgcagcgcagcatgacgctcgtgtgcggcgggacgggctcaaccaggtcgaggtcctcgcggtccacgacgacgccgtcgcaccgcacctcgtaggagatgcgcaggtactgggacaggtcggtgtggtcgaggtcgttgtggatggtgagcagaccctcgtcctggtcgtactcgatgacgcgggcggggcgctggacgttcttgagctcggccaggccggggtgggggacacggtcgggcgagacgagcccgtcgacgcagaagttgccgtcgtggacggcctcgtcgtggtcgcctccgtagaggtgaaccggccggccgtcatcactggtcccggcggtgaccgcatggtcgcaccactcccacacgaagccgccgcacatgcgctcgtcggcccggatgatctcccagtagtcctcgaggtcgccggggccgttgcccatggcgtggcagtactccacgaggatgaagggcttgtccggatcggagtccaggtagtcgcggatctcctcgatggccgggtacatgcggctgtacaggtcgatgcaggagtagtcgtagcggcgcttggagtcgcggtagtaggagctctcgtagtgggtgagccgcgtgggatcgaagtccttgacccagaagagcgccgcctcgagggtacagccgtaggagcactcgttgccggcggaccaggagatgatgctgggacggttcttctcgcggtggacgcacagcctcatgcggtcgacggtggcctcggtccactcggggttatcggcgatgggctcgttccagtgctcgacctggttgtcccaggaggggtcggccaggaaccggctctgggtgccgtggctctcgttatcggcctcggacatgacgtagaagccgtgctcgtcgcacagctggtagaagcgcgggtcgttggggtagtgggagctgcgcaccgcgttgatgttgtgctccttcatcaggcgcaggtcccacagcatgtgctccaggtcgacgacagggccggtggcgggatcggagtcgtgccggttgacaccgcgcagggtgatgggatggccgttgaggcggacgacggcgtcgctcacctcgacctcgcggatgcccacccggtcggtgatgacctcgtcgggcgtggtgatgaccagggtgtagaggtaaggatcctcggcgctccacaggtagggggcctcaacgttcagacgggtccggtgggtgtagccgtcgtcgccggcgaagggctccagctcaccggcggccaccactgcaccgtcgtggtcgacgagctcgacggaggtggggacgggcccgccccggtaggcgccctggatcttgatgagggcggcggacgggccggcgtcgaagccggttccagccaccgggccgagcgaggtggtggtgacgtagtcgaacaggacggcggccgggcggctcaggaggtagacgtcgcggaagatgccgctggtgcggaacttgtcctggtcctccaggtaggtgccgtcgcaccacttgagcaccaggacggccagacggttggcgccgggacggacgagctcggtgacatcgaactccgcggaggcgtgggagacctggctgtagccgacgtaggtgccgttgagccacacgtagaagcaggagtccacgccctcgaaggtcaggtaggtgctgggggcggcggggtccggggtgtactcgaagtcgcggatgtaggcgccgcaggggttgtcctgaggcacgtaaggcgggtcgaaggggatggggtagcggacgttggtgtactggtggtggtcgtagcccaggtgctgccaggtactgggcacctgaatcatggtgaagccctccggaacggcggcggggctctcctcgccgtgctcgtcgtcggtctcgggggccttctcctcccagaagggctcggtgagctcgtggacgctgggcaggtagcggaaggcccaccggccgctgagcaggtggaagcggtcggagtcctcccgcctccaggggctggtggcggtggcccgggaggcgggcacgtagtaggagcgcggcggcagagtgtgctcgtggaggacgtcgaggtcctcgaagtgtctaggaacgatcattgttcggctccccagggggttgacgggaacagaggacgcgcagcagtgcaacgtctgcttgttgacgttaacatagtagatgagatctgctccagtgaggcagatctactcccaagattctgactccaccgacctcaaaggcggatcgatatggtaacgtcatcacatcgtcaggatgcggttacccctgacaatcctgataacctcgcgtcatgccagggcagagccggggcgcgcagggagcgccgtcgatgagcgacgtggcccgcttggccggcgtctcggctcaaacggtgtcgcgcgtggcggcgggctcggagcacgtccggcccgatacccgcgagcgggtcctgcgcgcgatgaaccagctcggctactcccccaaccgcgcagctcaggccctgcgccgcggttccttcaagacgatcggcgtgctgacccagcagatccagcgcaccggggaggccctgaccaccgcgggcgtgctggaggccgctaccgccgccgactacgccgtcaacctcgtccaggtggagcaccccgcctccaacgacctgcgcgaggccgtctaccggctctcccaccaggccatcgatgggcttgtcgtcgtgcaggcagggcgggccggacgcgagcagctggtactgcccccctcgatgccggtggcggtctcggactccacgctcgtggactactacccctcggccagcgccgaccaggtcggcggggtgcgcgacgccgtcggccaccttctggagctggggcaccgcaccgtccaccacgtgtgcgggcccgaggactcccagtccagcctcatccgcagagccacctgggccaggaccctgcgggaggcgggacgggtggttcccgagccggcacccggcgactgggaggccgcagcgggctatgaggccggcctgcgcctggccgcggacccggaggtgacggccgtcttctgcgccaacgacgagctggctctgggcctcatccgggccatgcacgagcagggaaggcgcgtacccagcgacgtctcggtcgtcggcttcgacggcctggcgctgggcgagtacagcttcccgcccctgaccacggtgcgtcaggacttcaagcggcacggccacgagatggtggacctggtgctggagcaggcagcctccggacccctggacggcagccgcagcatcatcatccccaccgagctcctcgtgcgcggctcaaccgccccgccgacgccctgagcgcgcagcgcggcgtcggtgcgactgctttgtctcctcacttctgagacatgcgagtgtcatgacttctgacatgctcgctcggacgggaacccggggcggggccagttgccctggagctgacggtggaccgacggaaaaggcctgaccgggcgtcggtgtccatggtgcggacatcaactccgcaccggcatcgcgacccgaagagcaaccgcagaattccaacgatcctcattgactgcttcgacggcggggctactgatgtccgctgcgtggacaccgggccgctggcgggatcaactcccccagggtcttagtggtagggctgagcacccctggccccatccgccctgactggctcccgttcctggtcctggtgacaccgacgcagcaccgactccgacacgagtcccgccacggtccgacctactccacgagggtggggatctactggccagggattgtgcgtactgcacaagagcccgacctacgtggaccacccccgacccttccccagtagcgtccgacccgcgtgcagtacgcgccagtcaccgcccgagcgactgggaacgctcaaacctgtccctgcagcctggacgagtgcggcaatcaggcctgatccgcccgccccgccggtgtcgtgagatgtcatgacatccaaaactctcagaagccatgagacaacacacggtgtcggcgcgacgtcggcccggcccagcccggccctcgtctcagccggcttgcggcaggagcacggaggcgcccagggcgaaggggaagccgggcttgaggatgcactgaatgaccggctgggccatttccaggacactgtcggcgtcgagtccctcctcgccgttggggccggcctcggccacaaggtcggagtaggggatggtgaggtcgagcagggccatgccgtcctggtgggtggcggagtcccaggcgccgccttccatctcctggagggtgcccaggtggaagcgcattacgccgcggtcgtcgacctgcgcgggcacggacaggatgtggtggggctcgggatcgcgcggcgctcgcagggtgaacaggatgatgccgccgtcgcgggcggcgcgcagcatgatgcggccgatgtggatgccgaagctgacgacgtcgaagaccccttccatggcctcctcgtggctcaacggcgcctccagggggatgggcgcaccgtcaccggggtcattgatcgcgcggcggcccgacggcgtcgccgccttgagcagcaggaggcgaccagagtcggtcagggtgccggtctcgacgcactcctgccaacccgccggggcctgggcgggaccgggctcggactccaccagccccatccccaggacgctggacaggtcggtgccgtcggcgggccggtgccaggtgatggtggcgtcgtcgtgccagatggggacgacgccgttgaaggggatgccgaagcgcacgtgctcgcggtccctgtcgactggacgagagtcatcgacgtggctggcatgccggccggcccgcgctgctggtcccgccctgccggcgctgccttcctgcggtcctgccaggtactcgctcatgaatccactctaacggcggccgagtcgtcgtatggctccgcctgctcggcggttcgggtgccggcgcggacggaacgacgctcctccttgcgggcgcgctcccactcgtggacctgccgggccgagagggccagcagggccagga

SEQ ID NO: 3741 - DNA, 23288 bp, synthetic construct
  source 1..23288: mol_type = other DNA
  misc_feature 1..23288: note = Synthetic
gttgagggtggccacggggctcgtgccgccttcgcggcgctcgcgcacggccaggcggcgggcctggtaggtggtgcagttggaggtggaggtgacctccatccagcgctgctgggtgggcagccaggcctcacagtcgaacttgcgggcggcggaggagcccaggtccccggcggcggtgtcgatgacccggtagggcagctcgaccagggccagcatctcctcctccatggccaggagccgggcgtgctcggcctcggcgtcctcggggcggcagtaggagaacatctccgccttgttgaactggtggacacggatgatgccgcgggtgtccttgccggcggccccggcctcgcgccggtagcaggtggaccagcccatgtagcgcttgggcccggcggacaggtcgaggatctcgtcggcgtggtagccggccagagccacctcggaggtgccggtgaggtagaggtcgtcggcgggcaggtagtagatctcgtcgctgtgggcgcccaggaagccggtgccgcccatgacctgcggggtgacgagggtgggggtggtcatcggggtgaagccgtgggcgacggcggcatccagggcggccgtcatgagggccagctccaggcgcatgccccagcccttgaggtagtagaagcgggccccggagaccttggcaccacggcgggtgtcgatgatgtccaggccctcgccgatcgccaggtggtcggcgggctcgaagccctcggcggcgaagtcgcggggccggccgccctcgtggcgcaggacgacgtagtcctcctcgccgcctgagggcgccccctcgatgaggttggcgaactggcgggccagatcgtcgagctcggcggcggcggccgaggaggcggcctcggcggccttgacctgctcggccagctccttggcgttggccaggatcgcggggcgctcctccggggaggccttccccacggaccgggagacctgcttctgctcggcgcggaggttctcgaaggcggccagcgcctgacggcgggtctcgtcggcggcgatgacgcggtcgacgagatcgacgtcggcaccacgggctcgctggctggcgcggaagggctcggggttctcacgaagcgcacgcaggtcgatcatggtcccgagtgtagtcaggaccgcggcccagacagcattcgatcagcacctgagccgatctgggccgcgagtgcggcggacggcgcggaccgggagagccggggacgaccaaagtcacgggcgagtggctgagccaacactcgggggcgcagcggaccggaatcgacgtcaacgccccggcgcccaccccgccgtcggggcgacccgagggcctggaaaccctggaatcatccgggagattggatggccgcggcgcgagtccggtgaggccgcgccccatacacgctcgcccccacccgcactaccgcccgatggcgaacgtgacccacttccctcttaccaacgcaatccacctgtgaatagaatccatttcaatcggtgcaccctatcgttcccgacggtgtttccgagccgccacgtcggaggctcgcccacaccacccacgcaccactctccccacaacctcccggctagtcgtctgtccccgattttctgtcactccgtcatatcaggctcgccgaccgccatgaatgcgggccccaaccacaggaccacaactcatgccgaccacatcatctccgtccttctcccagctgagggccttcgtagcgctgtgcgaccaccagcacttcggcgaggccgccacggcgctcggcgtcagccagcccagcctgtcccaggccatcaccgccctggagaagcgcgtcggcggcgagctggtggagcgcaccacccgccgcgtcctggtcacctccctgggcgaggccctgctgccctacgcccgggacgccgtcctggccgccgaggccttcagcgaggccgcctccagccagggcgccgccctgagcggcacgatgcgcctgggcatcatccccaccatcgcgccctacctggcccccgttctcatcgacggcctgcgtgaggccctgccccagatggacctggacctgcgtgagatggtcaccggggacaacctcgaccagctcgcccaggggcgcctcgacgccgccatcatcgccctggaggacgacctccagcgcaccaccgcgatcccgatgttcgacgagccgctcgtcgtcctcaccgccgccggccacccctgggccggccgcacggacgtgagccccaccgagctcgacgaccagcccctcctcctgctcgacgagggcaactgcctgcgcgaccagaccctggccctgtgccaacgctacggctcccagcccccggtcgcggtggccaccaccctgtcgacggtgacccgcatggtcgcccacggctcgggcgtgacgatcatccccgagggggcgctccagctgctgaccccctcctcggagtacggcatcgcccgtttcggcgacgagtcgccgatgcgccgcatgggcctggtgcaccgggtctcctcctcccgcggcgccgacttcgcccagctggccgagctcatctcgcgcctggtcaaacaggccaacctgcctgtcacccccgtcacggacccggctgcggcctgagctgtccttgggggctccccttgccggcggcgcacgctcgattcctttccgctcgacagcgccccgcaagccgtgacccgggccgcccaggcgactagcctgcccctatgacgggcggcaccgacggcggcacccgggcgacgacgcgcaccgggcggccactggcctgcgtcgtcgtcaacccctccaagccgcgcgccaccgccgcggtgcgctccctgctggagggcgagctgcgcgaggccggctatgccgggcccgtgtggttggagacgagcgtctccgagcccggcacgatgcaggcgcgcctggccctggcggccggggcgagcctggtggtggccgccggcggtgacggaacggtgcgctcggtggcggccggcctggccggcaccggcgcccagatgggcatcgtcccgctgggcacggcgaacctggcggcccgcaacctcggggtgccggtcggggatgctcgggccgcggcccgggtggtggcccacggcatcgaccttcccgccgacctggcctgggtacgcaccgagccctggtccgatcccgacgtcctccccgacccggcgccaacgggcgatccccgcgggcgggcagactccgtaccctccacacccctgacgggccgagccgcagcagcctcgccggactccccgcccactccggccgacccgcccgactcccggcagctgtcggctgaggcggcccgggccgtgcacaccatccagagggcgacccgccgaccgcatcagtggacccgacccacactcggcgacgagcacgcctgcatggtggtggccgggatcggattcgacgccggactggtggcctccacgcgcccggccctcaaggcgagggtcggttggggcgcctacgcgctggcggccatggagaacctgggctcgccgcgcatggacctagtgctcagcctccgggacgaggccggcgcgcggcgcgtggagcgcctgcgggcccgcaacctgctggtggccaacggcggccggctcccggccgggatcaccctgctgccgcaggcccgcaccgatgacggcctgctcgacgtcgccgccatcgacacggtggcgggcctggcgggctggagctcgctggcgcgccaggtgctgccgccctacgcggcgcactactccgagtccggccgctcactggggcgggtgatgctgcgccgcggcggggaggtggccgtccagctctcggcaccggccctggtggaggtcgacggcgacctgctggcgcccacgcagagcatgcgagtgcgcctcgaccccggggcgttgctcatccgccgcccggcggcctgagagccgacgcagccggggcggccggggcaggtgcgggccagggcagccagggcagcctgagaccgcctcactcctcccagaagtcggcgacgtcaatcgccccgccagtggcctcgaagtcggcgcgcacggcccggcgcagctcggcgtcgtgcagccagtccagggcgacggcggccagcccgtaggcgccgtcgagcgcggccacgtccccggtgggggcgccggcggcctcggtcatggcgggggtgtggagggcgacgtcgggccggtcggtgaccttgatgagcgggtggatgccggggatgcgctgggacacgttgccgaagtcggtgccggcggcgatggtctcgggcaggaccccggcggccagggggtcgcggccgcgctcgcgctgggagcgcacccaggaggtcagcagggggccgttgtcgcggacggggacctcgttgcagtactcggaggtgaggatctcaatgcccgtgccggtcatgagggcggcgccgtggaggacctcctcgacccgctcggcgatctccttgagggtctcgaggtacttcgagcgcaccatgatggacagctcggtgcgctcggggatgatgttggggacctggccgccgtcggtgatgatggcgtggaggcggtccatggggagcatctgctggcgcagcaggccgatgccggtcagggccagggtcgcggcatccagggcgttgcggcccatgaagggctgggaggcggcgtgggccggcacgccgtggaagatgacgcgcaggcggcgcacgcccagccaggtctggtgggtgacgtcgtgggcgtaggagtgggtctggatggcggcgtcgacgccgtcgagcatgccgcgcacggccaggatctccttggcggtcgagttctcctcggcgggcgtggtctgcaggacgacgcggccgggcagggagcccgggcgggtgcgggccagggcggccagggcgaggaaggcacccacggagttggcgcacatgacgttgtggccgcagccgtggccgatgccgggcagggcgtcgtactcggcgaggatggcgatggtgccggccgactcaccggagcctccggccaccgcgtccgcgccgccgcctccggggatctcagcgcgcagggcggtgtccatgccgtagacgccgacctcgggctcaatgccgtggcggcgcaggagctcggcgaccgtggccacggcgtggtgctcctcgtagccggtctcggggtggtcgtggatgtcgtgggagagctcgacgatctgcggggccagctcggcgacggcctgccccagggcggcgcgcacggcagtgggggctccggcgtcgtcgggcagggccggtgccgggccgacgacgccgcggcgctcctcggtctcggcgagcatgcgctcctggatggcgccggaggggacggtggggcgggtcaggtcattcaggtcgcgcatggccctatcttggcccagccaccaccactacgggagcggccgtccccatcgaggacgtacttttgcaacgaggactgcgttctcccccagatggcgacggggagatcccagtggcctggaggaaagcgcagtcctcgatcggaaagtacgttccgggcgcgaaccgccaccactgcggcccgcccggcccgcctcaccccgtcctcagctgaagagcgaggcggccaccatggtgtcgccctccttgatgcccggggggatcgcgaacagcgccgaggcctcgtgcttgaggtactcctggagggcgtcgctcttggtcatgcggtccaggatcgggtagaagttcgtgcgcgggtcacgcacgaaggcgatgaagaacaggcctgtctgcagctgccccagggagtcggagccgtcggtgtagttgtagccgcggcgcagcatccggcgcccctggttctgctccggtgagacgacggcgatgtgcgcgtcggccggcacgagcgtctcgcccttgtcgtccttggccttgtagtccacggccgtgaactcctcggaggccttcgtggggttggcgatgctcagcggtgccccgtagcgcttgtcgcgccccatggtctgctcctgctcgatgagccgcagccggtcccagatctcggcgagcatgcggatgcgccgggccacgtagtaggtgccgcccgtcatccactcggctgcggcgtcgtcgcccttctggacccacaggtgcttgttgagctggtcggaggagtcctcggccttgatgttgttggtgccgtccttgaagccgaagaggttgcgcggcgtctcctggtccacggaggtcgacgacgtgcgcccgtagccgacctggctccaccgcagtgtggcggtcccgaaggcgatgcgggtgaggttgcggatcgcgtggacgcacacctgggcgtcgttggagcaggcctggacgagcaggtcgccgtcggactgggcggcgtggagctggtcgccggcgaaggagggcatgccctccttgaggacggcgggcatcttggcggccaggccgaagcggtccttgccgtcggcgtcgacgaacaggctcttacccacgccgaaggtgatggtcaggccgttgggcttgtagccccaggcctcgccggtgtccttgggcggcagctgcttgttggagctgggctggccgccgatgagctcaccggcggtcatctgctcggcggccacggcccattcggacaggagggttttcaggtcctcgacgtcggtggcggagacgtcgaaggccgcggtgaacatgttgtcctgggcgggggtggtgatccccgcctggtggtcaccccggaaggggtaggtcgtgaggatggcctcctcggggcggcgggaggcctcccaggcgcggccgccggccacaccggccaggcccgcgagcgcggcgcccaggcccgcaccggtgaacatggcacggcggctggtgcccttggcactgggcttcccggcctgtccgggcctccccgtcgcatccggcttctccggctggtcagccgcgtcggatgcgctcacctcatcgggctgctccgccgcgtcgggggccgaggagctgttacccgggccctccgacgtcggggcctgcgactcctgctgcgcctgcgcggtctcgtcctggggctcatccagggtctcgtcctgagccgcgtcgtcggcgaccggggaggtgtccgactcgtgggccggcttgccactcactgctgtctccttccggggtgtccgggttgctctggcgtcgcggactcagaggacggttccggcgaccttggacagcgactcgctcagggcgttgacggcgtcggagaacttgcgctgggtgtcggtgtaggcgttcttgtcgggggtctcgccggcgtccttctggaccgcggcgatggtggagtagtccacgtaggtgggctggccgttggaggcctttccggagacctgggcctcgacgagcttctcaaccgccgcgaactgggtggtgatcttctcggcgagcttggcgtccttcttcttcacgagctcctcgacgttgccgtaggcgaccttggcgccctcgacattggcctggaagtcgtagaggtcggtgtgggagaaggtctcctcctcgccgacgatcttggagctggcgacctcctcgaggaggccggaggcgccgttggcgacgtcctcgagctcgagctcgaacttcttcccgccggcgccggtgatgttcccgtagacgaggtcgtagagcgacttggtgtcggcgttgagctggtcggcgaccttcttgcgggcggcgtcgtcggcgaacttgaagggactggaggagtcctgggcccacaggtcggcctcgatgcggtgccatccggtccatccggcgaggacgtccttgtccgtgacggccttgcctgcgccggaggcgaggtcctggacgcgggtgtccagagcggcgtcgaggtcgccggcctccttgaggccgaaggactcggcggtgggctcgatgcgctcgtagaactggcgcgccagcgggtagaggctcttggcggtggcggtgtcgccggaggtgtaggcggtgacgaagccctgggtggcggtgaggagctggccggtctggtcgcgcacgtaggcggtgtagttggtgacggcggcctcgcgcgccttggtctcgtcggcactgatgtcgacggcggcgcccttggtgatcttcagctcggtgacgcccttgagctcgccgaccatattgggcttgcaggcggcgtagtaggtgccctccttgagggaggtggtgagcttcgtggtggtgccggggccgatgttctcctgctcggagacgatctggagcttgtcctcggtgaggatctccagctcgttgggggccgagccggagttggtgatggtgaaggtgaccacgcccgaggggaaggaggtggaggagagcttgcaggcgtcgtcggtgagagtcaccgtgatctcctgggacgccccggagccggaggcgccgcccttggcgttcttggggttgtcggcgcaggcggccaggcccaggcccatggcggtcagggggagcagggtgaggacgttgcgtcgcttgatggtgggcatggtctttcctttgtgaggagtggcgtggacgggggtggggagggaggtcggggtggtcaggaggtcacgacggcgtcgggctcctcggcgtcggactcgtcagcgctcacggcggccggagtggccggagcggactcgactgcgcgcgcgggcgagggccatcggcccatgatctggagggtgaggagcaccagggtcgggacgatgtagacccaccagcccacgacttgcaggacagtgggctggaggttgaactggaacatggcctggagcagcacgtagagccagtggaagggcgaggcgccgtcgggcaggtagcgggacaggtcccaggcgtggttcgtgaagccgggaagaacattcgcctcctgcaggtcaccgacgccgtaggcgacgatgccggcggcgacgacgacgaggaagtagccggtcacggcgaagaagacgcgcaggttgatacgcaccgcgccctggtagatgaggacacccagcacgatggccaggacgaggccggtgatgacgcccgccgtcgtctgcatggtggagctctcaatgctggagcgcacggtggcccacacgaacagggcggtctccactccctcgcgcccgacggcgacgacggcgatccagacgacgccccagccggagctgcctgcggagagggacttggacagcgacccctccagctcgcccttgagctcacgggcgttcttccccatccagaagatcatccaggtcaccatgccgacggcgacgaaggacagggtgccgccgaggatctcctgagcctggaaggtgagggtcttggggccccaggtcatgatggcgccggcgaccagcgggatcagcgccgccagcccgaccccgagccacagcttgggcagggcatcgcggcggtcggccttgacgaggtaggcgacgatgatgctgacaacgagcgccgcctccaggccctccctcagggcgatgagcaggttggcgagaaacactcgacctccaagtcacgaatcaatctcaagtcacgacggtcgaggtaagcctagccttagacgatctcaccaccaaagactcttgtttctcgcgctcgtgtgggatacagcccagtttctccggtcacaccggccggcgacgccgcgggacgccccacagtcaccccgaggcgttcgcccggccagggacgcctggcggccgacacaagatcctgacacccgcacaccttccaccacttccagcacccgcacaccgagactctctcaagaccgaggatccagccctggtagtgctatgctggtagcgactgaattcctagtaagcttcgccatgtttgcggagtggactgctccaccgcctagtcggtctgactgcccgatctcatattgagatcgggcagttttcttacaccagccccataatgcgtccgaatgtggtatgcatctctcatgtctgctcaccaccttcgcgtggggatcgacgtcggcacccattctgtcgggctcgcaacgctgcgggtcgacgagcaggggacccccatcgagctcctttcagcactgtcacacattcacgactctggggtcggcaaggaaggacgagagaaacacaaaacccgtaagaaggtctccggcgtcgcccgccgcgcccagcgtctgctgcgtaatcgacgcaagcggctccagcaactagacgaggtgctgctcgacctgggcttcccgatcccaacgccaggagagttcctcgacccgaacgagccagccgacccataccgggtatggagggtgcgtgctcgactggtcgaggagcagctccccgaggagctgcgcgccccggccatctccatggcagtacgccatattgcgcggcaccgggggtggcgcaacccgtactcgaaggtcgagtctctgttgttacccgcggacgagtctccgttcatgaaggctctgcgtgaacgcatcatgacgaagacgggcgaggttctcgacgacggcatcacccccgggcaggccatgacccaggtggcactgacccacgccgtcaaaatgcgtggcccggagggtattctcggcaagctgcatcagagcgacaacgccaacgagatccgcaagatctgcgaccgtcagggcatctcttccgatgtctgcaagcagctactacgagctgtcttcaaggcggattctccacgtggctcagccgtctcccgcgtagctcccgacccgcttcccggtcagggctccttccgacgcgcgccgaagtgtgatccggagttccagcgcttccgaatcatctccatcgtggctaacctccgcatcagcgaggccacaggcaagaaccgaccgctgacggtggacgagcgccgccaggtggttgccttcctcatgaaggactcgcaggccgacctgacctgggttgacgtggccgaaaagctagacgtgcatcgcagggacctacgaggaaccgctgtactcacagacgacggcgaacgatctgcagcaaggccacccatcgacgcgacagaccgcatcatgcgccagaccaagatcagctcactgaagacctggtgggaggcggctgacagcgagcggcggggcgccatgattcgttacctctacgaagagcctgccgacttggagtgcgccgagatcattgccgagctgccggaaaaggaccaggccaagctcgattctctccacctcccagccggacgtgctgcgtattcgcgggagtcattgacggccctcagcgaccacatgctagccacaactgacgatctgcatgaggcgcgtaagcagctcttcggcgtcgatgactcatggctccctccagttgaagccataaacgccccggtgggcaatccatccgtcgaccggactctcaagatcgtcggacggtacctctctgcggtcgagagtatgtggggtacacctgaggtcattcacgtggagcatgttcgtgacgggttcaccagcgagcgcatggcagacgagcgagataaggcgaacaggagtcgctacaacgacaaccagaaagcgatagagaagattcaacacgactacggcaaggagggatacataagccgtggtgacatcgtgcgcttccatgccttaaagttacaaggaagcgcctgcttgtactgtgggacaacaatcggttaccacacatgccaactggaccacatcgttccacaggccggcccaggttcgaacaatcgccgtgggaatcttgtggccgtctgcgagcgctgcaaccattcgaagtcgaacactccgttcgcagtgtgggcccagaagtgcgggatccctcacgtcggagtgaaggaagccattagtcgagtaaacgggtgggttgaacataaccatagcacatcatccggagacttgacgcgcctaaagaaggaggtcattgctcgtcttcggcgcacccaaaaggatccagagatcgatgagcgcagcatggagtccgtggcttggatggccaacgagctacaccatcgcattgcggccgcctaccccgagaccactgtcatggtctaccgaggctctatcaccgcagcagctcgcaaggcggccggcatcgagtcccgcatcaacctgatcggagagaaaggacgcaaggatcgaatcgaccgccgacaccacgctgtggacgcgagtgtagtggcactcatggagccaagtgttgccaagaccttggcagaacggtcaagtcttcgtggggaacagcgcctcactggccaggagcagacctggaagcagtacacgggcttgaccgtgggagcgcaggagcgcttcgagatgtggcgaagccgcatgcttcacctcacggagttgttcaacgagcgcctggcagaagataaagtgtacgtcacccaaaacattcgccttcgactatctgacggcaacgcacatactgttaatccgtcaaaactagtctcccaccgcctcggcgacggattgacagtgcagcagatcgaccgagcctgcactcccgcactgtggtgcgcactcactcgagagaaggacttcgacgagaagaacggtcttcccgcacgggaggaccgcgttatcagagttcacggtcacgaaattaagtcttccgactacattcaagtattttccaaacgaaagaagacagatagcgatcgagacgaggacccctttggggctatcaccgtgcgcggtgggttcgttgaaattgggtcatcaattcatcacgctcgcatctaccgtatcgaggataagaagccctcctatgcgatgctccgcgtcttcactcatgacctgcttagcaaacgacacagcgacctcttctcggtagacattccacctcagtcgatcagcatgagatgcgcgaccacagaactccgccaggctatctcagaaggcagagccacttatctcggatggatcattgcaggcgacgaactacatgttcccgtcgaaacattcacgacacacaagatcggtagcttccttaaagactatcccgacaccacgcactggcgcatctgtggatacgactccgaaactatgctaattctaaaaccaagagttctttcagcggaagggttgaataattcaagtaacatcgcaaaatatgtaattaaagacaaagggtggcgtatagctattaacaaattggtcaaagtacatcctactgttgttcggcgtgacgccctaggtcgccctcggtattccagcaaatctaatctccccatctcctggactattgagtgaggatcgccgatggacgcagcctggcgcatcattgactgttcgtcgctggaggggcgcatcacctcggatcgcggagcaatctgcatccaccgggatgacggcagtgagcatcggatcccgacggccgatgtagcggtgatcctcatgggtcctcacgtgagcttctcgacagctgtcgtgcatcgcctgttgggcgcggatgtcgtcgtgctgttctgcgactggcggggcgtcccagagggcgccgcctatccgtggcacgagcatggtcgcgtgggtgctcggcagctggcgcagtcgcagctctccgagcctcggaggaagaacgcgtggggtcgcctggtgagggcgaaagtgttggggcaggcgactgtcctgcttcagaaggatcgtcctgcggcaacccgactcaaggagatggcacgttcggtgcgctcgggcgacccggagaatgtcgaggcccatgccgcccgcctgtactggtcccgtctgttcgcctccgagggtgattttctccggcacccggaggcggaggatcaccgcaacagctgcttgaactacggctatgcagtcctgcgcgcccatgggatccgggcggtggtgagcgccggactcagcccgacgctcgggctgttccaccatgggcgcggaaatatgttcaacctggtggatgacatcatcgaacccttccgccctgcggtggatgatgctgtgctgcatctggatcctgatgcgagtcccgctgagcggcaggtgaagcaggttctggttgctgcggttcaccagccgttccgtgacgacggcgctacgctcccaaccgtcttggaggagctggctcagcacttgggtcagtactgtgaaggggaccgagcccgcttggatgtcccctcgtggaccggtccgaggcgtgagccctgatggcggatgatccagtgtggtgcgtggtcatgttcgatctgccggtggcgacgaagaagcagcgcaaggaggcgactcgtttccggcaccttctcctggatgagggtttctggatgctccagtacagcgtctacgtccgttactccccgaccgtcgccggcgagcctcgcagggtgggctcgatcaagcgtaacctgccacgcggcggtgaggtgaggatgctgtacgtcaccgaccgcgagtggtcgcgcacgctctgtttccgcaacgaagagcccgttgaggctgagtcagagccccaacagctcatgatcttctgacctctgacgaggtgtttacgctggtcagacccccttgccagacgtttccgaagtctatcaaggggtctggtgactgaatcccagcccatgggggagcgggcacctcgaccctggaagtctatcaaggggtctggtgactgaatcccagcttggtggtttgtgggtggtgttgggttggaagtctatcaaggggtctggtgactgaatcccagcgctgcgctgacaccggggtggcagcctcgaagtctatcaaggggtctggtgactgaatcccagctcgtccccacctcacggggcgacggtccgaagtctatcaaggggtctggtgactgaatcccagctgctggcttggctggcattgctggcttggaagtctatcaagggggccggtgactgaatcccagcgcggcgcggcgagcctcaactcgggggcgaagtctatcaaggggtctggtgactgaatcccagctcgtcgccggtgtagtagctgttgttgagaagtctatcaaggggtctggtgactgaatcccagcttgttggcgtagcgggcctccggggcgggaagtctatcaaggagtctggtgactgaatcccagcgtgagccacacgtggtcggtcgcgtcccgaagtctatcaaggggtctggtgactgaatcccagcaccgaggtgacatgtgcgcagggtggtggggactccggcgtcgtcaggcaaagccggagccaagccagtgccgagccaacgccgcggcgcgcctcggtctggcaagcatgcgctcctggatggctccggaagggacggtgggggtggggcaggacattcaggccgcgggcgagtccatcgcggccccgccgccgccctcactgcatgagccactccctcatcgaggacttacttttggcaccaggactgcgctctcccccagatgactgcggggagatcccagtagcctggaggacaacgcagtcctcgatcggaaagtacgtcctcggagcaaaccgcagccgccactccggcccagtccggcccgcgggcccgccctcggctcagccggcttgcggcaggaggatggaggcgcccagggcgaaggggtagccgggtttgagaatgcactggacgaccggctgcgccatctccaggacgctgtcggcgtcgagcccctcctcgccgttggggccggcctcggccacgaggtcggagtaggggatggtgaggtcgagcagtgccatgccgtcccgatgggtggcggagtcccaggcgccgccctccatctcctgcagagtccccaggtggaagctcatgacgccgtggtcgtcgacctgcgcgggcacggacaggatgtggtgcggctcggggtcgcgcggcgcacgcagggtgaacacgatgatgccgccgtcgcgggcggcgcgcagcatgacgcggccgatgtggatgccgaagccaacgatatcgaagaccccctccatggcctccgcatagctcagcggcgcctccaggggaatgggggctccctcaccgggatcgttgatggcgcggcggcccgacggcgtggccgccttgagcagcaggaggcggccggcgtcggtcaggacgccggtctcgacacgctcctgccacccggcaggggcctgggcagggccgggctcggactccaccagccccatgcccaggacggtggacaggtcggtgccgtcggcgggccggtgccaggtgatggtggcgtcgtcgtgccagatgggcaggaccccgttgaaggggatgccgaagcgcacgtgctcgcgctcgccgtcgacgggccgggagttatcgacatgactgacgtggctggtgtgccggccggaccgactctccgaccctgcgccgccggcaccattgtcctgcggtcctgccaggtactcgctcatgagcccagcctaactgccgctcggtcgccccgtgcgctcgcgcggccggcaagccgctcctccttgcgggcgtgctcccactcgtggacctgccgggccgagagcgccagcagggccaggacctggagcgcgctggtaacgaccaggccaagagtcgcctgccggaccccgaggctggagacctgaaccatgtcagtggcgatacccaggaccagggtcgccataagggcgatgcggccacgcgggtgcccgtgccaggccgcaacccccagggcggcggtgatgagcgtcaggccgccagacaccgtggcgatgagggcgacgacggcggtgaccgcccccgggtcctcctccgggaacggggcggcctccagcacctgggtgatgtcgatgcgggccacccgcaggatctcgactgccaccatgagcccgatgagtgccagggcgatgacgagctggctggggcggcggcgtcgggcctggaggtcggccaggcgggcctgctgcagggagagcccggcgtcggacccggggaccacctcgttgaggtcgagcacgtggagggcgccgtcggtgaccacccggtcccctcccccgttcttgtcgtggtaggaggtgaagacgtccggccagatctccagctcggcggcctcgttggcccagcggacgtcgtcgacgacgtagttgcgctcgatatcgatgtcggcgtcgatcttgtgggtgacctggagggtgagggcgctcaggccgacggcgcggtcgtaggtggcggcggccagccagtccacgtgcccgccgccgggtagcgaccagccgggcgggcagtaccagaagcggatgtggtggcgctgtgcggggttgccctcgacctccttctggtaggcgaagctctgcttgcgtccgaagagcatgaggttggagacgggggcggccgggtaggagcggcgcagcagcgaggagacgatgatcctccaggaggtgcgcagggtgatggggtcggcgcgcacccagccggccgcgatcatcgcctcgtgaatgtcctcctcgtcgcccttgacggcgaggttgacggggtcgcccaggagcccgtcgggtgtgcgggtgcggccgatgaagtagtcggggacgtagagccaggtgaggacctggtggaggcgcggcagggcgaggtaggccaggaccgcccagaacagcagggagttgaccacgagcaccggatcgaggtgccagcccgagccgatgagcagccaggccagccagagcgtggcgacggcggcgatggcgaagaagacggcatcgaggacgtcgtcgatgctccaggagcgggcatcgacctccgacatcttggacgggccgtcccggtagacgggcggcgccgtcggacgggggcgagtcacctcggatggcttcatgacagcacgctaccgaatacctctgacgttggaggcaggccgtaccgccatcagccaccctcacacgctgcctcgcccctcggacctgtgggcacgggggacgcggcagtcggagaacagcatcggcgggattctcagggccgccgatgagacagtgctatgagatcacttgagcacgaggtcctgggtgtcggagtaggccgcgtactgcttgccggactgaatgccctctacctcttgacggtcgtagacgatgctggtggtgccctcggagaagggcttcagcgcgctcgactccgacactgcgatgaaggcgaaccagccctcaacgtgcccggagcccgcgtcctcggcgtcaatcccctcaagaccgtcgtctttcagatcgtcggccgcgtttgctccgtacggaaccgtgttgggcttggatgacgtcttgtcccggagtgtagtggactttgagagcgtggtgctgtagccgatgtctccattgaaatcgagtttgcagtgaagcaggtagacagtgtctgtcttacctttctgcttgagtttcggtgcggcgtagtcctcgaccaccttgtcacaggtctgggtgagaccgatctcctcgtccttgaaggtcaccggcttgatctcctgaatctcggagccggacttggtggtctcaccactcttgctcttggtgtccttggcatccttgccgtccttgtcgtccttggagtcctcggagggggatgcatccgagtcgcctgagtccggctcggcggagctggtcgcggagccgctaccgggggagggctgagcgatgtcctgctcatcgcaggcggacagtccgacagccatggcaagggccgcggcgacggagagaactttgacggaggagcgcatggggattcctttctcgcgcgctggggatggcgaaagtgtgcacccggcgcgagccctcttccatggggagcccacccaggggagcgctccccgtctccggccgccagtctctcagaagtcccagtcctcgtcctgggtggcctcggccgtacccatgacgtaggaggagcccgagccggagaagaagtcgtggttctcgtcggcgttgggggacagggaggcgaggatcgccgggttgacgtcaacggcgtcggccgggaacagcgcctcgtagcccaggttcatgagggccttgttggcgttgtagcgcaggaacttcttgacgtcctcggtcaggccgagctcgtcgtagaggtcctcggtgtactgctcctcgttgtcgtagagctccatgagcagctcgaaggtgtagtccttgagctcggcctggcgctcgggcgaggactctcgcacggcgagctggtacttgtagccgatgtagtagccgtggacggcctcgtcacgaatgatgaggcggatgaggtcggcggtgttggtcagcttggcgtggctggaccagtacatgggggcgtagaagccggagtagaagaggaaggattccagcatggtggaggcgaccttgcgcttctcggggtcgtcgccgcggtagtagtccaggatgatgcgggccttgcgctggaggttcgcgttctcctcgctccagcggaaggcctcgtcgatctccgccgtcgagatgagggtggagaagatcgaggagtaggagcgggcgtggaccgactccatgaaggcgatgttggtgagcaccgcctcctcgtggggggtgcgggcgtccgggatgagggagaccgcgccgaccgtgccctggatcgtgtccaggagggtcaggccggtgaagacgcgagtggtcatgttcttctcggcctcgttgagggtggcccaggactgcacgtcgttggacagcggcaccttctcgggcagccagaagttgccggtgaggcggtcccagacctcgaggtccttgtcgtcggtcaggcggttccagttgatggcctggacgcggtcgaccagcttgatgggctcgtgcatcagttcctcccgaggtttgggtgatccggcctcatgctaccgacgacgacgacgaccggcagtgtcgcccgaccgatcgggactgtggtgcccgccgcgccggggccatcaagattcaaaccacttgtatgatacgatggcgacatcagactgcaccacaaaaggagagcattttgaccgaccagagcgtagtcgtcattaccttcaccgagtcctccaaggcgtacgaagttctcagtgacctccgccaagcctccgcggaagggaggatcgacgtcgtctcagcactcatcgcggaacgcgaggaggacggacacctgcacctggcggagggatcggacgcgacgatcggcgagggcacggcaactgggggcctcatcggcctgattgtcggtctgctcggcggcccactcggcatgctcctgggatggggtgcaggttccgttatcggaagcctgagcgacatcgaccatgctgacaagcgtgagaccgtcctcggcgacctcagcgcccgcgtcgctcccggaacaacggccatcctcgcccaggtatctgaggtgacgcccgaggtgcttgacaacatctcaacgaagttgggtggaactgtggcccgccgccccgtctccgaggtgctggccgaactcgaggccgccgaagcagctgcagaagcagcggatcgcgaggcacgccgtaccattcgcgacaaacgccgcgaagagcgcaaagaagcatgggacaagcgagtcgctgatctcaaggagcacttcaagcgctgagcacaacactttaaagcgggctgcacgcatcgatgtctcgatgcgtgcagcccgtcgtcattggcactggtggggagaacggtcggcacgccccaaggatgcaagccctctcgcagataccttacgacgaagcgtccggctgctgggcggcgacaaggatgggcgcgcccttctcgggcgggtcaccctggccgaccacagcgccggacttcatgtcaaaggcgacgaccttgggttggaccttgctttccaccgaggtgctcagctccacccgctggagcacctgattgccgaggactgtggcaagaaccgcggcatctggctgaacatcctcatcctgccagtccttcgcccatttcttgaatacgagacggacctggtggctgcccttgtcttccgcctccaggctcaggaccgctccgtaccgcttgtctgtggggatggcttccagtgcacgtttgatcggcacggatgtgaggtccttacccttggcgtgggagatgaagcagtgagaccgtccgaccaggatactctgctcgaccctcagggagctgaggcacagcactggggaggtgggcggcaggatgaagtgatccgggagagtctcagcagtccggtactcgaaggacactctctcctcctcgatctggactcgctccatgccgggcgacaccgcctccaccgtggcggaggctgccttgtcagcttccttcatcggcaggtagcagaacacggaggtcttccccttgacccaggtgacaaccatcctcaccgcattggccccggtcaggttcagcaccttggcgtaggcgtcccgcacaactgttgctactgaccccttggacgggtcatccttgagccgcacattcacggtccaacgatccggctcagagaactccgggtgcacctccacccgcgcagatgccacagcgtcgagcccggagaggtactgatgcaccttccgtttccgcctcttgcgcgccatggccataggcgagcacccggccactgcgagagcaagggatgcggccgttacggccaggacctgacgacgtcgagcagtcatcgggcttcgctccgttgcctcaagagctcccgacacagtctcctgccacacggaaccatcagatgcattctcccctcacaactaagagccagactcccgtgctgccgccaaaatctccgcaccctcttcgggcggatatccggcatcgaagtcacctgcttccatctggaagcgcacgcctcttgtcccaccagaactctggctcctcacggtcgagacgtaaagcgactgaagcgcctgattccctgagacgatattaaggaccttagcggcagcagcaacatcgaggccgtccgacacagtcccaaatgcagagacatcgagcgttggcttctcatacacgtgatgatcgtccgtcaactcaacggtggcctcatcccgatatttcgaatcgacagcatccacaacctcacggagaggaacggaggtgaagtcaacagtgtctgtacgcaccttaatggacataccatcgagatcaaaactgtcatctacacccaccccagatcgtggcgccatgatgacatcagccgggaactccttgacgtcacctcgacgcaccgagatgtgactacctccaacatccatggacttcaaactgggcttcgcgagatcccgaagataatcgagcgtcgcttcattctcccctttctccgaaagagaccacgacacagagacgccattctgcttccacgacaccgacagcgagaagtatgtcttccctacggccccctcgacccgacgataggcgtctttgaggacggcgagagtctcttctcttccgggatcatcgttaagactgatcagcaccgtccaagaatcacctatctcgaaattggattttacctgcgcgttcactgacttgacggcatcgaaactcttcaaggactgcgtaatccgacggcgagcccgaatatttcccggagccagcgacccgcagcctgacatcgccagcagcgtcaacgagccgacacccgtcagaatcgtgcgtctcgggaggctccgtccgcccgccagccccatcacagcggtaccgattcactcgaacgcgacaggaagagcgcaatgaacaggaaccggatgatgctgcgtcgacgatgagccatggcgccaccgtaggacctcacccccggcgcgcgggatggggattgttccccgtagaccgggcacctccgacacagtcccatcacgcatggtctcgcggcggtgggatccgacctttctcaccgtatgcttcttcccgtgagtcagtcgcgcatcaaagtgatcttggacggcctgtacttcgacatgcggacgcaacggggcaagggcacggccttcgagcgcctggtgcgccagttccttcttacggacccgcgctatgccgagcgcttcgacgaggtgtggatgtggagcgactggccggagcggggtgcacgcccggaccgtggcatcgacctggtggcccgcgagcgcgagaccggcgagctgtgcgccgtccagtgcaagttctatgaccctgccacgggcgtcatcactaagggcgacgtcgactccttcctggcggagtcggggacgggagagttcacctcccgactgttcgtgtccacaacggagcactggaactccgctgcggaggagacggtgtctcgg

SEQ ID NO: 3742 - DNA, 23282 bp, synthetic construct
  misc_feature 1..23282: note = Synthetic
  source 1..23282: mol_type = other DNA
cgtcctggtcacctccctgggcgaggccctgctgccctacgcccgggacgccgtcctggccgccgaggccttcagcgaggccgcctccagccagggcgccgccctgagcggcacgatgcgcctgggcatcatccccaccatcgcgccctacctggcccccgttctcatcgacggcctgcgcgaggccctgccccagatggacctggacctgcgtgagatggtcaccggggacaacctcgaccagctcgcccaggggcgcctcgacgccgccatcatcgccctggaggacgacctccagcgcaccaccgcgatcccgatgttcgacgagcggctcgtcgtcctcaccgccgccggccacccctgggccggccgcacggacgtgagccccgccgagctcgacgaccagcccctcctcctgctcgacgagggcaactgcctgcgcgaccagaccctggccctgtgccagcgctacggctcccagcccccggtcgcggtggccaccaccctgtcgacggtgacccgcatggtcgcccacggctcgggcgtgacgatcatccccgagggggcgctccagctgctgaccccctcctcggagtacggcatcgcccgcttcggcgacgagtcgccgatgcgccgcatgggcctggtgcaccgggtctcctcctcccgtggcgccgacttcgcccagctggccgagctcatctcgcacctggtgaaagaggccgacctgcccgtggcgcccgtcacggcctcggctgcggcctgagccctcctccggggccgctcttgcccgccggtccccgccgggccgtgacctgggccgcccaggcgactagcctgcccctatgacgggcggcaccgacggcggcacccgggcgacgacgcgcaccgggcggccgctggcctgcgtcgtcgtcaacccctccaagccgcgcgccaccgccgcggtgcgctccctgctggagggcgagctgcgcgaggccggctatgccgagcccgtgtggttggagacgagcgtctccgagcccggcacgatgcaggcgcgcctggccctggcggccggggcgagcctggtggtggccgccggcggtgacggaacggtgcgctcggtggcggccggcctggccggcaccggcgcccagatgggcatcgtcccgctgggcacggcgaacctggcggcccgcaacctcggggtgccggtcggcgacgcccgggccgcggcccgagtggtggcccacggcatcgaccttcccgccgacctggcctgggtacgcaccgagccctggtctgaccccggcgccctccccgacccgacgccgccaggcgatccccgcgggcgggccgactccgcaccctccacacccctgacgggccgagccacaacagcctcgccggactctccgcccgcagcggccgacccggccgaatcccagcagccgtcggctgaggcggcccgggccgtgcacaccatccagagggcgacccgccggccgcatcagtggacccggcccacactcggcgacgagcacgcctgcatggtggtggccgggatcggtttcgacgccggactggtggcctccacgcgcccggccctcaaggctcgggtcggctggggcgcctacgcgctggcagccatggagaacctgggctcgccgcgcatggacctggtgctcagcctcctggacgaggccggtgcgcggcgcgtggagcgcctgcgggcccgcaacctgctggtggccaacggtggccggctcccagccgggatcaccctgctgccgcaggcccgcaccgatgacggcctgctcgacgtcgccgccatcgacacggtggcgggcctggcgggctggagctcgctggcgcgccaggtgctgccgccctacgcggcgcactactccgagtccggccgctcgctggggcgggtggtgctgcggcgcggcggggaggtggccgtccagctctcggcaccggccctggtggaggtcgacggcgacctgctggcgcccacgcagagcatgcgagtgcgcatcgaccccggggcgctgctcatccgccgcccggcggcctgaacccgcctcactcctcccagaagtcggcgacgtcgatcgccccgccagtggcctcgaagtcggcgcgcacggcccggcgcagctcggcgtcgtgcagccagtccagggcgacggcggccagcccgtaggcgccgtcgagcgcggccacgtccccggtgggggcgcccgcggcctcggtcatggcgggggtgtggagggcgacgtcgggccggtcggtgaccttgatgagcgggtggatgccggggatgcgctgggacacgttgccgaagtcggtgccggcggcgatggtctcgggcaggacccccgcggccaggggatcgcggccgcgctcgcgctgggagcgcacccaggaggtcagcagggggccgttgtcgcggacgggaacctcgttgcagtactcggaggtgaggatctcaacgcccgtgccggtcatgagggcggcgccgtggaggacctcctcgacccgctcggcgatctccttgagggtctcgaggtacttcgagcgcaccatgatggacagctcggtgcgctcggggatgatgttggggacctggccgccgtcggtgatgatggcgtggaggcggtccatggggagcatctgctggcgcagcaggccgatgccggtcagggccagagtggcggcgtccagggcgttgcggcccatgaagggctgggaggcggcgtgggccggcacgccgtggaagatgacgcgcaggcggcgcacgcccagccaggtctggtgggtgacgtcgtgggcgtaggagtgggtctggatggcggcgtcgacgccgtcgagcatgccgcgcacggccaggatctccttggcggtcgagttctcctcggcgggcgtggtctgcaggacgacgcggccgggcagggagcctgggcgggtgcgggccagggcggccagggcgaggaaggcacccacggagttggcgcacatgacgttgtgtccgcagccgtggccgatgccgggcagcgcgtcgtactcggcgaggatggcgatggtgccggccgactcaccggagcctccggccgccgcgtccgcgccgccgcctccggggatctcggcgcgcagggcggtgtccatgccgtagacgccgacctcgggctcaatgccgtggcggcgcaggagctcggcgaccgtggccacggcgtggtgctcctcgtagccggtctcggggtggtcgtggatgtcgtgggagagctcgacgatctgcggggccagctcggcgacggcctgccccagggcggcgcgcagggcggtgggggctccggcgtcgtcgggcagggccggtgccgggccgacgacgccgcggcgctcctcggtctcggcgagcatgcgctcctggatggcgccggaggggacggtggggcgggtcaggtcgttcaggtcgcgcatggccctatcttggcccagccggcctccccacgctcagtcgcgaggtgcggcgagccgacgtgccgcgtcgacgacgacggcgcgctgacgttcgtgcgcctcctcatcctcgaggggcccgcacagcatccgggccacctgaggcacggtggaccaccagccggtcagcgacatgagcatgaccatgagcgcccccgggtcgacgtcccgggtcaggacgccggagtcctggccactgcgcaccccggcgatcttgcgctgatagtgctcgcgccgcagctcctcctcgggcacctcgtcgtcgaaggtgagggcctcccagcacagcagccggatgagctcggggcgctgccggtggtagtcgtagaggcgcccggcgtagtcccccacatcctcgccgtcgtcgaaggcgggcggaacagcctcggcagccctggtcagctcgtcgcgcaggactgcggagaacaagcggtccttagagccgaagtagttgtagacgcgctccttgttgaccccggcccgcttggcgacccgctcgacggtggtcccagcaggcccacggagagtgaactcggcggtggcggcgtccttgatcttgcgcttggtcccctcagtgtcccaggccatgacactccgtctcccgtgtccgcgagcgccggcggcaaactccaacgctaccgttgcaactactcctccagtctactagggtcatttccaacgtttacgttggaaaggggttctcatgtctcccgtgcaccggcccgatcaacatcccgacgtcacccactcccccgagtcctcgacccggtcgacgactcgttcgacctctcccgcctaccccgccggcagcggcgcgaccgccgccctcgtggtcaccgcgctactcgtcctcacccagctgtacgccgccatccccctgctcgccccaatctcgaccgacctccatggcaatgccactgtcgccctgtcgacggccttcagcctcacttacgccgcaggcttcctcatctgggggccggtctccgaccactacggcaggaggaggaccatggcgctcgcgctggggaccctcaccgtctccaccgtctgctgcgccctggctccgtccctcccagccctcgcggccctgcgcgcgatccagggcctgagcgcttccggtttcgcacccgtggccctggcctacctgtccgaggcgctggcaccaccgaggcgggccggggcgatcggggcgatgtcgacgtcgttcctcgtggcaggcatctttggccaggtgctggcctcgctggtcgcgctgcacctggggtggcggtggttcttccctctgtgcggcggactgctagccgtggccctggcggtcgttctcgccgccgtgcacgacgccacctccagcccttcgggctcctcgcttcgggggcagttcgcatcgctgggccggctcgcagtcaggccggcggttctggcgctcagcctggcgcacgtcacgctgctcatggtgttcgtcgccatgtacacggggatcggcggccatctggagtcgctgggcatgcggccgtcgacgatcattctcgttcgcctgatggccctgccggccatgttcctcagcctcgtggcgggccggctcgcggccaggtggtcctgggcgcagatagcccggctgggcttcggggtgtcggcattgggcatgctcggtgaggcactgctggcgcagagcctggtgggcctggtggccggcagcatcgtgtacgtcgccggggtagcgctggctgcgccggcaatgattagcctctatggactggtctccgcacccaaccgcggcagtggcatggcgctcaacgggttcatcctgttcgtcggcacgagcgccggcccgctcctggcgacgtcgtcgcccaccttccggacgctggctctcatcctggccggcatcctggccgtggcactggtcgcgatcaccggtttcaaggcactggccaacgccgaccactgactgccacccgcaccacacggcgggagcggccgtccccatcgaggacgtacttttgcaacgaggactgcgttctcccccatatgactgcggggagatcccagtggcctggaggaaaacgcagtcctcgaccggaaagtacgtcccgggcgcggaccgcagccacccctgcggcccgccggcccgcctcaccccgtcctcagctgaagagcgaggcggccaccatggtgtcgccctccttgatgcccggggggatcgcgaacagcgccgaggcctcgtgcttgaggtactcctggagggcgtcactcttggtcatgcggtccaggatcgggtagaagttcgtgcgcgggtcacgcacgaaggcgatgaagaacaggccggtctgcagctgccccagggagtcggagccgtcggtgtagttgtagccgcggcgcagcatccggcgcccctggttctgctccggtgagacgacggcgatgtgcgcgtcggccggcacgagcgtctcgcccttgtcgtccttggccttgtagtccacggctgtgaactcctcggaggccttcgaggggttggcgatgctcagcggcgccccgtagcgcttgtcgcgccccatggtctgttcctgctcgatgagccgcagccggtcccagatctcggcgagcatgcggatgcgccgggccacgtagtaggtgccgcccgtcatccactcggctgcggcgtcgtcgcccttctggacccacaggtgcttgttgagctggtcggaggagtcctcggccttgatgttgttggtgccgtccttgaagccgaagaggttgcgcggcgtctcctggtccacggaggtcgacgacgtgcgcccgtagccgacctggctccaccgcagtgtggcggtcccgaaggcgatgcgggtgaggttgcggatcgcgtggacgcacacctgggcgtcgttggagcaggcctggatgagcaggtcgccgtcggactgggcggcgtggagctggtcaccggcgaaggagggcatgccctccttgaggacggcgggcatcttggcggccaggccgaagcggtccttgccgtcggcgtcgacgaacaggcccttacccacaccgaaggtgatggtcaggccgttgggcttgtagccccaggcctcgccggtgtccttgggcggcagctgcttgttggagctgggctggccgccgatgagctcaccggcggtcatctgctcggcggccacggcccattcggacaagagggttttcaggtcctcgacgtcggtggtggagacgtcgaaggccgcggtgaacatgttgtcctgggcgggggtggtgatccccgcctggtggtcaccccggaaggggtaggtcgtgaggatggcctcctcggggcggcgggaggcctcccaggcgcggccgccggccacaccggccaggcccgcgagcgcggcgcccaggcccgcaccggtgaacatggcacggcggctggtgcccttggcactgggcttccaggcctgtccgggcgtccccgtcgcatccggcttctccggctggtcagccgcgtcggatgcgctcacctcatcgggctgctccgccgcgtcgggggccgaggagctgctacccgggccctccgacgtcggggcctgcgactcctgctgcgcctgcgcggtctcgtcctggggctcatccagggtctcgtcctgagccgcgtcgtcggcgaccggggaggtgtccgactcgtgggccggcttgccactcactgctgtctccttccggggtgtccgggttgctctggcgtcgcggactcagaggatggttccggcgaccttggacagcgactcgctcagggcgttgacggcgtcggagaacttgcgctgggtgtcggtgtaggcgttcttgtcgggggtctcgccggcgtccttctggaccgcggcgatggtggagtagtccacgtaggtgggctggccgttggaggcctttccggagacctgggcctcgacgagcttctcaaccgccgcgaactgggtggtgatcttctcggcgagcttggcgtccttcttcttcacgagctcctcgacgttgccgtaggcgaccttggcaccttcgacattggcctggaagtcgtagaggtcggtgtgggagaaggtctcctcctcgccgacgatcttggagctggcgacctcctcgaggaggccggaggcgccgttggcgacgtcctcgagctcgagctcgaacttcttcccgccggcgccggtgatgttcccgtagacgaggtcgtagagcgacttggtgtcggcgttgagctggtcggcgaccttcttgcgggcggcgtcgtcggcgaacttgaagggactggaggagtcctgggcccacaggtcggcctcgatgcggtgccatccggtccatccggcgaggacgtccttgtccgtgacggccttgcctgcgccggaggcgaggtcctggacgcgggtgtccagggcggcgtcgaggtcgccggcctccttgaggccgaaggactcggcggtgggctcgatgcgctcgtagaactggcgcgccagcgggtagaggctcttggcggtggcggtgtcgccggaggtgtaggcggtgacgaagccctgggtggcggtgaggagctggccggtctggtcgcgcacgtaggcggtgtagttggtgacggcggcctcgcgcgccttggtctcgtcggcgctgatgtcgacggcggcgcccttggtgatcttcagctcggtgacgcccttgagctcgccgaccatgttgggcttgcaggcggcgtagtaggtgccctccttgagggaggtggtgagcttcgtggtggtgccggggccgatgttctcctgctcggagacgatctggagcttgtcctcggtgaggatctccagctcgttgggggccgagccggagttggtgatggtgaaagtgaccacgcccgaggggaaggaggtggaggagagcttgcaggcgtcgtcggtgagggtcaccgtgatctcctgggacgccccggagccggaggcgccgcccttggcgttcttggggttgtcggcgcaggcggccaggcccaggcccatggcggtcagggggagcagggtgaggacgttgcgtcgcttgatggtgggcatggtctttcctttatgaggagtggtgtggacaggggtggggagagtggtcgggggtggtcaggaggtcgcgacggcgtcggcgggctcgtcagcgctcacggcggccggggcggcctcgactgcgcgcgcgggcgagggccatcgacccgtgatctggagggtgaggagcaccagggtcgggacgatgtagacccaccagcccacgacctgcaggacagtgggctggaggttgagctggaacatggcctggagcagcacgtagagccagtggaagggcgaggcgccgtcgggcaggtacagggacaggtcccaggcgtggttcgtgtagccgggaagaacattggcctcctgcaggtcaccgacgccgtaggcgacgatgccggcggcgacgacgacgaggaagtagccggtcacggcgaagaaaacacgcaggttgatgcgcaccgcgccctggtagatgaggacacccagaacgatggccaggacgaggccggtgatgacgcccgccgtcgtctgcatggtggagctctcgatgctggagcgcacggtggcccacacgaacagggcggtctccactccctcgcgcccgacggcgacgacggcgatccagacgacgccccagccggagctgcctgcggacagggacttggacagcgatccctccagctcgcccttgagctcacgggcgttcttccccatccagaagatcatccaggtcaccatgccgacggcgacgaaggacagggtgccgccgaggatctcctgggcctggaaggtgagggtcttggggccccaggtcatgatggcgccggcgaccagcgggatcagcgccgccaggccgaccccgagccacagcttgggcagggcatcgcggcggtcggccttgacgaggtaggcgacgatgatgctgacaacgagcgccgcctccaggccctccctcagggcgatgagcaggttggcgagaaacactcgacctccaagtcacgaatcaatctcaagttacgacggtcgaggtaagcctaaccttaggcgctctcgtcaccaaagaggctcatttttcgcattcgtgtgggatgaagcccagtttcgccggtcacaccggtccgtaccgccccgtcaacgtggggcagcccggggcgttggcgcggtcgacggttgcggccgaccagcactggatccttgccccccacacgcttccgccgcctccagcgcgctcacgccgaaaccctcttaggaccaggatcccgccatgatggtgctatactggccacgactgaattcctagtaagcttcgccatgtttgcggagtggactgctccaccggctcgcccaccggcaagccggtctgattgcccggtctcatgctgaggccgggcagttttcttacgccagcctcataatgaggctgcgtgtggtatgcatctctcatgtctgctcaccgccttcgcgtggggatcgacgtcggcacccattctgtcgggctcgcaacgctgcgggttgacgaccagggggcccccatcgagctcctttcagcgctgtcacacattcacgactccgggatcggcaaggaaggacaaaaggatcacgacacccgtaagaagctctccggtgttgctcgacgcacccgacacctgctgcgtaatcgacgcaagcggctccagcagctcgacaaggtgctgctcggcctgggcttcccgatccccaagccagaagagttcctcgacccgagcgagcaaaccgacccgtaccaggtatggagggtgcgcgctcggctggtcgaggagacgctgcccgaggagctgcgcggcccagccatctccatggcggttcgccacattgcgcggcaccgggggtggcgcaacccgtactcgaaggttgaatcgctgttgtcacccgcagaggaatccccgttcatgaaggcgctgcgcaagcgcatcatgacgaaaacaggcgaggtcctcgacgatgacatcacccccgggcaggcgatggcccaggtggcactgacccacaagatctacatgcgtggcccggagggcattctcggcaagctgcaccagagcgacaacgccaatgagatccggaagatctgcgcccgccagggcatctcttccgatgtctgcaagcagctgctgcgagccgtcttcgaggcggagtctccacgcggctcagccgtctcccgcgtggctcccgacccgcttcccggtcagggctccttccgacgcgccccgaagtgcgatccggagttccagcggttccggatcatctccatcgtggctaacctccgcatcagcgaaaccaagggagagaatcgaccactgacagtggacgagcgccgcgaggtggttgccttcctcatggaggactcgcaagccgacctgacctgggttgacgtggccgagaaactaggcgtgcatcgcagaaacctacgaggaaccgctgtcctcacagacgacggcgagcgatctgcggcaaggccgcccttcgacgccaccgaccgcatcatgcgccagaccaagatccgatcgttgaagacctggtgggagaaggccaacagcgagcagcggggcgccatgattcgttacctctacgaagaccttaccgacccggagtgcgccgaggtcattgctgagctgccggaggaggaccaggccaagctcgattccctccaccttccagccggccgtgcggcgtactcacaggagtcattgacggcgctcagtgaccacatgctgacgacaactgacgatctgcatgaggcacgtaagcggctcttcggtgtcgatgactcatggacccctccagctgaagccataaacgccccggttggtaatccgtccgtcgaccggactctcaagatcgtcggacggtacctcgctgcggtcgagagtatgtggggtacgcctgacctcattcatgttgagcatgttcgcgatggcttcaccagcgaacgcatggcagaagagcgagacaaggcggacagacgtcgctacgacgataaccagaaagcgatacagaaaattcgacaggactatggtaaggagggatacataagccgaggtgacatcgtgcgtcacgatgcattagagttgcaaggaagtgcctgcttgtactgcgggacgacaatcgatctccacacatgccagctggaccacatcgttccacaggccggcccaggttcgaacaatcgccgcgggaacctcgtggcagtatgcgagcgctgcaaccgttcaaagtcgaacactccgttcgcagtgtgggcacagacctgcgggatccctgacgtcggcgtgaaggaagctattggtcgagtgcgaggctggcgcaaacagactcctaacacatcatccgaagacctgacacgccttaagaaggaggtcatcgctcgtcttcggcgcacccaggaggatccggagatcgatgagcgcagcatggagtccgtggcttggatggccaacgaactgcaccatcgcattgcggccgcctatcccgagaccactgtcatggtctaccgaggctctatcaccgcagcagctcgcaaggcggccggcatcgactcccgtatcaacctgatcggtgagaaggggcgcaaggatcgccttgaccgccgacaccacgccgtggacgcgagtgttgtagcactcatggagccaagcgttgccaagaccttggcagaacgatcaagtcttcgcggggaacagcgactcactggcaaggagcagacctggaagcagtacacgggctcgaccgtgggggcgcgagagcacttcgagatgtggcggggccacatgcttcatctcaccgagctgttcaacgagcgcctggcagaagataaagtgtacgtcacccaaaacattcgccttcgactatctgacggcaacgcacatactgttaatccgtcaaaattagtctcccaccgcctcggcgacggattgacagtgcagcagatcgaccgcgcctgcactcccgcactgtggtgcgcactcactcgggagaaggacttcgacggcaagaacggacttcccgccagggaggatcgcttgatcagagttcacgggcaagagttgacgtccaacgaccacattaaactgttctccaagaagcgtggcaacgacaccaaggagaagcctttcggggctatcaccgtgcgcggcggattcgttgaaatcgggccatcaattcatcacgcccgcatctaccgtatcgagggcaagaagcccgtctacgcgatgctccgcgtcttcactcatgacctgctcagtcagcggcacggggatctcttctctgcggtcatcccaccccagtcgatcagcatgaggtgcgctgagccgaagcttcgtaaggccatcaccacaggcaatgccacctatctgggatgggtcgtggtgggtgacgaactggagatcaacgttgactccttcacctccgggcagatcgcgagtttcttagaggagtaccccagaacaacgaggtggcggatcagaggatttttcaacgaaacccagatccgattgcgacccgcatacctcgcatcggaggggcttattgagcccagcgaagccgtccgtaagacactgtccatccccggatggcttccaacaatcaataaggtcgccgaaactcaccctcgtgtgatccggcgggatgcgctcggtcgcgtgcggaagtccagcagatcggggcttcccacgtcctggatcatcaagtgaggatccctggtggatacagcctggcgcatcattgactgttcgtcgctggaggggcgcatcacctcggatcgcggagcgatctgcgtccaccaggacgacggaggtgagcatcggatcccgacggccgatgttgcggtcatcctcatgggtcctcacgtgagcttctcgacggctgtcgtgcaccgcctgttaggtgctgacgtcgtcgtgctgttctgtgactggcggggcgttccagagggtgccgcctatccgtggcatgagcatggtcgcgttggcgccaggcagctggcgcagtcgcagctctccgagccgcggaggaaaaatgcgtgggggcgtctggtgagggctaaggtgctggggcaggcgactgttctgcttcagaaggatcgtcctgcggcagcccggctcaaggagatggcacgttcagtgcgctcgggcgacccagagaacgtcgaggcacatgccgctcgcttgtactggtcccgtttgttcgcctccgagggtgattttctccggcgcccggaggcggaggatcaccgcaacagctgcttgaactacggctatgcagtcctgcgcgctcatgggatccgagcggtggtgagcgccgggctcagcccgacgctcgggctgttccatcacggacgcggcaatatgttcaacctggtggatgacatcatcgaacccttccgtcctgcggtggatgatgctgtgctgcatctggatcttgatgcgagtcccgccgagcggcaggtgaagcaggttctggttgctgcagtgcaacagccgttccgtgacgacggcgctacgctcccaaccgtcttggaggagctggctcagcacttgggtcagtactgtgagggggaccgggcccgcttggatgtcccatcttggaccggacctaggcgtgagacctgatggcggacgatccagtgtggtgcgtggtcatgttcgatctgccggtggcgacgaaggagcaacgcaaggaggcgactcgtttccggcaccttctcctggatgagggtttctggatgctccagtacagcgtctacgtccgttactccccaaccgtggccggcgagcctcgcagggtgggctcgatcaagagtagcctgccgcgcggaggtgaggtcaggatgctgtatgtcaccgaccgtgagtggtcgcgcacgctctgtttccgcaacgaagagcccgttgagcctgagtcagagccccaacagctcatgatcttctgacctctgacgaggtgtttacgctggtcagacccccttgacagacgtttctgaagtctatcaaggggtctggtgactgaatcccagcgcggtggtgagttccttgttgtagtagcgaagtctatcaaggggtctggtgactgaatcccagccgcagcgtggtgcggacgggtcgtttctgaagtctatcaaggggtctggtgactgaatcccagctgcagatcatcaccgctggttcggacgagaagtctatcaaggggtctggtgactgaatcccagcatcgggccatgcgcttcatggaggccgcgaagtctatcaaggggtctggtgactgaatcccagctgcgccgcgacctccagcgcgagatggcgaagtctatcaaggggtctggtgactgaatcccagcgtcttcttcgccgtcttcccgtggtggggaagtctatcaaggggtctggtgactgaatcccagcgggagagggcgcggttgctcatggcctcgaagtctatcaaggggtctggtgactgaatcccagccgtgtaccgccacatgtctgggtggtcggaagtctatcaaggggtctggtgactgaatcccagctgctggcttccatctgttcccggtgctcgaagtctatcaaggggtctggtgactgaatcccagcatcacccgagcaggaagcgagacacgtagaagtctatcaaggggtctggtgactgaatcccagcacctggtcggcaccgagcggggtaccccgaagtctatcaaggggtctggtgactgaatcccagcctctgcgaggatctcctgctccgcaccggaagtctatcaaggggtctggtgactgaatcccagctggatgcgggcgcgctgctcatcgctcagaagtctatcaaggggtctggtgactgaatcccagcacctggaagccgtccacggtgctgacgtgaagtctatcaaggggtctggtgactgaatcccagcgggtgcgcgacctgctagtcgatggttgagaagtctatcaaggggtctggtgactgaatcccagcgcggcgccggaggggttggtagcgcccggaagtctatcaaggggtctggtgactgaatcccagcgaggtactgaccgccggcttccaggactgaagtctatcaaggggtctggtgactgaatcccagccgcatcgctacgcccttggacacctcgagaagtctatcaaggggtctggtgactgaatcccagcacaagagacctgaccgagctcacgggaagaagtctatcaaggggtctggtgactgaatcccagcggcgaggtgacatgtgctcagggcggcgggggctccagcgtcgtcgggcagggccggtgcccggccgacgacgccgcggcgctcctcggtctggcgagtatgcgctcctggatggcgccagaggggacggtgggggtgggtcaggtcgttcaggtggcgcaagaggccatcgtggcccagccacccgcgctgcgggagccaccaccccatcgaggacttactttcagtaccaggactgcgttctcccccagaagacggcgagaatatcccagtagcctggaggacaacgcagtcctcgatcggaaaacacgtcctcgacggcgacgtaggcgaagacaacacgacggggcggcgcgccggcagagaagaaactccgcctgcgcaccgccccgtgagtcaagccgctcgtgcagcctcagctcgtcgagtcctcgctctccgaggtgcccgcagcagcacctgggttcccgacggcgtcgccaccaccgacggcgtcaccggtccgccccgcggtcacggagccgccaccggttgctccggcgccgacctccacctcggcccagccacccgcgctgcgggagccaccgccccatcgaggacttacttttggcaccaggactgcgctctcccccagatgactgcggggagatcccagtagcctggaggacaacgcagtcctcgatcggaaagtacgtcctcggagcaaaccgcagccgccactccggcccagtccggcccgcgggcccgccctcggctcagccggcttgcggcaggaggatggaggcgcccagggcgaaggggtagccgggtttgagaatgcactggacgaccggctgcgccatctccaggacgctgtcggcgtcgagcccctcctcgccgttggggccggcctcggccacgaggtcggagtaggggatggtgaggtcgagcagtgccatgccgtcccgatgggtggcggagtcccaggcgccgccctccatctcctgcagagtccccaggtggaagctcatgacgccgtggtcgtcgacctgcgcgggcacggacaggatgtggtgcggctcggggtcgcgcggcgcacgcagggtgaacacgatgatgccgccgtcgcgggcggcgcgcagcatgacgcggccgatgtggatgccgaagccaacgatatcgaagaccccctccatggcctccgcatagctcagcggcgcctccaggggaatgggggctccctcaccgggatcgttgatggcgcggcggcccgacggcgtggccgccttgagcagcaggaggcgaccagagtcggtcaggacgccggtctcgacacgctcctgccacccggcaggggcctgggcagggccgggctcggactccaccagccccatgcccaggacggtggacaggtcggtgccgtcggcgggccggtgccaggtgatggtggcgtcgtcgtgccagatgggcaggaccccgttgaaggggatgccgaagcgcacgtgctcgcgctcgccgtcgacgggccgggagttatcgacatgactgacgtggctggtgtgccggccggaccgactctccgaccctgcgccgccggcaccattgtcctgcggtcctgccaggtactcgctcatgagcccagcctaactgccgctcggtcgccccgtgcgctcgcgcggccggcaagccgctcctccttgcgggcgtgctcccactcgtggacctgccgggccgagagcgccagcagggccaggacctggagcgcgctggtaacgaccaggccaagagtcgcctgccggaccccgaggctggagacctgaaccatgtcagtggcgatacccaggaccagggtcgccataagggcgatgcggccacgcgggtgcccgtgccaggccgcaacccccagggcggcggtgatgagcgtcaggccgccagacaccgtggcgatgagggcgacgacggcggtgaccgcccccgggtcctcctccgggaacggggcggcctccagcacctgggtgatgtcgatgcgggccacccgcaggatctcgactgccaccatgagcccgatgagtgccagggcgatgacgagctggctggggcggcggcgtcgggcctggaggtcggccaggcgggcctgctgcagggagagcccggcgtcggatccggggaccacctcgttgaggtcgagcacgtggagggcgccgtcggtgaccacccggtcccctcccccgttcttgtcgtggtaggaggtgaagacgtccggccagatctcgagctcggcggcctcattggcccagcggacgtcgtcgacgacgtagttgcgctcgatgtcgatgtcggcgtcgatcttgtgggtgacctggagggtgagggcgctcaggccgacggcgcggtcgtaggtggcggcggccagccagtccacgtgcccgccgccgggtagcgaccagccgggcgggcagtaccagaagcggatgtggtggcgctgggcggggttgccctcggcctccttctggtaggcgaagctctgcttgcgcccgaagagcatgaggttggagacgggggcggccggataggagcggcgcagcagcgaggagacgatgatcctccaggaggtgcgcagggtgatggggtcggcgcgcacccagccggccgcgatcatcgcctcgtgaatatcctcctcgtcgcccttgacggcgaggttgacggggtcgcccaggagcccatcgggtgtgcgggtgcggccgatgaagtagtcggggacgtagagccaggtgaggacctggtggaggcgcggcagggcgaggtaggccaggaccgcccagaacagcagggagttgaccacgagcaccggatcgaggtgccagcccgagccgatgagcagccaggccagccagagcgtggcgacggcggcgatggcgaagaagacggcatcgaggacgtcgtcgatgctccaggagcgggcatcgacctccgacatcttggacgggccgtcccggtagacgggcggcgccgtcggacgggggcgagtcacctcggatggcgtcatgacagcacgctaccgaatacctctgacgttggaggccggccgcaccgccgcaagccaccccctcacgcgctgccgcgcccctcggacctgtgggcacgggggacgcggcagtcggagaacagcatcggcgggattctcagggccgccgatgagacagtgctatgagatcacttgagcacgaggtcctgggtgtcggagtaggccgcgtactgcttgccggtctccctgtgctctgcctcctcgcggttgtaggcgatgctggtggtgccctcggagaagggcttcaacttggtcgactccgtcacggcaacgaaggcgaaccagccctcaacgtgcccggagcccgcgtcctcggtgtcgatcacatcaagaccgtccgccctcaggtcgtcggccacctttgctccgtacggaaccgtcttgggcttggatgacgttttgtcctggagtgaggtggagtttgagagcgtgctgctgtatccgacgtctccattgaaatcgagcgtgcagtgaagcaggtagacggtatctgtcttagctttctccttgtacttcggtgcggcgtagtcctcgaccaccttgtcgcaggtctgggtcagaccgatttcctggtccttgaaggtcaccggcttgatctcctgaatctcggagccggacttggtggtctcaccactcttgctcttggtgtccttggcatccttgtcgcccttgtcatccttggagtcctcggagggggatgcatccgagtcgtccgagtccgccttggcggaggccgtcgaggaggctccgggtgagggctgagagacctcctcctcatcgcaagcggacagtccgacagccatggcaagggcggcggcgacggagagaactttgacagaggagcgcatggggattcctttctggcgcgctgggaatagccaaagtttgcaccagacacgagccccctgccatggggaggccacccaggggagcgctccccgtctccgccctctccctgcgctcagaagtcccagtcctcgtcctgggtggcctcggccgtgcccatgacgtaggaggagcccgagccggagaagaagtcgtggttctcgtcggcgttgggggacagggaggcgaggatcgccgggttgacgtcgacggcgtcggccgggaacagcgcctcgtagcccaggttcatgagggccttgttggcgttgtagcgcaggaacttcttgacatcctcggtcaggccgagctcatcgtagaggtcctcggtgtactgctcctcgttgtcatagagctccatgagcagctcgaaggtgtagtccttgagctcggcctggcgctcgggcgaggactcacgcacggcgagctggtacttgtagccgatgtagtagccgtggacggcctcgtcgcggatgatgaggcggatgaggtcggcggtgttggtcagcttggcgtggctggaccagtacatgggggcgtagaagccggagtagaagaggaaggactccagcatggtggaggcgaccttgcgcttctcggggtcgtcgccgcggtagtagtccaggatgatgtgggccttgcgctggaggttcgcgttctcctcgctccagcggaaggcctcgtcgatctccgccgtcgagatgagggtggagaagatcgaggagtaggagcgggcgtggaccgactccatgaaggcgatgttggtgagcaccgcctcctcgtggggggtgcgggcgtccgggatgagggagaccgcgccgaccgtgccctggatcgtgtccagcagcgtcaggccggtgaagacgcgggtggtcatgttcttctcggcctcgttgagggtggcccaggactgcacgtcattggacagcggcaccttctcgggcagccagaagttgccggtgaggcggtcccagacctcgaggtccttgtcgtcggtcaggcggttccagttgatggcctggacgcggtcgaccagcttgatgggctcgtgcatcagttcctcccggggtttgggtgatccggcctcatgctaccgatgagaccgccggccggcagtgacgcccgcccgaagagggctgtggtgcccgccgcgccggggccatcaagattcaaaccacttgtatgatacgaaggcgacatcagactgcaccacaaaaggagagcattatgaccgaccagagcgtagtcgtcattaccttcaccgagtcctccaaggcgtacgaagttctcagtgacctccgccaagcctccgcggaagggaggatcgacgtcgtctcagcactcatcgcggaacgcgaggaggacggacacctgcacctggcggagggatcggacgcgacgatcggcgagggcacggcaactgggggcctcatcggcctgattgtcggtctgctcggcggcccactcggcatgctcctgggatggggtgcaggttccgttatcggaagcctgagcgacatcgaccatgctgacaagcgtgagaccgtcctcggcgacctcagcgcccgcgtcgctcccggaacaacggccatcctcgcccaggtatctgaggtgacgcccgaggtgcttgacaacatctcaacgaagttgggtggaactgtggcccgccgccccgtctccgaggtgctggccgaactcgaggccgccgaagcagctgcagaagcagcggatcgcgaggcacgccgtaccattcgcgacaaacgccgcgaagagcgcaaagaagcatgggacaagcgagtcgctgatctcaaggagcacttcaagcgctgagcacaacactttaaagcgggctgcacgcatcgatgtctcgatgcgtgcagcccgtcgtcattggcactggtggggagaacggtcggcacgccccaaggatgcaagccctctcgcagataccttacgacgaagcgtccggctgctgagcggcggcaaggatgggcgcccccttctcaggcgggtcaccctgaccggccacggcaccgccgttcatgtcgaaggcgacgacctcagagtcgtagtcgtcgttcggcgcggtggccagctcaaccctctgaagagtccgatttcccaggacggccgccagaaccggcgctgcggcgtcaacctccacaccctttccgtactcaccgagtccccacactctcaactgggtcacctggttgatatcatcatgcgcatccaggtccaccgtcgcatcgactcgcttatctgccgggatggcatcaaggacgctcttgatcggcacggaggtgaggtcaacgcctttggagtgagtgacgtgacaataggatgagcccacatgaatactctgctcggtcttgagcgaacccacaccgacaaccggagatgttagcggaagaaggaagttatccggaagggttttcacgccttggtagcgtagccggatttcattccaggagatctccacgctctccacctccgaggagaccaccttcatggcagccggcacggccctctcggagtcatccatcggcagatgacaggacatcgacgtcgcgccctgggtccatgtgacgtcaagttccaccttgtcggagtcagccagattcactacttcgtttcgagcattgcgaatgatggcgaggactgaatcctgtccgggatcacccttgaggttgacgatcacatcccagcgatcatcggtcacgagccccggatccacatcaacctcaacggacgtgacaccatcaagaccggacaaatacttgcgcaccttcctcttcttcttactgagagccagagcgaaaggtgagcacccgcccactccgaaagcaagagacactgcacccagtgccagcacctcacgacgtcgaatactcatcaacctcactccccttcccttcatcatgcttgcatgtgcacgtcaggcagagacgctttggagtccgctccccatcaggacgcagaggcaaccacctgttgggcggcggcaaggatgggcacccccttctcaggcggatctccctgaccgaccacagtgccggacttcatgtcaaaggcgacgaccctcggctggaccttgctttccaccgaggtaagcagctccaccctctggagtacctggtttccgagtactgtggcgagaaccgcagcgtcgggctgaacatcctcatcctgccagtccttcacccatttcttgaatatgagacgggcctggtgattgttgtaatcctccgcctccaggctcaggaccgctccgtaccgcttgtcggtggggatggcttccagtgcacgcttgatcggcacggatgtgaggtccttgcccttggcgtgggagatgaagcagtgagaccgtccaatgagaatgctctgctcgactctcaaggaggcgaggctcagcaccggggaagtgggcggcaggatgaaatgatccgggagggtttcagtggtgcggtactcgaaggatattctctcctcctcgatctggactcgctccatg

SEQ ID NO: 3743 - DNA, 23264 bp, synthetic construct
  misc_feature 1..23264: note = Synthetic
  source 1..23264: mol_type = other DNA
ggttctcctccggtggggcaggtggcctggccgccaccctggaccgtgcgacgcctgttctccctcggcgagggcgggcgttggcgggcgggaggcggtgggatttaagggttataccgccctgtgacgccccggcgacagctcctcctcgtgtccccgcacacaataggaataacagtttgataacccttttggtctacctcctcgtgttccgtagatcctgttgggtagaatgtcttgttactgctaaggtcacctccgccctgaatacccgtccgttccctacctggagacatccgtgccttccatcatgacatccacccccactgcggggaccacccagacggctgcttccgccccggtgcccctgccctcgtcgggctcgcgtcgggctctggccgctggcgcggcctggtcgctgcctgtcatcgtcctgggcgccgcggcccctgtcctggcctccacggcctaggagctgacggctgtaccgcctggtggcagcgctccggtcccggggcgccgacgccgccgggcgggccgccgcgccgcgtccccgcgggtggggtgctgcgcgcctcatgacgtcgggcccgctcccgcaggtgcgggggcgaggaggagtggtgccgtcagccctaccggctgctggccctgctgcccgtaccgcggcttcggggcccggttcgccacatgctcacccagaacagcagacccacccgttcccgcgggtacggggagcccgggccgtcctgtacgagggatattctgtgtacgaggtaacgccgcgtgtgcacgacggcctgagacggttgccccgcacacacagtgttgtctataacgttattccgcgtgcagaatgttacgacccgcacaaagtattttgcgcacccgtcctgcaagcggttcaggcgcaggccgccatggtctgcgctaccacctgtgccactgcctgcgccaccgccacctggcgcccgacgcccgctccgtgggtgggactcaggtggtggcgtcgcgtcagtacgtgtggctgcacctactgtccccaccacggttgcgaccgtccggtggcgtcgcgttagtacgggcggctgggtgccgtgccgtcctccaggcccgagcggcgtcgcccggtacggcgtctgtgggcgaggatagggacgtgacccctgcacccagcctccccgaccgcccggcagaccgacgggcgcaggccgctgcccccgcctcagaggctcctgcctcagggactggcccgtgcgcggccaggcccgccgggaacgtggggagctcgggcgggacgtcgtcggcggctggcccgtgcgcggccaggcccgccctctgggaggtagacgaccctgccgccagggcaggctccaccgcggaggccgacgcctcggcctgcacggcagaccgcgttgcccgggaggatggcctcgccgacgccccggcccgtgcaagccgggagacggacgacccgtccgcccaggccgcggtcgcgtcccccgcagctgaccctgtgactggttcagtggttggtcctacgggcggctcggcgcccggtccggctgcgggaggggcgacgtccccagccggttccccgccgtccgcgaccccggcctcccgccagcccgccatgcccctggcccgcctcgtcgtcggcccgcaggacgcccccgccctggtcctcctccacggcattggcggcagcgccctgtcccaggccgacgccgtgctccactgggcggcacgcggctaccgcgtggtggccctggacgcccgcgggcacgggctgtccccgcgctgggagcccgaggagctggagcgggccggtgaggtgctggtccaggacctcattgacgtcctggaggagctggccgccgggtcccactccgatggccccggggccgggggcgtgccagctggtgcgcgcctgcttgcccctgccggccccggggctgggccccgtgcagctggccgggccagcgccgacgtcgtccgcagtatggctggtgccgtgcgtggcaccaccggtgccatgtacaacgtcgctgacattctgcgtcgtgtcgcgaccggacgctcccggcgcggcgcggcggccgccgacttcgtgtgccacgccgctggcctcgtgcgcgacgcggctggcgtcgtgcacaaggccgctggcgccgtgcgcggtccggacgcccccgagcccgcaggccgcgtcaccaggcggcgcagagtccgttctcacgacgaacaagtaccgttctcgcgagcaacaagtaccgttctcgcggcgaataagtaccgttctcacggagggggtcggggcggggcccgcccggtcgtggtcggccactccatgggcgcggccacggccatggtcgccgccgcacgccgccccgacctcgtggccggcgtcgtcctggaggatcccgcccgctacggcacccgcagccccgcggagctcctgcgccggggcgccgggcgcgagcgcgcccgggagagggtgtgcgccgacccggtcggggccgtgtcccgcgccttagacaccccgtccacccccgccgtcgaggccctgcccggggtgtgggcggaccagcgcaccgaccccgccctgctgcgtacaggcgtcaccgcgccccaggtgccgtggctggaggcgctcgcggccctgcgcgtgcccacgctgctgctcagcggcgaccgcccgggctcggcccgtgtcggggcccaggggcttgctgaggtcgacgccctgggcagcccctggctgcggaccgtcctggtccccggggccgggcaccagatccgccgtgacgccccccaggccttctacgacgccgtcgacacctggctgaccgggctccgttaggcttgtccctccccgggaggcgctgggcggggccccggcctcccgtactggtgcggcgtcggcgccaaccacccccctccctccgcgagaacggtacttattcgtcgcgagaacggtacttgttcgtcgtgagaacgggtgggtccgggaggcccgtcgcgtcctccggcagggggcccagggaccataggccgacccaggtggcagcgtgtcagatagagtgccccagagcactcccagtgatgacgctggcccgaccgcaggagcactcgatgaccctagccacgacgccccaccgcacccgccgtcctgtcgctcgcacccgcaggccccccaccctgggccgcaggcaggtcaccggcctggtcctgggtgtcctggccttcctggtccccttcgtcgtcgacgtgcccgacctgggtgagcagggcgagcgcatgctctcggtcttcctcctggccatcgtcttctgggtccttgaggccatccccctcatggccaccgccgtcctggtcatcgccctggaggtcctcctggtctccaaccaggccgtcctgcccgtgcccggggacgccgtcccctactccctgtacctgggggccctggccaaccccgttattatcctgttcctgggcgggttcctcattgccgacggcgccgccaagtaccacctggacaagaacctcgcggccgtcctcatcaggcccttcaccgggtcggcacgccggaccgtcctgggtctcatggtcattaccgccctgctgagcatgttcatgtccaacacggccaccaccgccaccatgttcgcggttatcgtccccgtcctgggggcgcttcctgagggacggccgcgcgcgggcctggccctggccatcccggtggcggccaacgtcggcggcatcggcacgcctgtgggcacgccacccaacgccatcgccctgggggcgctggaggacgccggctaccacgtctccttcggcacctggatgctcatggcggtcccgctcatgcttatcgtcctcctgggggcctggctgctcctggtggccctgttcgtgccccggggcctgggcctggagctcgacatggaggccacctggcacaccgaccgccaggccgtcaccttctacgtcatcgccgccctgaccgtcctggcctggatgaccgaggcgctccacggcctcaacgccaacgtcatcggcttcctggcggtggtggccctcatggtcacccaggtcatggacggcaaggacctggccgccctgtcctggccggtgctgtggctcgtggccgggggcatcgccctggggcacggcgtggggaccacgggcctggacacctggatcctggggctggtggactggggtgccatgagcgccaccggtgtggtcgtgtgcatgggcctgctggggctggccatgagcaacgtcattagccactcagccgcctccaacctcctcatccctctggccatgggcctggccacgggcatcgacggcctggaccccgtggtcattgccgtggtcctggccctggcctgctccctgggcatgagcctgcccatctccacgccgcccaacgccatcgcctacgccacgggggcggtgaccacgccggacatggccagggtcggggtggtcgtcggagtggtgggcacggtgctcctcgtcctcctcatgcccccgctgtggtccgccctggggctgctgggatgagccgggtgaccggacggcggccggcgggcgaccccggccaggcgctgggccaggacggcggccagcgggcgcctgacggcggccaggacaccccggcgcctcgccggacgctgggccaggacggcatccagggcccgggccaggacggcggccggttcagcggtcaggctggcatccagggaccgggccgagaggcgtctgagagccgtgccgatgcccagaccagcaccgacggccagaccagaggccagcccaggggacaggagctcttccccggtacccaggtcagcggtcgggacggcatccagggcccgggcccggggtcccccgggacgcgccctgggctccgtcccgggacgcgccctgggacacgtcctgggacggggcccccaaccctcctcgtcctcgtcgtctccccgacggacacaggcgcccaggcagcccacgaggtcgggcgccagctccactactgcgaggtggcccaccagcacagcgtcgaggagatgctggccttcgtggccacccggcccgacgccgtcgtccccctcatgatggtcagcgacgaggtcggcagcctcgacgtgctggcgggccagctccaggaccgtcccgccctgcgcaccacccggctgctgctgctcaccaggcgcgacgagctcacccacctgggacgcgccctggacgaggactgggtccacgaggtcgtctccgttccctggacccccggcgccctggggcaccgggcgggcgcccacgtcacccgctggctgcgcgagaccctccccgacgacccccgcctggcccacctcgacgccgacacccccccggacctgcctcaggccagcctcctgtccaagttcgccggggacgacgacgagctcgtggccgagctcgtggccgcctgcgagcgggtgctgggaccccgcccccgtctccacctgcccaggggagtgcgcgtcacccgcgagggcatgccggtggacgccgtctacatcctggagcacgggacggtcgccctgacccgggtcacccgcgccgggaaggtcaccctccaccacgccacgaccggccgcattatcggcatcctctccctggcctcccagggcagtgccttcgtgacggccacgaccaccagcgaggtcgagctcatcctgctgtccgtggagcagctcgaccgggccctgcgaggggaccccatgaccggggaggcgctcgcggccctgctcatccgctccctggtgggtcgcctggagcgcagcgagatcctccaggtggagaagatcgagctccacgccgccctggacgccgagcgcgcacgcttggagaaggagcgggcccggctcgccgaggccttagacgccctggagcaggcccgcctggagctcctggcgcaggagcggttcgcgacgctgggcgagctggcggcgggcgtggcccacgagctcaacaacccggtggccgccctggagcgggcgagcgcgcacgagggggcggcggtggccaccctcctggcctcccacccccgtggggacctcgcgcgtgccgccctggagcgggcccggaacctgcctgcccgctccacggcggacgagcgggccctgcgccgtcgcctggagaaggctgtgagggaccgggagaccgcacggcgcctggtggcggccggggtggaggatcccggagaggcggctcgtctggcgcgctcgacggcggatctcgccctggtggaggcggcggccgggggggggcgcggggagcgcaacacggtcctggccaccgcccgcatccgctccctggtggccgccctgtccgcctacgtgcgccccgagggcggggcccaggagcgtgttgacgtgcgcgagagcgtcgaggacgccctgcggctggtggcccaccggctcgatcacgtggaggtggtccgtgactactcccaggtgccgctggtaccggcccgggccggtgagctcgtccaggtgtggacgaacctcatctccaatgcggccgacgccctggcccggggggcgacggcagcggccgggagcgcccccgcggtggccgggagcactcccgtggtggccgggagcacccccgacgcccccctggggccacccaccctcaccctgtccgtgcgcccccaggacgggggcgtgcgcgttgacgtggtcgacaacgggccgggtattgcccgcgagcacctggaccggatcttcgagccgcgtttcactaccaaccacgggcaggtgcgctacggcctgggactgggcatgggcctggccaagtcggtcgtggacgcgcacggcggcaccattacggtggtctcccgcccggggcggacgcgggtgagcgtcaccctgccccctcagattccgggggcgctggcagcggctcccgccaaccccaaggaggagtcatgaagctggtcgtgctggtggtggaggacgagcccccggtccgtgaggcggtgctgggggacctggagcacctgggcgccacggtgcgcctggaggcggcccaggacgtcgatgacgcctgggcggtcgtcgaggaggtcgaggaggacggggacgaactcgccctggtcctgtccgaccaccgcctgcccgggcgcagcggcgtggacatgctcgtggagatgatgggggatcctcgtaccgccgccgcgcgcaaggtgctggtcactggccaggccaaccaggccgacaccatccgggccgtcaacgaggcgggcctggaccactacattgccaagccgtggagggcggaggagctgtgcgaggtcgtgcgcgaccagctcaccggcttcgtcctggaccaggggctggacccgctcccgcacctgcccgcgctggacgccgtccgcgccctggaggccctgcgctgcccgtgggccgccggcgcggcgcctgggagggcttcgggtcctggcgggcctctgggtcctggcggggttccggcgcctagcggggccccgggtcctggtaggaccccggcgggtcggcgaggacgcgggaaggtgactggtggcgctcaggccaggtctccaggactcgatgcggggccggtggcacgggccgccggagacgcgagccccagggacctgagcgggggccggtaggactgccgtggccggggcccgggtgccggggctggccgtccgcggcgggtcgcggcgaggacgccggggatggggcggcgtcgccggtagtctgaccgcatgtcgaagaagaagcgtcaggtgcgtaaggccgccgtctctgcccccaggccccagaggatcccgttcgtcgtccgtcctttcgagggcctgcccgcggaggaggacctggtggcgatgatgcagatcatcccggccgcctccatgggcgtgcgcctcaacgaggcccacggtgggagcgaggtcacgctcgtcaccgtcctgcccgagctcgcccaggggctcaggcgcacggacggcgaggtcctggttgccctccagacctccctccactccggtgacgcctcccgcgacgtcgccgccgcgctgctggccaccctggagctgggcagcggggcagccctgaggatgaagggcctgcccgagcccggtgaacgccttcaggacgtcctggacctgtccgtcacaccccggatccgtgtgagcgagacctttgacttctggctgaccgagaaggactccaccgaccccaaggccctggaggccctggagaacgccaggaaggagatggcccccactcgcccggtgcccggcgtcgagcacgcctactggtgccgtatgaacggcaaggagttcgtgcgctgggtgcgcggggaggacgaggacgacttctttaacgccctggcccgggtgcacgccgcgcgccagtccgccctggaggagggggctcgcttcattggcgccttccgtgcctgcggcctggccgtccccgtgtgggagctggtggccggcaccgaggccgaggagctgactgagcccatgaaggccatgggggagcggctggaggaggcgctggccgtcaccggcccgctggacgccgacgcccgtcgcgccaaggccgggattatctcgaggcaggtcagcctctaaaggcgccccccacctcgtccctacctcgtcccctctcctctccgccctctccgcgagaacggtacttattcgccgtgagaacggtacttgtttgtcgtgagaacggtacttattgctcgtgagaacggatgggctgttcgcgggggacggttgggcgcttactgcttgcgcgaccgggcgaggtgcccggccgcgggcaggccgcccggccgcccagctgcgggctggccaaccgcaggctgacccaaccgcaggccgcctaagtgcgacccgcccctcagcggggcagcatgacgctcattcccagggcgaaggggaacccggggcgcaggacgcactgggcgacgggacgggccatggaggccagggcgacgccgtcgagcatctcgtcagcagggccggacagggagccgggggccaggatgcgctggtaggggacctcgaggtccaggaacgtcatcccgtcgcggcgtaccgccttccgccaggtcctcgtcctcatctccatgagcgtgcccaggtggaagtgcatgacctggttctcgtccagctcgctggggacgctcaggaggtggtgggcctcaggatcctccggggcccgcagggtgaacaggaggatcgccccgtcgcgggcggcccgcagcatgaggcgccccaggtacaccgtgaaggcgtgctcgttgaggctggtggccatgacctcctgcacgctcagggagcgcgagaggggcacgagcgcgcccgccccggcgtccttgaccgcccgcctgccggtgggggtggcggcgtgcaggcgcagggagccgtcgttctccagggtggcgacctccaccttctcctgccagcggcctgagctcgcggggccgtcctgggtgcgcaggaggcccatgcccaggacgtcggtgagatccgtgcccggccggtgccaggtgatcgtggtgccctcgtgccacagggggacgacgccgttgaacggtaggccaaagcgcacggtctcagtcatggggccaagcctacggggcggtccccggcagcggccgggggcgcgcggtgggacgacgggcgtgggagcagccggaagtgggcgtggtcggcccggatgtggtcggcctgggagcggacggagctgctcctggtggccgagtgcctggaaggagatcgcttgcgccgtcgtgccggacgggttatactggctctcgactgattcccagtaagcctcaccgtgtttgtgagtgctgaatgctccaccggttcgccggtctgactgcctggtcctgaggggccaggcagttataattttgtgactacctcgtccgtcatggatgtgatctaatagtgtccatggctgcaatgcgtatccgtgtcggcgtggacgtcgggacacactctgtcggctgctgcgcgatcgcagtcgatccggcaggagccccggtaaggatcctgtccgcactgtccctgatccatgacgccggtatcggtgaggacggcaaggagaaggccaccagccgacgtgagcttgcgggcgtcgcccggcgtgcgcggcgtctgctccgtcgtcgtcgcaagcgcctgcagcagcttgacacccttctggtcaggctcgggtacccgatcgtggattttgccgagcaaaaggatccttacctggtgtggcgggtgcgcgcccagctggtgcaggaggtgtttcctgagaagacccgcaggtatgcgatctcaatggctctgcggcatattgcgcggcaccggggctggcgtaacccctacgccagaacggagtcgctgctggctcccgctcccgagtcagactttatgagggcgatgcgtaagcgggtaatgaatactaccggtgaggttctggacgaggggttcacgccggggcaggcgatggccgtcgtggccctgaataatagggtcgctatgagaggccctgatggcgtcctggggaagttgcaccagacagataatgcaaacgagatcaggaggatctgcaagacgcagggagtgtccgagcaggagtgcagggagctcattctggctgtcttcgcctccgagtccccgcgaggatcgagcaggagcagggttgccagcgaccctctgcctgggcaaggcgatttcctgcgggcaccgaagtgtgatcctgagttccagcgcttcagggtcatctcgatcgtggcgaatctcaggatcgcgggacgagacggggcgcagcgccctctgctgcctcgcgagcgtaagaaggttgtgactttcctgcttgagtccatgtcggaggatctggcgtggggggacgttgctgagcgactcggtgtccgacgccagaacctgcgcgggacggcttcaatgacagccgatggtgagcgagccagtgcgcagcccccggtggacgtcaccaatcaggtcatgggcagctgccgtattaagccgctcagactgtggtgggcggatgcggacgcggagcgccgtggtgccatggtccgctacctctacgagggtgctgacgactcggagtgcgcggagttcgtggggagcctgtcagaggaggagcagggaaagctggactccatccacctgccagctgggcgcgccgcctactcgcgtgagtccctggcactcctcagcgagcagatgctggccaccgacgacgacctgcatgcggcccgtaagcacgtctttcacgtggacgactcctggaagccgcccgcggaacctgtgggcgccccagtgggcaatccctccgtggaccgcacggtcaaggcggtggcacgtttcctcaacggtgtcgcggacgtctggggaactcctgaggctatccagatcgagcatgtacgcgcaggcttctcaagcgagcggaccgccagggagcttgaccacgacaataatcgccggttccggcagaaccaaacggctgtggacgatatcaagaaggcgtacggtatccagggcgaggtccgccacagcgacgtcgtgcgatacactgccgtaatggttcaggacagtgtgtgcgtctactgcggcggtactatcgggtatctgacgtgccagctcgaccacattgtcccgcaggcagggcccggttccaacaaccgtcgcgagaacctcgtcgcagtgtgcgagcggtgtaaccgcagcaagtcgaacaccccgttcgccacgtgggcccaggactgcggtatctcgggtgtcagcgtagaggaggccgtggcccgggtgaggcgttggaggaatatccaggacggtcgcgcgcagtctgcacagctgcgaagacttcagaagaacgtgatcgcacgattgcgtcgcaccgatgaggatccagaaattgacgcacgaagtatggagtcagtggcctggatggctaatgagctccatcaccgggtgcagtcagcgtatccgtcggcagaggtcgccgtgtaccgcgggtcgttgacggccggggccaggcgtgcggcaggaattgactcgcgcgtcaacctgctgggggagcgcgggaagaaggaccggcttgatcgcaggcatcatgccgtggatgcggccgtcattgcgctaatgaaccccagtgttgccaagaccttggctgagcggtccagccaacgctgggcgcagcggctgtccggtcaggaggagacctggaagtccttcaccggcgcaacccctggtgcgcgggacaggtttgactcctggcgtgaccatatgctccggcttaccgagttgctcaatgcggcactggcagaagatcgtgtctgtgtcacagagaacctacggctccgactcggtagcgggaacgcccaccatgaaattgtacgtcctctggctcgacaccgtctgggagacgggctgactgccgtgcaggttgatcgggcatcctcgccagctctgtggtgcgcactgacgcggcagcccgattttactccccggggaggtctgcccccatcggagaaccgtgttatcaaggtccacgagagacgagtgaccgccgacgacaatatcacggtcttctcacagaaaccgggtgacgacgcggctgagaagccgtttgcggcgatcgcagtccgaggaggattcgctacgattggtttgacgatccaccatgcacgtctctaccggatcgaggggagaaagcccgtctatgccatgctgcgggtctttagccacgaccttcttccgtaccgtcgtgacgacttgttctcagtgcccctggctctccagactatcagcgtcaggtgtgcttggcccaagctgagggcggccttggctgaggaggctgctacctacctcggctgggtggtcgtgggcgacgagctcgaggttcccatggagagttttacaggcggatacatcggtgggttccgcaaggagttccctaatattacacgatggaggatcagggggtttgagagcgctactgtcgtcaagttgcgtcctaacgtgctcgcggcagaaggtcttaccgagtccgttggtgacgttgcgaaaatagtgggaagagggtggcggatgtccgtcaacgttctcttctccacccaccctacggtagtcaggcgtgatgcgttgggacgtgtccgccactccagtgcagccggtctgccgaccacctggacggttaggtaggtcgttctgatggatacagcttggcgtattattgactgctcctcactggacggtcagctcacctcggaacgaggggccgtcctggtgcaccccagtgctggggagcaggtacgggtaccggtagccgatgtggcggtgttccttgtcggccctcacacggccttcttctccgcggtgttgcaccgacttcttggggcggacgtggtggtgatgttctgcgactggcgcggggtacctgaaggagcagcgtacccgtggcacgagcacactcggattggtgcgcgacaactggcccagtcccagttgtccctgccgcggaggaagaatgcgtggggtaggatcgtcaaggccaaggtcctggggcaggcggcggtactgagcggcgtggacgcgagtgcctccgagcggttgcgggagatggcccgaaaggtccgttctggcgacccggagaacattgaggcccatgcggcccgtctgtactggtcgaggatgttccctgacgagggtcggttctttcgggagcctgatgccgaggataataggaatagctgcctcaactacgggtacggtgtcctgagggcacacggtatacgtgcggtggtgagcgccgggctcagccccgctatcggcctgttccatcgtggtcgtagcaatgccttcaatctcgttgacgatcttattgagccttttcgtcctgtcgtagacgataccgttctatctcttgctccggatgactctcttgagaatcgaagcgtcaagcagaagcttgtggcgaccgtgcagcaggcgttcgattccacgggctccacgcttcccaccgtcctcgaacgtctggctcagcatctggggcagtactgtgaaggtgatcgtgaccgtttagatgttccttcgtgggctggacctcagaaggtttctaatggcagatgacccgatgtggtccattgtcatgttcgatcttccggtcctgactgcgaagcaacgtcgtgaggccaaccagtttcggcaccttcttcttgacgagggattttggatggcgcagtacagtgtgtacgtgaggtactctccgaccatgtccggcgaggttcgcagaatccgggccatcaaggctgcgctgccagacggcggcgaggttagagtgctctatgtcacagatcgcgagtggtcgaccatgctctgttttcgcgaggaggctcctcttgccccggatcccgcaccccagcagctcacgattttctagtcacggagaactgcgtatgcgcaggtcagaaccccctggcaggctcatgaggagtctaccagggggactgaggactgattcccagcggagatgcatactggagtcacccgctggggagtctaccagggggactgaggactgattcccagcacctgcgtgtaggtcgcgtgcaccacggggagtctaccagggggactgaggactgattcccagcagagcgcggacgggactgtgtgggccatggagtctaccagggggactgaggactgattcccagcacacggggcagatgtccgattcgttcatggagtctaccagggggactgaggactgattcccagctacgtggacgacgacggggtagggcgggggagtctaccagggggactgaggactgattcccagcaggagcggacgagggcggtgatggcgtcggagtctaccagggggactgaggactgattcccagcggcctgagccagaggccccgccaccgccggagtctaccagggggactgaggactgattcccagcccgaacgggcgtgcgggcagcagtatgaggagtctaccagggggactgaggactgattcccagccccgccccagtggagtccgacgccctcgggagtctaccagggggactgaggactgattcccagcaggtcgatggcggtgcggagcctgtcgaggagtctaccagggggactgcccagcttgtcaggatgaggaaggcggagatacgctcaattcgcgcaagatgagcatagtgcgcagagcgtgtgcgccaccggttggcaggaggtctgatgactacagcggcggagagcaggacctatctgcccgaggaggaggttgctgggcggttcggtgagatcgtggagatgctgtcctcgcacggggcgtccgcgcacctggtggctggtggtgagacgatcgagctgagccagtccatggcagaccttctggtccaggtcgctcgggcgatgcgtcaggggctcgcggtgacgatcgccccgcacggcacccggctgacgacgcaggaggcggccgacatgctcggcatctcccgctctaccctggtcaggatgctggaggcgggggagattcccttcgagagagttcgtcggcaccgtcggctctgtctgtctgacgtgcttgagtttcagcggcgccagcggcgtgcagcggacgaggcgctgggtgacatggtggcggatacgcaggctatgggagggtatgacgacgatcctgcacgactgcgtgaggtgcttgcggctgtgcgctcagagggctgacgacaatgttctctgtaatgcttgacgcctgcgtgctggtacccagtaccttgcgtgatgtattactcgagatcggtactacacaggctttcaggccgttgtggagcgagatgattgaggaggagatggagcgggcggtcctccgtctgcgtgacgagcgtggtcgcgatcaggaggagtcgcgcggttatgtcacccggctccgacgtcagatgaacgaggcacttcctgacgcgcgggtacgagggtgggagggcgctctgcagtttgtcccgcgaatgcgtgacgcaaatgatggtcacgttgtcgcagcggccctcgtcgggcgtgcggacgtgattgttgctttcaatctcaaggatttcgaggatgaacgtcttccgggtgctcttttctcgcaatctccggacgacttcctgatcgatcttgtcgggctgtatccgcgtcttgtcctcgacgcccttgacactattgtggcaagaacggggcggaagggtcccaggtggagtgtggacgatcttcttgagaggcttgaagtcgagggcttgcatgagttcgtcacaatggtgaggtacgagagaggcgtgtatcggtagcgcacagactgcaagggttcttgcagatctcagtagttcttgcgtcggccctcctcctgacccggacatatccgcatgattccgtgggccctgtgtcagcctcctacaagaactcgtgcaacctgcaagaagtggtgctgtctgcaagaactcgtgtccgggatgctcgccctgctgtcccgcctccggcctcgacctgggccccggtccagggcccgctggttaagctgccagaagactacggaggtgggggcatcctgcttgttgccccaggggcaggggcgctcggcctggactgcccccggtccggcccggatcctgccgtaggcggcgctagcagacaggccggccccgcctatctcaggccccgcccggctcggggtccctacctactccagactcctaacccgcccctcccgccgtcctgtctggcccttacctgccccagtgctcgcccggccccgcccaggtccttcccgctcggccccgccgcggcccctaccaggcatccagtatgtggctggtgtgtcccgtcctggtacgtggtgtagtctcgtgcccgtgagcagcaccagcggcctgattaccagccggcgcgcgatgtagaccgtcgccccggcactgcccgcgcgccctctggaccaccggttcggggggcgttttcgttgcctctgcaccaccgaaacacaggagtcaccagtggcccacccgtcccgaccagccgtgcccaccgacccggacgccgcccgacaggagcgcagcgcccgcatcgcggtcacggtcttcccgctcattatgctcgcggccttcctcgccgcgttcttctggcccgccaccttcgtgcccctggccagctacatgacgccgctgctggccgtcaccatgctgggcatgggcatgaccctgtccgtccccgacttcaccatgatcgcccgccaccccgggccggtcgtgctgggtgtgtgcagccagtacgccattatgccgctggtgggctggggcgtggcgagtctgctgccgctgcccgacgagctcaaggtcggcattatcctcattggctgcgtccccggcgggacgacgtcgaacgtgtgcaccttcctggccaaggggaacaccgccctgagcgtgtccatgaccgccttctccaccatgctcgcaccggttgtcactccggcgctgaccctgtggctggcagggacctacatggaggtgcccgccgggcagatggcgttgtccattgtccagatcgtgctcctgccggtcggcttcgggctggcgtgcaacgtgttcctccaccgccaggtcgcccgcatccagcccgccatgccgtgggtctcggtggtcgcgatcgccggggtggtcgccgccgtggcggccaagagccaggcgctcatcgccaccgcagggttcctcatgttcgcggccatcgccctggagaacgccgtcgggtacgcgctcggctacgccgccgcccgggccttcggcgtctcgctcgccgaccggcgcaccatctccatcgaggtggggctccagaacgccgggctcggctccaccctggccgcccactacctcagcgcggcagtggccgccccctgcgcggtggctaccttctggcacacgatcagcggttctctgctggccatgtactggcgtctgcgcggcttccccgcgggcgaggacccgcaggcccccgtccgccggctgtgggagcggaagggtcgcgacgccgccctggagcccgcgggcgccgaggcctgaggcgctcaccccggggcggtcgtcaggagccagcccgtggcgtagcggtaggggtcctgaggcactcgccccggggcggtcgtgctgggtaagccggtacgccaccggtccccgccccggggcggaggcctgcagcgcctgcgggtccaccttcccgccttgccaccggtctccgccctgggtcagggtccgctcagcgtccaccgcgcaggaggagccggatcacctccggggccgagtagcggcgtggctgggagccggggttgacggtctccaggacgccgaggtcgaccagctgacccaccaggctgttggcgcgcccgtaggacaggcccagctccctctggacctggcgcacggtgaaggacgggttggccacggcgaggtccaccaggtccggcgcgcgtgccgagcgcagcgaggaggcccggacccggtcccgcagggccttctgcacctccaccagtgccagcatctgctccctggtggcggtggcggcgtcggccaggccgcgtgcgaagaaggacaggaaggagtcccagtcaccgtcggtgctcacccctaggagcgcgtcgtagtactcggtgcggcgggcctcgaaccagggggagaccgccagggtgggctcggagagcagtccggtgcgcatgagcgtgagcacaatgaggtagcgtccgagccgtccgttgccgtcccggaaggggtggagcgtctcgaactggtagtgcaccatcccggccacgacgacggggtctatacgtccgtggtggtccgtccccagccagtccaggagggccgtcaccccggcacgcagctggtcccccggtggtaccgggacgaacctgctggcctcgaccggtgtgacctcgggcccggcgacgtcgcggcggccgacgaccacctgcccctggcgcagccgtccggactccccctccagcggcgtggcgcgcatgaggcggccctggaggtcctcaatgagtcccagggtcagggggcgcccctcgcccatccagtcgaagcccagctgggccatgctgacgtagttgaggatctcagtcatctgggcggaggtgggggcgtcggcgtcggccgtgagcacctcctccagcggggcgtatgtcccctccagcgcggaggtggactgggcctcccgacgcagtgagggcgtccgcagcaggtaggggttgggcaggcaccgcgccgtggcgtccagggccgccagcgcccgcccggctgccgcgacggcccggtaggtagagcccgccagcaccggctcgtcaggtcccagggggaccggtacgaaggcgcggtggcgccagtcgcccaggtacgggtccgacccggtgatctcgaccagctcccccatagccgggttcctgaacatgctcacgtccaccatgtcacactaacggcccttgtctgacatgggcaagaccagcttttcacacaacgggcacttgtgtgaaaagtagtcggtggacatgtcacacatgtgccatgaggcgggaggcggtcccgcgcccggggcgccccgcccggccgccctgcttaccgctgctgggcccggtgcctgcgccgctcggccttgcggtggcgctgccagcgctggacggggcgttccgtcagcgccagcagggccaggacctccagcgccaggcccgcgatggagaccagggtcgcgtgacgtacccccagggtggtgatgtgcccggccgtggtcagggccgacagggtcaggaccgtcagcagcgcggtgcgggacctggggtgcccgacccaggaggcccaggccaggacggccaggagggtcgtcataaagctgctcaggcctatgaccacccagtaggcgaccgcctcggggtgggccacaccttcgtcacgcagggcctgcgcggtcaggaggatggtggagtcgctgagcaggcgcaccgcgtcggccagcaccgccagccccaccagggccaggccgaccagcagcccgccggggcgctgccggctggcccgggcgtccagggcgcgggcgcgggccaggtccacggagcggacgtcgtccacgacgacgtcgtgcaggttcagcacgtagaggtcgccgtcggtctcaatacggtcgcccccgccgttcctgtcgtggtaggcggtgaagaagtccggccacacctcggtggaggcctcctggctggcccacatgacgtcgtcgaccacgtagttgcgctcaatgtcgatgttcgcatcgatcttgtgggtgacctggccggtcagggtgctcaggcccacagagcggtcgtaggtggcgcccccgagccagtccacgacgcgccccccgggcaggacccacccggcaggggtgtgccagaagcgcacgtggtggcgctgggcggggttgccctccacctccttctggtaggcgaagtcctgaccccgcccgaacagggtgagcgtggagaccggggccgccgggtaggagcggcgtgtcagggaggagacgacgatcctccaggaggaggcgggcgttatggggtcggcacgcacccagccggcgcgcgtcatggcctcgtggatgtcgtcctcgtcccccaggacggccaggttgaccgggtcccccaggacgccgtcggtggtgcgggtgcggccgatgaagtagtcgggcacgtacagccaggtgaggacctggtggaggcgggggatggccaggtaggccaggagcgcccagaacaggacgactgccaggacggaccagggggacacgtgccagcccgccccgatgacggcccacgccagccacacggtggccagggcggccacggcgaagaagacggcgtccacgacgtcgtccaggccccaggagcgggcgcgcgcctcggagagcttgtcgtcgtgcgagcggtaggtgggtgccgtggtggggcgcggccgggtcgccacagggtcactcatgtcgccaccgtagcggggcgcccgcctcggggcggcgcgctccctgctagttgcgggcggcgtcgagcagcttctgggccaggacggggtcggccctgcggttaggctgccgggtgacggccagcccggaggcggtgcaggtgtaggttgccacgctggtgcggctggacacgctcccggtggacagccccagggagcctaggccgtcgcagctggcgacggcgcggataatgtcggtcgtctcctcggaggtgagtcgatggtccttgtcgccggtgagctcgcagacgtggatgttcgtcaggccgtccgtccggccgtaggcctgcagcctgctcccgtacttgctgtgatcgtccgtggccaggatcgcgttgaccggcgcggggtcgatcacctgccccggctccaggtagagctcgacgtcccgcctcccgctggagaagatctgcttgtagtgcatgacgccgctgtcgcccccaccggtctgcgatgtctggagggcctggggtatccggagatccaggtcctgagggaccgtgctgtgcgcctcgtactccaccatgacgtcgtgcctgctcagggtcaccgactgggcgctggtgcccgcgcgtgtgagggcgagggtcagggccgggcgggccagctcgtggccgccgtcgcccagctgggtctccatgctcagggggaggccgtcgacctcccaggacagtgagaccgtcagacgggtcggggacgccgccgcgatctggtccgccatctcctgctccgccctggtgagcagggtgatgacctcctcggccccggtcccctctcggaggtccgtcctcgccatgacccccgtgttgtcccagtacccggcctgtgcgtcgcatgcggtgacgacctcctgcgcgcagaagtagctcctggcggccagggcgaggtccacatggctcgacggcggctccgaggaggagaaggggtcgtacaggtcgcagccgaccagcgtcagcgccgagaccagtaccaggaggatccggacccgcaccgagctgcgtgtgatcatggacccagcataggacgtcgggaggacggtgcgagtcgcgtgtcacacgccgcctctggtacccggcaggcccgggacccgggtggccccggaccccgggcccagtcaggccgaggtaccgggctccttggccccgtccgccctggcctcgcccccgtccccgagcgcggtcccgtcctcgagcacgcccctatccccgggggcacctccgtccccgagcacggtcccgtccccagacgctcccccgttaccggacgtcttgtccgcggcgtccgccctgagccgggtgttgacccgctccacgtccaggcgcgtgagcaggagcaggatgagcgcgttggcgatcagcggcagccacacgtacatgacgtagagcatctggacggtcgagtccggctgtaccggcgcatcgcgcacgtacccgctggcggccagcagccacccggccagggccgtgccgacgccgccgcccaccttcacccccagcgaggtgcaggagaacatgagcccgtcgatccgcttgccggtgcgcagccacgtgtactccgagatctcggcgatcatggcgttgagcgtgccctgcagcgggctcatgcccagagggaggccagcgcggacagcgccagcatgagcggcacgctgcccgtgtaggcggccaccagcacccccaggcgcccgaccacggcgatcgcgtacccccagatgttgacccggtacatctccttgaaacggtccaccaccaccggcgtcaccagcagccccacaatgagggggacgttaatggcccaggcgaagacccccaggagtttggcgtcgcccaggatgtacttcatgaagaagatgcccatattgagcatggccgtgaagatctgggtcaggaggaagatccccagaataatgaggtagtacctgttggacagcagcatcctggccgactcgcgcattgtcggcctctcctcggcggtgctctcgacctcctggcggcccgcgccctgcccctcttggtggcccgccccggcgtcggggctattgtccgccctgtcgccctccagctcctcttccggcagctccttgaccgagaagaccgccagggtgttgaccgccaggccgatgagcgcgtagataatggc

SEQ ID NO: 3744 - DNA, 23264 bp, synthetic construct
  misc_feature 1..23264: note = Synthetic
  source 1..23264: mol_type = other DNA
atgtccggatgcccggcccaggtgcgggtcgagggccggttgtcgcggtcgagctcgtgggtccacacgcccggctcctcgatgaggaactcctcggcgtagtcgatccaggcgcggtaacagtgctcgtagtgctcgacgtcgatctccccgcgcccgtcgtcgagcagggcctggcggatggcggccgaggccgagatgccctcgcagaccacccagtgcatgcgctcgtggaccaccggctcgccatcgaagtccgtcgtgtaaacgaagccgggggcgccgtcgatgcgccagccatcggtacgggcctgctcgaagatgtgctcggcggcatccagcatccagtccggcgcgctcatggaccggttgatgagggcgccgtgcagctgcacggtcaggcgcgcccattccaggccgtgaccgggggtgacgccgtagggcctgaaggggtgggccggctcatcgcggttgtagtcgagtctcggcttccaggaggtggagtagtgctcgggcaggcgccagccgtgctcgcgggcctgaacgttgacggcgaagtcggcgatcttcagggcccgctccagccagcgcacctcgccggtgacgtcggccgtggccaggtaggcctcgaccgtgtgcatggcggcattgataccgcgatagtcctcggggtcggtgaaatcgaaggcgtaggactcgatcggcatctgctggggctcgtcccaccagtagcggtcctggatctccatggcatcgcgcagcagctcgtgggcgccgggccgatccgcggccgtcgcggtggcggcggccaggagcacgaaggcgtgctggtagcactccttgcgggcctcggggtcgatcgggacgccccgcccctcggcgtcgggatcggggccgatcgccgaataccagccaccattgaccgggtcgcgcagggggccgcccaaagcgcgcacaccgtggtcggcgtagcggcgacagccggggatgcccatgagcgcccccagggagaaggcgaaggtcatgcggctggtgatccacagctcgaccggatgggaggggtccacctcgccgtcctggccgatccacccgaatcctgtgggcacctgcgaggcgcgcgcgtagtgcagtagtgcatgcgtctcgtaagccagccaacgcttgtgctcgggagcgccgaaccatcccagtcccatgagtcctccttgatccgctggggattcaaggctatcgacccgccccgtgcggatcaatgcttcggaccgagccctgcggagcccgcgcgtcggctacttctgcttgggccaggcggactcgccctgtgcgagcgcctccttgggggtcatcgcaccggtcgaccagcggctcagccccagccacagggcgctgctgcccacgcccacgggcatcgagtccgaggcatccatctcgacggtcgtctgacgcgactggagcagcctggtggcgcgcttgccgacgtcgctgggcgccaggtccgggtcgacgccctggtaggcggttgccaccccgcccatcgccatccgcgtgcgcgcccagttctgggaggtcaggtaggccatgaccgcattggccgcgtccgagcgggtgaaggccacgaggtagtcggtgcccacgagcacggcctccgatccccggtccgccgccggagtgacgaaggccgagatcttgacgccgttcgacgtcggcgacgccgtcgccgcagcggtcgtctcccccgctgcctgggcggagtccgtcgaggccgtggcgcccccggtggggctgggcgcctggaccgtcaccgggttggcgccgtcggcgtcggtgatggcggtgccctcggggaaccggctctcgaaggaggaggaggcgtgcagcatgaggcagctgcccttgaccaggtcggccccggcctgcgcgggggtccgcgagatgaccgagccacgccccccggccacgctcccatcggccaggaccagggagtcgacgacgtcgagggcctccacagcgcccgaagagtcgacgggcaccctgtgcgaggcccacgtctcgtaggcgccggagccctgcgtggacagcatggcgtcctcgagccagtcggtcatgacccagccggtggactccccgtctgaggcgcctacgcaccagggggttacggagccgtcggggtggtcggcgcggaccttgcgggtgagggtctccagttccgcccaggtggccggcaccttatagccggccttggcgaaggcgtccggcgaataccacacgagggacttcaccgaggccatgagcggggcggcgtagggcacggaggcgtggatacccacctggatccagtgccggtcccaccccgcctccacgttgctgttaaccgtgttcggcaatgggtggaccacgccggtgtcgacgagctcggccaccatcgccggctgcggcacgatcgccaggtcgggcaggttctcggggttgtcctggctcgacggcgaggcccccttgttggtggacaggtccgcgcccgagccgttgagcagctgggagcgcagctcggtggtgccggtgtgggcgacgtcgatgcccgtgcacttctcgaactcggccacggaggcctcgaagcgctctgcctcggtgccggtcaggctgctggagacggtgacggtggagccctcgtggccctggtaggccttgtaggcggcgcagccggtggccgatgcggagtgggccccgccggccgagcaggcggcggtggcggcgcagaccagggtcaaggcgctggcggccgcgagaagacggccgcagcgccgccgtctgccggttgaacgtcgtcggaccggggcggccccgccgggcagaccggtgcccgcggcggtgacgtcgttgatggggccgatggagttgtgatgggagatagggagaggggactgtcgcatcaggggtgccttactcgttcgatgacggcgtccaggacggcggcgcagccgtcccgccacacgggctcggtcaggatatcgccgcggtcgcgcacccactggggcgcactacccatgacgactccggccccggcccactcgatcatctcgacgtcgttggagccgtccccgaccgcgagggtgcgggcggagtcgacgcccaggcgggagatgagcgcctcgagggcggaggccttggtgacgccttcgggggcgacgtcgagccaggccgtccagccgatggcgtactccaccgagtgcagcccggagtcggccacgatctcggagaagcgctccaccgacatgcccggggcccgcaggaccacgcgggtgacgggctgggagacgagctcgtcgaaggagacgacctgctggtcctcgatgagctcgccgtcggggaagagccgggagaccttgaacccgacgccaaggtcctccacggcgatgatcccgtcgggcacggcggcgagcagggtctcgatggcggggcgcgggtcgaaggtgcgcgagtcgaccacttcgtagccgccgggggcgtccgggtcgagccgcagggtcagggcgccgttggcgcacaccatccagcccgagctcagccccaggtggcgcaccaccggcatggcggcggcgatcccgcgcccggtggagatgaccacgggcacctcgtgggcgcgcaggcgggcgatggaggccatgacccgctccgagacgcgcccgtccatgtcgaggatggtgccgtcgacgtcgagggcgacgacgagccctcgaccgggcgcgagccgggccccgccggaggcctccagcgcgtcgaggtcccgcatccggtcctggaccagggcgtggtactcctcgtggtccagagcccgacggcgcagcatgcgcccgccggttcccccggcggagccggtggtcttggcggtgctctcggggtcgccgcgatgcccgatgcactcagccgagccgcccaggcgggtcagcggttgaccacccgggacgatcccggtgtcggggttgacggccgggccgttggccgtgggctcggcggcgctggagccgcccgcggcgtcggccgtgcggcccgcaccggcggtccccggcgaggggtccgacggcgtcgacggcgagggggcggatggtgtggggctcatgcgcggccggcctcaggcggtggcgccgacgggctcgatggcctccaggccgcccaggtaggggcgcaggcccgcgggcacgcgcaccgagccgtcggcctgctggtggttctccaggatggcgaccatccagcgggtggtggccagggttccgttgagggtggccacggggctcgtgccgctctcgcggcgctcgcgcacggccaggcggcgggcctggtaggtggtgcagttggaggtggaggtgacctccatccagcgctgctgggtgggcagccaggcctcgcagtcgaacttgcgggcggccgaggagcccaggtccccggcggcggtgtcgatgacccggtagggcagctcgaccagggccagcatctcctcctccatggccaggagccgggcgtgctcggcctcggcgtcctcggggcagcagtaggagaacatctcggccttgttgaactggtggacgcggatgatgccgcgggtgtccttgccggcggcgccggcctcgcgccggtagcaggtggaccagcccatgtagcgcttgggcccggcggtgaggtcgaggatctcgtcggcgtggtagccggccagggccacctcggaggtgccggtgaggtagaggtcgtcggcgggcaggtagtagatctcgtcgctgtgggcgcccaggaacccggtgccgcccatgacctgcggggtcacgagggtgggggtggtcatcggggtgaatccgtgggcgacggcggcgtccagggcagccgtcatgagggccagctccaggcgcatgccccagcccttgaggtagtagaagcgggcgccggagaccttggcgccgcggcgggtgtcgatgatgtccaggccctcgccgatcgccaggtggtcggcgggctcgaagccctcggcggtgaagtctcggggctcgccgccttcgtggcgcaggacgacgtagtcctcctcgccgcccgacggcgctccctcgatgaggttggcgaactggcgggccagggcgtcgagctcagcggccgccgccgaggaggcggcctcggcggccttgacctgctcggccagttccttggcactggcaagaatcgccgggcgctcctcaggcgatgccttcccgacggaccgggagacggccttctgctcggcgcggaggttctcgaaggcggccagcgcctgacggcgggtctcgtcggcggcaatgacgcggtcaacgagatcgacgtcggcgccgcgggctcgctggctggcgcggaagggctcggggttctcacgaagcgcacgcaggtcgatcatgaccctgagtgtagtcaggaccgtgcccgaggccgcactcggatcactttccgggcgacatcgggccgcacgcgaggtggtcaccaaccagtgacggacccgacactcgagtcggatcgacccgtttcgccgtcggatccgcaccactgacgaggcggactcgcgggcccgaaagccaagaattaaccggaaggccaggggtggatggcgcgcgtgcgggccatacacgttcacccctgcacacaccacccctcgagcgcgaacgtgacctacttccctctaccaacgtaatccacctgtgaatacaatccatttcaatcggtgtaccctatagttcccgacggcgttctcgggccgccatgttggaggcccgcccacgccggatcccacaccattctccccgcttctcccggccattcgtctgccttcgactttctgtcactccgtcatatcaggctcgccgatcgcgttggtgcgggccccgaccacaggaccacaactcatgccgatctcatcatctccgtccttctcgcagttacgggccttcgtagccctgtgcgaccaccagcacttcggcgaggccgccactgcgctcggcgtcagtcagcccagcctgtcgcaggccatcaccgccctggagaagcgcgttggcggcgagctggtggagcgcaccacccgccgcgtgctggtgacctccctgggcgaggctctcctgcccttcgcccgcgacgccgtcctggccgccgaggccttcaacgaggccgcctccagccagggggccgccctgagcggcacgatgcgtctgggcatcatccccaccatcgcaccctacctggcccccattctcatcgacggtctgcgcgaggccctgccccagatggagctggatctgcgcgagatggtcaccggggacaacctcgaccaactcgcccaggggcgtctggacgccgccatcatcgccctggaggacgacctccagcgcaccaccgcgatcccgatgttcgacgagcagctcgtcgtcctcaccgccgccgaccacccctgggcggggcgccgggacgtcaaccccgccgagctcgatgaccagcccctcctcctactcgacgagggcaactgcctgcgcgaccagaccctggccctgtgccagcgctacggcacccggcccccggtcgcggtggccaccaccctgtcgacggtgacccgcatggtcgcacacggctccggcgtgacgatcattcccgagggggcgctccagctgctgaccccctcctcggagtacggcgttgcccgtttcgccgacgaggcgccggtgcgccacatgggcctggtccaccggatctcctcctcccgcggcgccgacttcgcccaactggccgccctcatctcacgcctggtgagccaggccggcctacccgtcaccccgatcaggacctgagtcggggcgggaacacgggcggaaagtcggcgccgggccgcagcccggaccacgccccggatccgtccggcccccctcgatgacgtccgcgcggctccggtgacagtgaccggggccgcgcggacggttaacctgcccctatgaccggcttcaccgacggcggggcccgggcgacgacgcgcaccgggcagccactggcctgcgtcgtcgtcaacccctccaagccgcgcgccaccgccgcggtgcggggcctgctggagcgcgagctgcgcgaggcgggctacgccggacccgtctggctcgagacgagcatctccgagcccggcaccatgcagacgcgcctggccctgggcgcaggggctcggctcgtggtggccgccggcggcgacggaaccgtgcgcgcggtggcggcgggcctggcacgcagcggcgcccagatgagcatcgtccccctgggcaccgcgaacctggcggcccgcaacctcggggtacccgtcggcgacccgcgggccgcggtccgggcggctgcccgcggggccgacctgcccgccgacctggcctgggtgaggaccgagcccctgcccgagtccgacgtcggactagaccggaccgggacgcccagaaccgccggacaggcggaggtcctgggcggagccacggccgccgagccgactcgcccccctccggccgacccggtcgatccggcggacggcgtcgaggcggcagacccgccgcggctatcggccgaggcggcccgggcggtgcgcacggtccagagggcgacccggcgtacccgtcagtgggcccggcccacgctcggcgacgagcacgcctgcatggtggtggccgggatcggcttcgatgccgggctggtggcctccacgcgcccggccctcaaggcgagggtcggctggggagcttacgccctggcggccatggagaacctgggatcaccgcgcatggacctggttctcagccttctcgatgacaccggcgagcgacgcgtggaacgtttgaccgcccgcaacctgctggtggccaacggaggtcgcctgccggcggggatcactctgctgcccgaggcccgcaccgatgacggtctgctcgacgtcgccgccatcgatacggttgccggtctggccgggtggagctccctggcgcgccaggtgctgccgccctacgcggcgcgctattccgagtccggccgctcgctgggccgggtggtgctgcggcgcggcggggaggtgaccgtccagctctcggcgccggcgctggtggaggtcgacggggatctgctggcgcccacgcggggcatgcgggtgcgcatcgaccccggggcgctgctcatccgccgtccggcggcctgagggcgggtcggtcgggcgggtttgagggccgcccgctccggctgcatgcccagcggtgcagtccccccgcttattcctcccagaagccggcgacgtcgatcgccccgccggtggcctcgaagtctgcgcgcacggctcggcgcaggtcggcgtcgtggagccagtccagggcgacggcggccagcccgtaggcgccgtcgagcgcggccgcgtccccggtggggccgccggcggcctcggtcatggcacgggtgtggagggcgacgtcgggccggtcggtgactttgatgagcgggtggatgccgggcacgcgctgggagacgttgccgaagtcggtgccggcggcgatcgtctcgggcagaaccccgggggccaaggggtcgcggccgcgctcgcgttgggagcgcgcccaggaggtgagcagggggccgttgtcccggacggggacctcgttgcagtactccgaggtaaggatctcgacgccggttccggtcatgagggcggcgccgtggaggacctcctcgacccgctcggcgatctccttgagggtctcgaggtacttggagcgcaccatgatggacagctcggtgcgttcggggatgatgttggggacctggccgccgtcggtgatgatggcgtggaggcggtccatggggagcatctgctggcgcagcaggccgatgccggtcagggccagggtggcggcgtccagggcattgcggcccatgaagggctgggaggcggcgtgggccggcacgccgtggaagacgacctccaggcggcgtaccccgagccaggtctggtgggtgacgtcgtgggcgtaggagtgggtttggatggcggcgtcgacgccgtcgagcatgccgcgcacggagaggatctccttggcggtcgagttctcctcggcgggcgtggtctgcaggacgacgcggccgggcaaggcgccggggtgagagcgggccagggcggccagggcgaggaaggcgcccacggagttggcgcacatgacgttgtggccgcagccgtggccgatgccggggagggcgtcgtactcggcgaggatcgcgatggtgccgaccggccggccggaggcacctgcctgtactggggagccagagacctccgcgcgcagggcggtgtccatgccgtagacgccgacctcgggctcgatgccgtggcggcgcaggagtgcggcgaccgtggccacggcatggtgctcctcgaaaccggtctcggggtggtcgtggatgtcatgggagagctcaacgatctgcggggccagctcggcgacggcctcgcccagggcggcgcgcaggtcggagggggcgccggcgtcgtcgggcagggccgtcggtgggccaacgacgccgcggcgctcctcggtctcggcggccatgcgctcctggatggcactggaagggacagtgggacgggtgaggtcattcaggtcgcgcatgggcccatcatgcccacccaccacccgtattgcacgagggtccggggttcgagcagtgcgggtcactcgctgccagaacaacctgagattcgtgcagttgccacagtgctcctagaccattcgtcatcgaatcatctgcagaacatgactctcttggggtcagaatccatccggatcgtgctagccttagcaggactgattcccagtaagccccgccgtgtttgcggggttgaatgctccaccggcttgccggtccaactgcccgatctcacgtcgagatcgggcagttcttttgtcgcattctcaaggcactccggctgtgatatgtatttctcatgtctgctcaccaccttcgcgtggggatcgacgtcggcacccattccgtcggactcgcaacgctgcgggttgacgaccaggggacccccatcgagctcctctcagcactatcgctcatccatgattccgggatcggcgaggacggaaagaaaaccgcctcgactcgcaaggagatctccggcgtcgcccggcgcacccggcgtctgctgcggcgtcgacgcaagcgactccagcagctcgacaaggtgctgcttgacctgggcttcccgattccggatctgggtgggcagactgacccgtacctggtatggagagtgcgcgcccagctggttgaggagacgctgcccgaggagctgcgcggtccggcgatctccatggcggtacgccatattgcacggcaccgggggtggcgtaacccgtactcgaaggtcgagtcgctgttgtcgcccgcagaggactccccgttcatggaggcgctacgtgagcgcatcatgaagggcccgggcgtacttctcgacgacgacatcacccccggccaggcgatggcccaggtggcactgactcagcgcatcaccatgcgtggccccgacggcattctcggcaagctgcatcagagcgacaacgccaacgagatccggaagatctgcgcccgccagggcatctcccccgatgtctgcaagcagctgctgcgagccgtcttcaaggcggagtccccgagaggatcagccgtgtctctcgtggctcccgacccgcttcccggtcagggctccttccggcgcgcaccgaagtgcgaccctgagttccagcggttccggatcatctccatcgtggccaatctccgtatcagcgaggccggaaacagggatcggccgctgacggctgacgagcgccgtcaggtcgtcaccttcctcctggaggacccgcgagaggacctgagctgggttgatgtggccgagaagctggggatctcccgccaggctctgcgaggtactgcgacgctcaccgcggatggtgagcggtcggccgcgcagcctcctgtcaacgtcaccgaccagatcatgcgcaagaccaagatcagcctactgaagacctggtgggcgaaggccgacgccgagaggcaaggtgccatggtccgttacctctatgaggggcttgaggactcggagtgcgccgaggtcatcgccgacctgccggaggaggaccaggccaagctcgattcccttcacctcccagccggccgtgcggcatattcgcgggagtccttgacagccctcagcgatcacatgctggcgacgacagatgatcttcatgaggcgcgtaagcagctcttcggcgtcgatgactcatggacccctccagccgaacccgtgggtgccccggtgggcaacccgtcagtcgatcggactctcaaggtcgttgcccggtatcttgccgcggttgaaaatgtgtggggcaagcccgaagtcattcaggtggagcatgttcgcgatggattcgccagcgagcgtgcggcgcgggaacgggaccgggcgaacaaccgtcgctacgaggtaaaccaacgcgcgatcaaggacattcagcagtcttacggtgtggagggacatgtacgtccgggcgatgtcatgcgccatcatgccatcacattgcaggactctgcctgcctgtactgcgggggaacaatcggctaccacacctctcagctggatcatatcgttccgcaggccggaacgggatcgaataaccaccgcgagaatctcgtggccgtctgcgagcgctgcaaccgttcgaagtcgaacaccccgttcgcagtgtgggcgcaaacctgtgggatccctgatgtaggggtgaagaaagccgttgagcgagtgcgcgggtggcgcaaccgtcccggtggtatgacatctggtgagttgaagcgcctcaagaaagaggtcatcgcccgtcttcagcgtacccaggaggatccggagatcgatgcgcgcagcatggagtccgtggcctggatggccaacgagctccgccaccgcattgccgctacctaccccgacactgacgtcatggtctaccgcggctccgtcaccgcggccgcacgcaaggcgacgggcatcgactcgcggatcaatctgatcggcgagaagggacgcaaggatcgcattgaccgccggcaccacgccgtggacgccagcgttgttgccctcatggagcgaagtgtcgccaagaccctggcagaacggtcgagtcttcgctgggcacagcgtctcacgggacaggaagagacctggaagcagtacacgggcttgaccgtgggggcgcgagagcacttcgagacatggcgcaaccacatgctccgcctcacggagttattcaacgcaaagctgacagccgatgaggttcacgtcgtcgagaaccttcgcctgcgcctcggtagcggtaacgcccatgatgacacgatccggaagtacgccattcctcggctgggcgacggcttaacggccaatcaggtcgatagggcctgctcccccgcattgtggtgtgcgcttactcgggagaaggacttcgacgagaagaacggccttcccgcgagggaggaccgctttatcagagttcacgggcaagagctgacctccaatgaccatattcagatcttcgccaagaagcccggcaatgacgccaaggagaagcctttcggagccatcgcggtgcgcggcggctacgcggagatcgggtcaacgatccaccacgcccgcatctaccgcatcgaggggaagaagcctgtctacgcgatgctccgcgtcttcactcacgacctgctcagtcaacgacacgacgatctcttctccgcagtggttccgcctcagtcaatcagcatgaggtgcgcggagccgaagcttcgccaggccatcgctgcgggcaacgccacctatctgggatgggtcgtggtaggtgacgagctggagatcgacatcgactccttcaaaactgggcagatcgcagatttcctaagcgagtaccctggcacaacaagatggcgcattagagggttctataacgaccgacaactccgactacgccccgcttacctagcagcggaggggctcatcgaccccagcgaggcaatcagtaagacgttgtcgattcccgggtggcttccagcgatcaaccaagtggcagctactcatccgcgagtaatccgccgggatgcactcggccgtgttcgcagctccagcagatcgggcctccccacatcgtggaccatcgagtgaggggcgccgatggacacggcctggcgcatcattgactgctcgtcgctggaggggcgcatcacctcggatcgtggggcgatctgcgtccaccaggacgacggcggtgagcatcggatcccgacggcggacgtagcagtcgtcctcatgggcccccacgtgagcttctcgacggctgtcgtgcatcgactactgggcgctgacgtcgtcgtaatgttctgcgactggcggggtgtccccgagggcgccgcctatccgtggcatgagcatggtcgcgttggggccagacagctggcgcagtcgcagctctctgagccacggaggaagaatgcgtgggggcgcctggtgagggcgaaggtgctggggcaggcgactgtcctgctccagaaggatcgtcctgcggcagcccggctcaaagagatggcacgttcggtgcgctcgggtgacccggagaatgtcgaggcccatgctgctcgcctgtactggtcccgcctgttcgccttcgagggtgattttctccggcgcccggaggcggaggatcaccgcaacagctgcttgaactacggctatgcggtcctgcgcgctcatgggatccgggcggtggtgagcgccgggctcaccccgacgctcggcctgttccaccatgggcgcggcaatatgttcaatctagtggatgacatcatcgagcccttccgtccggcagtggatgatgccgtgctgcatctggatcctgatgcgagtcccgctgagcggcaggtgaagcaggttctggttgcctcggtgcagcagcccttccgtgaggacggcgccacgctcccgaccgtcttggaggagctggctcagcacttgggtcagtactgcgaaggggaccgagcccgtttggatgtcccatcctggaccggtccgaggcgcaagtcctgatggcggatgatccggtgtggtgcgtggtcatgttcgatctgccggtggcgacgaagaagcagcgcaaggaggcgactcgcttccgccatcttctcctggatgaaggcttctggatggcgcagtacagcgtctatgtccgctactccccgaccgtggccggggagccccgcagagcgggcacgatccggagcaacctgcctcgtggcggcgaggtgagaatcctgtatgtcaccgatcgcgaatggtcgcacgcgctctgtttccgcaacgaagagcccgtccaggccgagccggagccccagcagctcatgatcttctaacctctagcgaggtgtttgtgctggtcagacccccttgatagacgttttagaagtctatcaaggggtctggtgactgattcccagcaacggtcacctgctccatgcgggcggctgaagtctatcaaggggtctggtgactgattcccagccactccttgtggtgggtggccgtcatatgaagtctatcaaggggtctggtgactgattcccagcttcttggtgccttcagggcctcgatgtcgaagtctatcaaggggtctggtgactgattcccagccgcaaagcctcgtccgatgaaatcgacggaagtctatcaaggggtctggtgactgattcccagcgcgggaccctcccgctgaaactcctaacgaagtctatcaaggggtctggtgactgattcccagcaagggcgagatcaccgccgaggagttcagaagtctatcaaggggtctggtgactgattcccagcatgaagggcttgtcgggccagttggtcagaagtctatcaaggggtctggtgactgattcccagctccatcgtcgtggggaccgccgagtccagaagtctatcaaggggtctggtgactgattcccagcaggccgaggaagaggggctcgttgtcctgaagtctatcaaggggtctggtgactgattcccagcttatgggcagtgacggctatggcttcttgaagtctatcaaggggtctggtgactgattcccagccgcggcaggatcgagaagcggacctcctgaagtctatcaaggggtctggtgactgattcccagcaagaacgggggctccagacgcgtgacgggaagtctatcaaggggtctggtgactgattcccagcgcaaggacggtgctgacgttgacgccgtgaagtctatcaaggggtctggtgactgattcccagcctcaccaacacccccaccggaaaacgctgaagtctatcaaggggtctggtgactgattcccagctgggtgatgaacgggtcccgctttgtcagaagtctatcaaggggtctggtgactgattcccagccaggccgtcggctactgaccaactctgtgaagtctatcaaggggtctggtgactgattcccagcatggtttccttcatgctccgatcctaccgaagtctatcaaggggtctggtgactgattcccagcaggtagtcgctggtgttcatctctggttgaagtctatcaaggggtctggtgactaattcccagtcgtcggggaagggttggatgggcgatgaacggcgtcgaacgcgtagggctgccgtaggcatcgctgatggcgttccagcgcatcatcacccatccacgaatgaccacaaaccctctgaaacctgcggatgcgtgaaactacatcaccagctggctcgacgccgaccagacctgagttcccacgccgggcagccgtcaccgcgacatcctcggctagctcctcatcgacagcaactccgcgcgcttcgacagcctccgctagatcaaccccaacagcagatagttccaccgctgcgcgctgactccgtcggggaagggcggtgtgtaggcaggtggaacccgcccgcacaccgcccccggaacacggatgggggcaatggcgtcaccgtccgcttcaccccgtcttgcccccacccgtgagtcaagcggctcgcacagcctcaactcaccgagccgtcgtcctcctcgatgccggccgcggtacccaggctctcgacggcgtcgaggtcatcagcgccgccctcactggcgacggcgcccccggcctccccgccggcctccatctcagcccgcgcatcggcctcctccttgagtcgggtgttgaccttctcgacgtcgagccgcgtgagcaggaagaggatgagcgcgttggccacgagcggcaaccacacgtacatgatgtagatcatctggatggcggactccggctggaccttgaggtccccgtcgtacccggaggcggccaacagccagccggagagagcggtgccgaggccgccgcccaccttcacgccgagcgacgtgcaggagaacatgagcccgtcaatgcgcttaccggtgcgcagccaggtgtgctccgaggcctcggcgatgagggcgttgagcgtgccctgcagcgagctcatacccagggccgcgaccccggagaggatcagcatgagcgggaggctgttcatgtaagccgccacgagtaccccgagccgcccaagggtcgcgatgacatagccgacgacgttgatccggtacatgcccccgaagcggcgcaccaccagcggcgtaatgaggagcccgatcatgagcgggatgttgatggcccaggagaaagtcttcagcaggtccgcgtcccccaggacgtacttcatgaagtagatgcccatgttgagcatggccgtgaagatctgggtgagcaggaagacaatgaggatgatgaggtagtacttgttagacacaagcatcttggccgactcccccaccgagagcttgtcctcctggggctccccctcaccctcgagctcctcgggcggcagctccttaaccgagagcactgagagcgtgttgaccgccaggccgagcagcgcgtagatgatcgccatcgtccgccacccgacggcgccgccgccgaacagggccacaccgcccacggtgacgctctggatgagcaggttcgtcccgaaggcgaacatgaagcggatggagcccatctgcacgcgctcggagccattgcgggtgatgagtgcggtcagcgaggagtaagcgatgttgttggccgtgaagaagacggcgttgagcagcgtgtaggcgatgaagaaccaggcgtacttggcggtatcccccaggctcgtggggatcgcgaagatcgcgatgagcatggcggcgcagcccacgaacccccacaacatccacgggcgggccttacccatccgcgtgttggtgcggtctagcagcgccccgaagatgatgtcggagaagccgtcgaagagtcgggagaacatcatgagcgtgccgacgacgcccgcgttgagcccggcggtgtccgtcaggtagatcatgacgaaggcggacaggagcacatagacgacgttgccggccacgtcgcccgagccgtagcccaccttgttgtaccacttcaggtactttctctcgctggccgcttcgagcccggttcctgcggtgggggcgccggccttcttaccggcagactcgctgctcatggtttcacctcattgtgactactggtgtgggtaagggtgttgagcaggagatggagctccatccccagctcctggccgtcgacctggtagcggggccgcagggcgggcccgcagctgttggatccgatgccggccatcgcggcgtccaggcacaggaccgtgctgcccgacggcgtcagatcggtgttgcggtgccgcgcggccagctcctcctgcgtgtagcgggaggcgttgaaggagaagggggtcggcccgacaacggccaggctcaggccgtccccggagacaatcaccttgttgcagtcggcgtggctgccgttctcctggggccggatgtagtcctcgtggaggtcgacgacgtcggcactgaaggccccgtggtggctggcgcggtgcttgtcgatgtaactctcttgcgggcccaggccgtagtagtcgacctggttcatgacctcgggcaggaagagacgcagtcccaggcgcggcaggctggggaagcccagcgtccggcgcagtcgcaggctcaggctcaggacgccgtcgtcggtgagggtccagatgagtcgtccgcgcaaggcgggctggaccgagggcgccacgaggccgacgtcggcactgatggtgacgcgaccgggctcctcgtcgacgtcgacgccgtaggcgcgggccgcggcctggtggtagtgggcgcgctcccattccaggcgcacgtggcggtcgttgtcggtgggcgcccgccagatgttgagctcgaccggccggtccaggagctcgcggccctccgcagccagggatacgggcaggccggtgcgcgtgtcgatggcgcagcgcaggcccgcggcctcaacctcgactcgggtgccctcgcgcttgaccggtaggtgggtctccccgatggggcggccggcgagcgccgcgacccaccggtgacgcctgtcggcgttgcgcagcgggatctcgtcgaagcccaggacgtgcccggcggccagcagcgagtcggggcgggcgagccggtaggtgaccagcaggtggcagcgtccggtgggcgggacgctcggttcgcagcgcagcatgacgcttgtgtgcggcgggacgggctcgaggaggtcgaggtcctggcggtccacgacaacgccgtcgcaccgaacctcgtaggagatgcgcaggtactgggacatgtcggtgtggtcgaggtcgttgtggatggtcagcaggccctcgtcctggtcgtactcgaggacgcgggcagggcgctggacgttcttgagctcggccaggccggggtgggggacgcggtcgggcgagacgaggccgtcgacgcagaaattgccgtcgtggacggcctcgtcgtggtcgccgccgtagaggtggatcggccggccgtcgtcactggttccggcggtcaccgcgtggtcgcaccattcccacacgaagccgccgcacatgcgctcatctgcccggatgatctcccagtagtcctcgaggtcgccgggcccgttgcccatggcatggcagtactccacgaggatgaagggcttgtccgggtcggaatccaggtagtggcggatctcctcgatggccgggtacatgcggctgtacaggtcgatgcaggagtagtcgtagcggcgcttggagtcgcggtagtaggagctctcgtagtgggtcagccgcgtggggtcgaagtccttggcccacatgagggccgcttcgagggtgcagccgtaggagcactcgtttcctgcagaccaggagatgacgctggggcggttcttctcgcggtggacgcacagtttcatgcggtcgacggtggcctcggtccactcggggttgtcggcgatgggctcgttccagtgctcgacctggttgtcccaggaggggtcggccaggaagcggctctgggtgccgtggctctcgttgtcagcctcagacatgacatagaagccgtgctcgtcgcacagctggtagaagcgcgggtcgttggggtagtgggagctgcgcactgcgttgatgttgtgctccttcatcagacgcaggtcccactgcatgtgctccaggtcgacgacgggcccggtggtcgggtcggagtcgtgccggttgacgccccgcagggtgatgggccggccgttgaggcggacgacggcgtcgctcgtctcgatctcgcggatgccgacccggtcggtgatgacctcgtcgggggtggtgatgaccagggtgtagaggtaggggttctcggcgctccacaggtagggggcgtcaagggttaggcggatccggtgggtgtagccgtcgtcgccggcgaagggttccaagtcgccggcggccacgaccgtgccgtcgtggtccacgagctcgacggaggtggggacggccccgccccggtaagcgccctggatcttgaccagggcggtggccggaccagcgtcgaacccggtgccgaccaccggaccgagcgaggtggtggtggcgtaatcgaacaggacagcggcggggcggctcaggaggtagacgtcgcggaagatgccgctggtgcggaacttgtcttggtcctccaggtaggtgccgtcgcaccacttgaggaccaagaccgccaggcggttggcaccggggcggacgagctcggtgacgtcgaactcggcggaggcgtgggagacctggctgtagccgacataggtgccgttgagccacacgtagaagcaggagtccacaccctcgaaggtcagataggtgctgggggcggcggcgtccggggtgtactcgaagtcgcggatgtaggcgccgcaggggttgtcctgggggacgtggggcggatcgaaggggatggggtagcgcacgttggtgtactgatggtggtcgtagcccaggtgctgccaggtgctgggcacctggatccgggtgaagccctccgggacgcgggcggaatcggggtcttggtcgtcgccggcgctctcgggggcttcctgctcccagaaggcctcggtcagctcgtggatgctgggcaggtagcggaaggcccactcgccactgagcagatggaagcggtcggagtcctcccgcctccaggggctggtggcgatgggacgggatgcgggcacgtagtaggcgcgcggcggaagcgtgtgctcgtggaggacaccgaggtcctcgaagtatctaggaacgatcattgttcggctccctcaggtgtggacgggaacgggggacgcgcagcagtgcaacgtctttatgttgacgttaacatagtagacgagccccgctctagtgaggcagatctatcaacccaatctggactccaccaacctctgaggaggatcactatggtaacgtcaccatgtcgtcaggatgcgggtactcctgccgcccctgataacctcatgccatgccagggcagcgccggggcgcggagggagcgccgtcaatgagcgatgtggctcgcttggccggcgtctcagcccagacggtctcgcgcgtggcggcgggatcggagcacgtccggcccgatacccgcgagcgagtcctgcgcgcgatgaaccaactgggctactcccccaaccgcgcagcccaggccctgcgccgaggctccttcaagacgatcggggtgctgacccagcagatccaacgcaccggtgaggccctgaccaccgcgggagtgctggaggcagccaccgccgtcgactacgccgtcaacctcgtccaggtggagcaccccgcctccgacgacctgcgcgaggccgtctaccgactctcccaccaggccatcgatgggcttgtcgtcgtgcaagccgggagggccgggcgcgagcagctggtattgccgccctcgatgccggtggcggtctcggactccacgctcgtggactactacccctcggccagcgccgaccaggtcggcggggtgcgcgacgccgtcgggcaccttctggggctggggcaccgcaccgtctaccacgtgtgcgggcccgaggactcccagtccagcctcatccgcagagccacctgggcccgctgcctacaggaggcggggcgggaggttcccgagccggtacccggcgactgggaggccgcagcgggctatgaggctggtctgcgcctgtcggccgacccggaggccacggccgtcttctgcgccaacgacgagctggccctgggcctcatccgagccatgcacgagcagggcagacgcgtgccgcaggacgtctcggtcgtcggcttcgacggcctggccgtgggcgagtacagcttcccgccgctgaccacggtgcgccaggatttcaagcggcacggccgagagatggtggggctcgtgctggagcaggcggcctcgggggaactggaacgcagccgcagcatcatcatccccaccgagctcatcgtgcgcggctcaaccgccccgccggcgtcctgagtgcgcagtacggcgtcggcccggctcagtcctcctggggcaggagcatggaggcgcccagggcgaaggggaatccgggcttgaggatgcactggatgacaggctgggccatttccaggacgctgtcggcgtcgagcccctcctcgccgtcggggccggcctcggccacgaggtcggcgtaggggacggtgaggtcgagcagggccatgccgtcccggtgggtggcagcatcccaggcgccgccctccatctcctgaagggtgcccaggtggaagctcatgacgccgcggtcatcgacctgcgcgggtacggacaggatgtggtgcggctcggggtcgcgcggcgcccgcagagtgaacaggatgatcccgccgtcgcgggcggcgcgcagcatgatgcggccgatgtggatgccgaagctgacgacgtcgaagaccccctccatggcctgctcgtagctcagcggctcctggaggaggatcggggcgccatcgccagggtcgttgatggcgcggcggcccgacggcgtcgcggccctaagcagcaggagccggcctgagtcggtcagggtgccggtctccacctgctcctgccagccggcgggggcctgggcggggccgggctcagactccaccaggcccatgcccaggacgctggacaggtcggtgccgtcggccggccggtgccaggtgatggtggcgtcgtcgtgccagatggggacgacgccgttgaaggggataccgaagcgcacgtgctcgcgctcgccatcgacgggccgggaggcatcgacgtggctgacgcgcccgcgggcccgacccgccggacctccgctgtcggcgctgccctcctgcggtcctgccaggtactcgctcatgaatccaccctatcggcgggagagtcgggccgcgtgtcgctctgcgcaccgattcgcccgccggttcgcaccgcggcccgaactgcgcggcgctcctccttgcgggcgtgctcccactcgtggacctgcctggctgagagggccagcagggccagaacctggagcgcgctggtgatgaccaagccgagggtcgcctgtcggaccccgaggctggagacctgcaccatatcggtgaggatgctcaggacgagggtagcca

SEQ ID NO: 3745 - DNA, 20549 bp, synthetic construct
  source 1..20549: mol_type = other DNA
  misc_feature 1..20549: note = Synthetic
ccgacggctcgcgcgccctcgaccgggggcgctcgccccaccggccgggccggcggcgcgggccgcgcactcctcagagatggagttgtgctgggagacagggaggggggactgtcgcatcacgggtgccttactcgttcgatgagggcgtccaggacggccgcgcagccgtcccgccacacgggctcggtcaggatatcgccgcggtcgcgcacccactgcggcgcgctgcccatgacgacgccggctccggcccactcgatcatctcgacgtcgttggagccgtccccgaccgccaggacgtgggcggagtcggtgcccaggcgggcgatgagcgcctcgagggcggaggccttggtgacgccctcgggggcgacgtcgagccaggccgtccagccgatggcgtactccaccgagtgcagcccggagtcggccacgatctgggagaagcgatccacgggcatgcccggggcccgcaggaccacgcgggtgaccggctgggagacgagctcgtcgaaggtgacgacccgctggtcctcgatgagctcgccgtcggggaagagccgggagaccttgaagccggcgccagggtcctccacggcgaggatcccgtcgggcacggcggcgtgaagggtctcgatggcggtgcgcgggtcgaaggtgcgcgagtcgaccacctcgtagccgccgggggcgtccgggtcgagccgcagggtcagggcgccgttggcgcacaccatccagccggcggacagccccaggtggcgcaccaccggcatggtggcggcgatcccgcggccggtggagatgaccacggggacctcgtgggcgcgcaggcgggcgacggaggccatgacccgctccgagacgcgcccgtccatgtccaggatggtgccgtcgacgtcgagggcgacgacgagcccgtggccgggtgcgagccgggcgccgccgtcggcctccagggcgtcaaggtcccgcatccggtcctggacgagggcgtggtactcctcgtgtcccaggggccgacggcgcagggcgtgctcgccggtgcctgcggcctgtccggcgccgtcctcgaggtgcccgacgtactccgtggagccgcccaggcgggtcaggggctggccggccggggcgatgccggtggcggggttgacggccggaccattgccggtgggctcgggatcggtgggggcactgacggcgccggtgtcggtctcgcgtgcggcacccggactggaggcaggcgtggggttcacggggccggccctcaggcggtggcgccgacgggctcgatgacctccaggccgcccaggtaggggcgcaggccctcaggcacgcgcaccgagccgtcggcctgctggtggttctccaggatggcgaccatccagcgggtggtggccagggtcccgttgagggtggccacggggctcgtgccgccctcgcggcgctcgcgcacggccaggcggcgggcctggtaggtggtgcagttggaggtggaggtgacctccatccagcgctgctgggtgggcagccaggcctcgcagtcgaacttgcgggcggcggaggagcccaggtctccggcggcggtgtcgatgacccggtagggcagctcgaccagggccagcatctcctcctccatggccaggagccgggcgtgctcggcctcggcgtcctcggggcggcagtaggagaacatctccgccttgttgaactggtggacgcggatgatgccgcgggtgtccttgccggcggccccggcctcgcgccggtagcaggtggaccagcccatgtagcgcttgggcccggcggacaggtcgaggatctcgtcggcgtggtagccggccagggccacctcggaggtgccggtgaggtagaggtcgtcggcgggcaggtagtagatctcgtcgctgtgggcgcccaggaagccggtgccgcccatgacctgcggggtcacgagggtgggggtggtcatcggggtgaagccgtgggcgacggcggcgtccagggcggccgtcatgagggccagctccaggcgcatgccccagcccttgaggtagtagaagcgggcgccggagaccttggcgccgcggcgggtgtcgatgatgtccaggccctcgccgatcgccaggtggtcggcgggctcgaagccctcggcggcgaagtcgcgcggctcgccgccctcgtggcgcaggacgacgtagtcctcctcgccgcccgagggcgccccctcgatgaggttggcgaactggcgggccaggtcgtcgagctcggcggcggcggccgaggaggcggcctcggcggccttgacctgctcggccagctccttggcgctggccaggatcgccgggcgctcctccggggaggccttccccacggaccgggagacctgcttctgctcggcacggaggttctcgaaggcggccagcgcctgacggcgggtctcgtcggcggcgatgacgcggtcgacgagatcaacgtcggcaccacgggctcgctggctggcgcggaagggctcggggttctcacgaagcgcacgcaggtcgatcatggtcctgagtgtagtcaggaccgcgccccagacagcattcgatcagcacctgagccgatccgggccgcgagcgcgacgggcgacggagacggggcgagccggggacgctcgaagtcacggacgagtggcggagccaacactcgagggcggaacgggtgggattcgacgtcgatcccccggcggccggcccgccgccagcgtcacccaaggccctgaaatccaggaatgatccaggagattgggtggtggcggcgtggggtcgcaaggccgcgatatatacatgctcaccctcacccgcaccacctcggaacggcgaacgtgacccacacccctcttaccaacgcaatccacctgtgaatagaatccatttcaatcggtgcgccctatcgttcccgacggtgtttccgagccgccacgttggagactcgccctcacctcccaccgcaccgccctccccgctcctcccggctagtcgtctgtccccgattttctgccactccgtcatatcaggctcgccgaccgccatgaatgcgggccccgaccacaggaccacaactcatgccgaccacatcatctccgtccttctcccagctgagggccttcgtagcgctgtgcgaccaccagcacttcggtgaggccgccgccgcgctcggagtcagccagcccagcctgtcccaggccatcaccgcactggagaagcgcgtcggcggcgagctggtggagcgcaccacccgccgcgtcctggtcacctccctgggcgaggccctgctgccctacgcccgggacgccgtcctggccgccgaggccttcaacgaggccgcctccagccagggcgccgccctgagcggcacgatgcgcctgggcgtcatccccaccatcgcgccctacctggcccccgtcctcattgacggcctgcgtgaggccctgccccagatggacctggacctgcgtgagatggtcaccggggacaacctcgaccaactcgcccaggggcgcctcgacgcggccatcatcgccttggaggacgaccttcagcgcatcaccgcgatcccgatgttcgacgagcggctcgtcgtcctcaccgccgccgaccacccctgggcgggccgcacggacgtgagccccgccgagctcgacgaccagcccctcctcctgctcgacgagggcaactgcctgcgcgaccagaccctggccctgtgccagcgctacggctctcaccccccggtcgcggtggccaccaccctgtcgacggtgacccgcatggtcgctcacggctccggcgtgacgatcatccccgagggggcgctccagctgctgaccccctcctcggagtacggcgtcgcccgtttcggcgacgaggcgccgatgcgctgcatgggcctggtgcaccgggtctcctcctcccgcggcgccgacttcgcccagctggccgacctcatctcgcgcctggtgagagaggccgacctgcccgtctcgcccgtcaaggcctgagccctccctccggagcgcctctcgccggcggcaggcgctctctcgcgtcctctcggcccgttcctgcccgccgcccccctggcgggccgtgacccaggccgccagggagactagcctgcccctatgacgggcggcaccgacggcggcacccgggcgacgacgcgcaccgggcgtccactggcctgcgtcgtcgtcaacccctccaagccgcgcgtcaccgccgtggtgcgctctctgttggagggcgagctgcgcgaggccggctacgccgggcccgtgtggctggagacgagcgtctccgagcccggcacgatgcaggcgcgcctggccctggcggccggggcgagcctggtggtggccgccggcggtgacggaacggtgcgctcggtggcggccggcctggccggcaccggcgcccagatgggcatcgtcccgctgggcacggcgaacctggcggcccgcaacctcggggtgccggtcggggatgcccgggcggcggcccaggtggtggcccgcggcgtcgatcttcccgccgacctggcctgggtgcgcaccgagccccggtccgatcccgacgtcgtccccgacccggcgccggcggacgccccccgcgggcgggccggctccgcatccctgacggggccagccgcagcagccccgccggactccccgcccgccccggtcgcaccggccgactcccggcagctgtcggctgaggcggcccgggctgtgcgcacgatccacagggcgacccgcagggcgcatcagtggacccggcccacactcggtgacgagcacgcctgcatggtggtggccgggatcggtttcgacgccggactggtggcctccacgcgcccggccctcaaggcgcgggtcggctggggcgcctacgcgctggcggccatggagaacctgggctcgccgcgcatggacctggtgctcagcctccaggacgaggccggcgcacggcgcgtggagcgcctgagggcccgcaacctgctggtggccaacggcgggcgcctgccggccgggatcaccctgctgccgcaggcgcgcaccgatgacggcatgctcgacgtcgccgccatcgacacggtggccggcctggcgggctggagctcgctggcgcgccaggtgctgccgccctatgcggcgcgctactccgagtcgggccgctccctgggacgggtgatgctgcgccgtggaggggaggtggccgtccagctctcggcgccggccctggtggaggtcgacggcgacctgctggcacccacgcagggcatgcgggtacgcatcgaccccggggcgctgctcatccgccgcccggcggcctgagagccgacgcgactggggtagcaggggcggtcggggcggcctgagcgcgcctcactcctcccagaagccggcgacgtcgatcgccccgccgctggcctcgaagtcggcgcgcacggcccggcgcagctcggcgtcgtgcagccagtccagggcgactgcggccagcccgtaggcgccgtcgagcgcggccgcgtccccggtgggggcgccggcggcctcggtcatggcgggggtgtggagggcgacgtcgggccggtcggtgaccttgatgagcgggtggatgccggggatgcgctgggagacgttgccgaagtcggtgccggcggcgatggtctcgggcaggacgccggcggccagggggtcgcggccgcgctcgcgctgggagcgcacccaggaggtcagcagggggccgttgtcccgcacggggacctcgttgcagtactcggaagtgaggatctcgacgccggtgccggtcatgagggcagcgccgtggaggagctcctcgacccgctcggcgatctccttgagggtctcgaggtacttggagcgcaccatgatggacagctcggtgcgctcggggatgatgttggggacctggccgccgtcggtgatgatggcgtggaggcggtccatggggagcatctgctggcgcagcaggccgatgccggtcagggccagggtggcggcgtccagggcgttgcggcccatgaagggctgggaggcggcgtgggccggcacaccgtggaagatgacgcgcaggcggcgcacgcccagccaggtctggtgggtgacgtcgtgagcgtaggagtgggtctgaatggcggcatcgacgccgtcgagcatgccgcgcacggccaggatctccttggcggtcgagttctcctcggcgggcgtggtctgcaggacgacgcggccgggcagggcgccggggcgggtgcgggccagggaggccagggcgaggaaggcgcccacggagttggcgcacatgacgttgtgtccgcagccgtggccgatgccgggcagggcgtcgtactcggcgaggatggcgatggtgccggccgactccccggagcctccggccgtcgcatccgcgcctgcggccccggggatctcggcgcgcagggcggtgtccatgccgtagacgccgacctcgggctcgatgccgtggcggcgcaggagctcggcgaccgtggccacggcgtggtgctcctcgtagccggtctcggggtggtcgtggatgtcgtgggagagctcgacgatctgcggggccagctcggcgacgacctcacccagggcggtgcgcagggcggtgggggctccggcgtcgtcgggcagggccggtgccgggccgacgacgccgcggcgctcctcggtctcagcgagcatgcgctcctggatggcgccggaggggacggtgggacgggtcaggtcgttcaggtcgcgcatggctccatcttggcccagccgcccccgctgcgggagccgccgcccccatcgaggacttactttcgccaccaggactgcgctgtcccccagatggcgacggggagatcccagtggcctggaggaaaacgcagtcctcgatcggaaagtacgtcccgggcgcggaccgcagccaccactccggcccacccgagccgcctccgggggcgaatgcccctcgcccccgcgctcttccgccacctccggcgctcgcacaccgagactctcttaagaccagggatccagccctgatggtgctacactcgcggtgactgattcccagtaagccccgccatgcttgcggggttgaatgctccaccggcttgcccaccggcaaggcggtctaactgcccgatctcacattgagaccgggcagttttcttacgccagcctcatgatgcgtccgagtgtggtatgcatctcccatgcctactcaccaccttcgcgtggggatcgacgtcggcacccattccgtcgggctcgcaacgctgcgggttgacgaccaggggacccccatcgagctcctttcagcgctgtcgctcattcatgactcggggatcggcgaggacgggaagaaagccgcctctactcgcaaggagatctcgggcgtcgcccgccgcgctcgacgcctgctgcggcgtcgacgcaagcggctccagcaactcgacaaggtgctgctcgacctgggcttcccaattccagatctaggcgggcagaccgatccatacctggtatggagagtgcgcgctcagctagttgaggagacgctacctgaggagctgcgtggcccggccatctccatggcggtacgccatatcgcacggcatcgggggtggcgcaacccgtactcgaaggtcgagtcgctgttgtcacctgcagaggactccccgttcatggaggcactgcgcgagcgcatcatgacgggcccaggcgagattctcgacgacgacatcacccccggacaggcgatggcccaagtggcgctgacccaccgcatcaccatgcgcggtccggagggcattctcggcaagttgcatcagagcgacaacgccaatgagatccggaagatctgcgaccgtcagggcatctctcccgatgtctgcaagcaactgctgcatgccgttttcaaggcggagtccccacgcgggtcggccgtctcccgcgtggctcccgacccgcttcccggccagggctcctttcggcgcgcgccgaagtgcgatccggagttccagcgcttccggatcatctccatcgtggccaatctccgcatcagtgaggccaaaggtaaggaccggccgctgacggcggacgagcgccgccaagtagttgccttcctcctggagggacccacgagacgacctgacctgggttgatgtggctgagaagctgggagtctcccgccaggctctgcggggtaccgcgaagctcaccgcagatggtgagcggtcggccgctcagcctccggtcaacgtgaccgaccagatcatgcgcaagacgaagatcggcgcgctgaagacctggtgggtggaggccgacgccgaacggcagggcgccatggcccgttacctctacgagggtcttgaggactcggagtgcgccgaggtcattgccgagttgccggaggaggaccagaccaagctcgattctctccaccttccaaccggacgtgcggcgtattcgcgggagtcattgacggccctcaacgaccacatgctggcgacgactgacgatctgcatgaggcacgtaagcagctcttcggcgtcgatgactcatgggcccctccggccgaacctgtgggcgccccggtgggcaacccgtccgtcgaccggactctcaaggccgtcgcacggtatctcgccgcggtcgagaatgtgtggggcaagcccgaggtcattcaggtggagcatgtccgagatggcttcgccagcgagcgtgcggcgcgggagcgggaccgggcgaacaaccgtcgctacgaggtgaaccaacgcgcgatcaaggagattcagcagtcctacggtgtggagggacatgtacgtccaggcgacgtcatgcgccatcacgccatcacattgcaggactccgcctgcttgtactgtggggggacaatcggctaccacacctctcagctggaccacatcgttccgcaggccggaacaggatcgaataaccaccgagagaatctcgtggccgtctgcgagcgctgcaaccgttcgaaatcgaacaccccgttcgcagtgtgggcgcagacctgcgggatccctgatgtcggggtgaaggaggccatcggtcgagtgcgcgggtggcgcaaccgccctggcggcatgtcacctggtgatttgaagcgccttaagaaggaggtcatcgctcgtcttcagcgcactcaagaggatccggagatcgatgagcgcagcatggagtccgtggcttggatggccaatgagcttcgccaccgtattgccgccgcctaccccgacgccgatgtcatggtctaccgtggcgccatcactgcggctgcccgcaaggcggcgggtatcgactcccgtatcaacctgatcggtgagaaggggcgcaaggatcgcattgaccgtcgccaccacgccgtggatgcgagcgttgtcgccctcatggagaggagcgccgccaagacgctggcggaacggtcaagtcttcgttgggcgcagcgcctcactggccaggaggagacctggaagcagtacacgggcttgaccgtaggggcgcgagagcacttcgagtcgtggcggagccacatgcttcgtctcacggagctgttcaatgagcgcctggccgctgatgaagtgcatgtcgttgagaaccttcgcttgcgtctcggtaacggtaacgcccacgacgacacgatccggaagtacgacactccccggctcggtgacggcctgtcagtcaaccagattgatcgagccagttcccccgcattgtggtgcgcgctcacccgggaggcggacttcgacgccgagaacggccttcctgccagggaggatcgcttgatcagagttcacgggcaagagttgacgtccaacgaccgtattaagctgttctccaagaagcgcggcaacgatgccaaggagaagcctttcggggctatcgcggtgcgtggtggctacgcggagatcgggtcaacaatccatcacgcccgcatctaccgcatcgagggcaagaagcctgtctacgcgatgctccgcgtcttcactcacgacctgctcagtcatcggcacagggatctcttctccgcggtcgtcccaccccagtcgatcagcatgaggtgcgccgaaccgaagcttcggcaggccatcgctgcgggcaacgccacctacctgggatgggtcgtggtgggtgacgaactggtgatcaacattgactccttcaccaaagacactattgggcgcttcctcaaagactaccctaacaccacacgttggcgtatatgtgggtatgacgccaacaataaactgacattgaaaccaaggatccttgccgcggaaggattagggaatccaagcagcgccgtgagtgaaatcgttgaccgtaaaggatggcgagtagcaattaacgtactggccaaagtacaacctactgttgttcgtcgcgatgctctaggccgccctcggtactccagtagattcggtctccctgtctcctggaccctcgagtgaggctccgaaattggacacagcctggcgcattatcgactgctcgtcactggagggtcgcatcacctcggatcgtggggcgatctgcgtctaccaagacgacgggggtgagcatcggatcccgacggccgatgtggcggtcgtcctcgtaggtcctcacgtgagcttctcgacggctgtcgtacatcgcctgctgggcgcggacgttgtcgtgctgttctgcgactggcggggcgttcccgagggcgccgcctatccgtggcatgagcatggtcgcgttggcgccaggcagctggcgcagtcgcagctctctgagccgcggaggaagaatgcgtgggggcgcctggtgagagcgaaggtgctgggacaggcgactgtcctacttcagaaggatcgtcctgcggcagctcggctcaaggagatggctcgttcggtccgctcgggcgatccggagaatgtcgaggcccatgctgctcgcctgtactggtcccgcctattcgcctccgagggtgattttctccggcgtccggaggcagaggaccaccgcaacagctgcttgaactacggctatgcggtcctgcgcgctcacgggattcgggcggtagtgagtgctgggctctgcccgacgctcggcctgttccatcacggacgcggcaatacgttcaacctggtggacgacatcattgagcccttccgccctgcggtggatgatgctgtgctgcgtctggatcctgatgcgagtcccgctgagcggcaggtgaagcaggttctggtcgccgcggtgcaacagccattccgtgacgacggtgctacgctcccgaccgtcttggaggagctggctcagcacttgggtcagtactgtgaaggggaccgagcccgcttggatgtcccgtcgtggaccggacctaagcgtgagtcctgatggcggatgatccagtgtggtgcgtggtcatgttcgatctgccggtggcgacgaagaagcagcgtaaggaggcgactcgtttccggcaccttcttctggatgagggtttctggatggcgcagtacagcgtctacgtccgttactccccgaccgtggccggcgagcgtcgtagggcgagtgcgatcaggaacaacctgccgcgcggcggcgaggtgcggatcctgtacgtcaccgaccgcgagtggtcgcacgcgctctgtttccgcaacgaagaacccgtcgaggccgagccggagccccaacaactcgtgatcttctgacccctgacgaggcgtttgcgctggtcagacccccttgatagacgtttctgaagtctatcaaggggtctggtgactgattcccagcgcctcgggtgaggatggcagtaggctaggaagtctatcaaggggtctggtgactgattcccagcgcagggcgcgcttggcttcggcctcggtgaagtctatcaaggggtctggtgactgattcccagcttcacgtcgtagtaggcgtcacccaggagaagtctatcaaggggtctggtgactgattcccagcccttgaggacgcggtggaggatgagtcggaagtctatcaaggggtctggtgactgattcccagccttcgacgttgcggagccacttgaggttgaagtctatcaaggggtctggtgactgattcccagcggacgtcctctccccacggttcgtcgaagaagtctatcaaggggtctggtgactgattcccagctccggacctcgcggatgtcctgctccaggaagtctatcaaggggtctggtgactgattcccagcagaagcgctcctaccccgttccggacacgaagtctatcaaggggtctggtgactgattcccagcagggacggcggccagttcctcagcgtctgaagtctatcaaggggtctggtgactgattcccagccgggcactggtcctggcccatgccgtgggaagtctatcaaggggtctggtgactgattcccagcatcgcgactggatgtctaccgactgcccgaagtctatcaaggggtctggtgactgattcccagcgggcctcgtctgcactcggaggtcacacgaagtctatcaaggggtctggtgactgattcccagcagcctggtagtgatccgagtgatgctgcgaagtctatcaaggggtctggtgactgattcccagcttccgaagatgccggtgagccgtagctcgaagtctatcaaggggtctggtgactgattcccagctggtgatcgcggagagcagcgggccgtagaagtctatcaaggggtctggtgactgattcccagctcgcccctgcgtcggcaatgaggacggcgaagtctatcaaggggtctggtgactgattcccagcgtgcgagcgtgaccgattcccggccgtcgaagtctatcaaggggtctggtgactgattcccagcaggtcatcgacgaggagaccctggaggcgaagtctatcaaggggtctggtgactgattcccagccggccgtctgtgtcggtgaggtggccgcgaagtctatcaaggggtctggtgactgattcccagccggattcgtgcgtgcgcgacgtgaacatgaagtctatcaaggggtctggtgactgattcccagcatgccgagtttaataaactcgcgtctatgaagtctatcaaggggtctggtgactgattcccagctgctcgggggccccgcgccgccgcagagaagtctatcaaggggtctggtgactgattcccagcggccctcgttctgagtgccggagtccgtgaagtctatcaaggggtctggtgactgattcccagcaaccgggacgcccggaacaacttcctgggaagtctatcaaggggtctggtgactgattcccagcctccggcgactccggccatgctggccccgaagtctatcaaggggtctggtgactgattcccagcagcgaggtgacatatgcgcagggtggtgggggctccggcgtcgtcgggcagggccggtgccgggccgacgacgccgcggcgctcctcggtctcagcgagcatgcgctcctagatggcgccggaagggacggtggggcaggtcaggtcgttcaggtcgcgcatgcctccatcttgacctagccgcccccgccgctcagtcgcggggtgcagcgagccgacgggccgcgtcgacgacgacggcgcgctgacgttcgtgcgcctcctcatcctcgaagggcccgcacagcatccgggccacctggggcacggtggaccaccagccggtcagcgacatgagcatgaccatgagcgcccccgggtcgacgtcccgggtgaggacgccggagtcctggccactgcgcaccccggcgatcttgcgctgatagtgctcgcgccgcagctcctcctcgggcacctcgtcgtcgaaggtgagggcctcccagcacagcagccggatgagctcggggcgctgccggtggtagtcatagaggcgcccggcgtagtcccccgcatcctcgccgtcgtcgaaggcgggcggcacggcctcggcagccttggtcagctcgtcgcgcaggactgcggagaacaagcggtccttggagccgaagtagttgtagacgcgctccttgttgacgccggcccgcttggcgatccgctcgacggtggtcccagcgggcccacggcgggtgaactcggcggtggcggcgtccttgatcttgcgcttggtcccctcagtgtcccaggccatgacactccgtctcccgtgtccgcgagcgccggcggcaaactccaacgctaccgttgcaactactcctccagtctactagggtcatttccaacgcttacgttggaaaggggttctcatgtctcccgtgcaccggcccgatcaacatcccgacgtcacccgctcccccgagtcctcgacccagtcgacgactcgttcgacctctcccgcctaccccgccggcagcggcgtgaccgccgccctcgtggtcaccgcgctgctcgtcctcacccagctgtacgccgccatccccctgctcgccccaatctcgaccgacctccatggcaatgccactgtcgccctgtcgacggccttcagcctcacttacgccgcaggcttcctcatctgggggccggtctccgaccactacggcaggaggaggaccatggcgctcgcgctggggacccttaccgtctccaccgtctgctgcgccctggctccgtcgctcccagtcctcgcggccctgcgcgcgatccagggcctgagcgcttccggtttcgcacctgtggccctggcctacctgtccgaggcgctggcgccaccgaggcgagccggggcgatcggggcgatgtcgacgtcgttcctcgtggcagggatctttggccaggtgctggcctcactggtcgcgctgcacctggggtggcggtggttcttccctctgtgcggcggactgctggccgtggccctggcggtcgtcctcgccgccgtgcacgacgccgcctccagcccttcgggctcctcgcttcgggggcagttcgcatcgctgggccggctcgcggccaggtggtcctgggcgcagatagcccggctgggcttcggggtgtcggcattgggcatgctcggtgaggcactgctggcgcagagcctggtgggcctggtggccggcagcatcgtatacgtcgccggggtagcgctggctgcgccggcaatgattagcctctatggactggtctccgcacccaaccgcggcagcggcatggcgctcaacgggttcatcctgttcgtcggcacgagcgccggcccactcctggcgacgtcgtcgtccaccttccgggtgctggctctcatcctggccggcatcctggccgtggcgctggccgcgatctccggtttcaaggcactggccgacgccgaccactgacgcgaaccgaccgagggagccgccgccgccatcgaggacttactttcgccaccaggactgcgctgtcccccagatggcgacggggagaccccagtagcctgcaggaaaacgcagtcctcggtcggaaagtacgtccccggcgcgaaccgcagccaccactgagtcccgcccggcccgcccgagccgccttacctcgtcctcagctgaacagcgaggcggccaccatggtgtcaccctccttgatgcccggggggatcgcgaacagcgccgaggcctcgtgcttgaggtactcctggagggcgtcgctcttggtcatgcggtccaggatcgggtagaagttcgtgcgcgggtcacgcacgaaagcgatgaagaacaggccggtctgcagcagccccagggagtcggagccgtcggtgtagttgtagccgcggcgcagcatccggcgcccctggttctgctccggtgagacgacggcgatatgcgcgtcggccggcacgagcgtctcgcccttgtcgtccttggccttgtagtccacggccgtgaactcctcggaggccttcgtggggttggcgatgctcagcggcgccccgtagcgcttgtcgcgccccatggtctgctcctgctcgatgagccgcaggcggtcccagatctcggcgagcatgcggatgcgccgggccacgtagtaggtgccgcccgtcatccactcggctgcggcgtcgtcgcccttctggacccacaggtgcttgttgagctggtcggtggagtcctcggccttgatgttgttggtgccgtccttgaagccgaacaggttgcgcggtgtctcctggtccacggaggtcgacgacgtgcgcccgtagccgacctggctccaccgcagcgcggcggtcccgaaggcgatacgggtgaggttgcggatcgcgtggacgcacacctgggcgtcgttggagcaggcctggatgagcaggtcaccgtcggactgggcggcgtggagctggtcgccggcgaaggagggcatgccctccttgaggacggcgggcatcttggcggccaggccgaagcggtccttgccgtcggcgtcgacgaacaggcccttgcccacgccgaaggtgatggtcaggccgttgggcttgtagccccaggcctcgccggtgtccttgggcggcagctgcttgttggagctgggctggccgccgatgagctcgccggcggtcatctgctcggcggccacggcccagtcggacaggagggttttcagctcctcgacgtcggtggtggagacgtcgaaggccgcggtgaacatgttgtcctgggcgggggtggtgatccccgcctggtggtcaccccggaaggggtaggtcgtgaggatggcgtcctcgggccggcgcgaggcctcccaggcgcggccgccggccacaccggccaggcccgcgagcgcggcacccaggcccgcgccggcgaacatggcgcggcggctggtgcccttggggccgggcttcccggccgatccgggtgccccggcctcatccggcttctcggccttctccgggttgtcagccgtgtcagcctcgtcggaggcgctcgcctcctcgggctgctccgccgcgtcggaggccgaggagccctcacccgggccctccgacgtcggggcctgcgactcctgctgcgcctgcacggtctcgtcctgggtatcgtcctgggtcgcgtcgtcggcgaccggggaggtgtccgactcgtgggccggcttgccactcactgctgtctccttccggggtgtccgggttgctctggtgccgccgcctcagaggacagttccagcgaccttggacagcgactcgctcaaggcgttgacggcgtcggagaacttgcgctgcacgtcggtgtaggcgttcttgtcgggggtctcgccggcgtccttctggaccgaggcgatggtggagtagtccacgtaggtgggctggccgttggaggccttcccggaggcatggttcgcgatgagcttctcaaccgccgtgaactgggtggtgatcttctcggcgagcttggcgtccttcttcttcatgagctcctcgacgttgccgtaggcgaccttggcgccctcgacattggcctggaagtcgtagaggtcggtgtgggaaaaggtctcctcctcaccgacaatcttggagctggcgacctcctccaggaggctggaggcgccgttggcgacgtcctcgagcccgagctcgaacttcttcccgctggcgccggtgatgtttccgtagacgaggtcgtagagcgacttggtgtcggcgttgagctggtcggcgaccttcttgcgggcggcgtcgtcggcgaacttgaaggggctggaggagtcctgggcccacaggtcggcctcgatgcggtgccatccggtccatccggcgaggacgtccttgtccgtgacggccttgccggcgccggaggcgaggtcctggacgcgggtgtccagggcggcgtcgaggtcgccggcctccttgaggccgaaggactcggcggtgggctcgatgcgctcgtagtactggcgcgccagtgggtagaggctcttggcggtgtcggtctcaccggaggtgtaggcggtgacgaaaccctgagtggcggtgaggagctggccggcctggtcgcgcacgtaggcggtgtagttggtgacggcggcctcgcgcgccttggcctcgtcggcgctgatgtcgacggcggcgcccttggtgatcttcagctcggtgacgcccttgagctcgccgaccatgttgggcttgcaggcggcgtagtaggtgccctccttgagggaggtggtgagcttcgtggtggtgccggggccgatgttctcctgctcggagacgatctggagcttgtcctcggtgaggatctccagctcgttggccactgagccggagttggtgatggtgaaggtgaccacgcccgaggggaaggaggtggaggagagcttgcaggcgtcgtcggtgagggtcaccgtgatctcctgggccgccccggagccggaggcaccgcccttggcgttcttggggttgtcggcgcaggcggccaggcccaggcccacggcggccagggggagcagggtgagtacgttgcgtcgcttgatggtgggcatggtctttccttgatgaggagtggcgtggacaggggtggggagagtggtcgggggtggtcaggaggtcgcaacgacgtcggcgggctcggcagagtcctcgatgctcgcggcggccggggcggcctcgaccgcacgtccgggtgagggccatcggcccgcgatctggagggtgaggaggaccagggtcgggacgatgtagacccaccagcccacgacctgcaggacagtgggctggaggttgaactggaacatggcctggagcagcacgtagagccagtggaagggcgaggcgccgtcgggcaggtagagggacaggtcccaggcgtggctcatgatgcccggcaggaggccggcctcctggaggtccccgaagccgtaggcgacgatgccggcggcgacgatgacgaggaagtagccggtcacggcgaagaagacgcgcaggttgatgcgcaccgcgccctggtagatgaggacgcccagcacaatggcgatggccagtcccgcgatgacgcccactgtcgcctgcacggtagaggtctcgatgctggagcgcacagtggcccagacgaacagggcggtctccactccctcgcgcccgacggcgacgacggcgatccagacgacgccccagccggagctacctgcggagagagacttggacagtgatccctccagctcgcccttgagctcacgggcgttcttccccatccagaagatcatccaggtcaccatgccgacggcgacgaaggacagggtgccgccgaggatctcctgggcctggaaggtgagggtcttggggccccaggtcatgatggcgccggcgaccagcgggatcagcgccgccagcccgacccccagccacagcttgggcagggcatcgcggcggtcggccttgacgaggtaggcgacgatgatgctgacaacgagcgccgcctccagaccctccctcagggcgatgagcaggttggcgagaaacactcgacctccaagtcacgaatcaatctcaggtcacgatggtcgaggtaagcctagccttagatgatctcgctaccaaagcgtcacgtatatcgcgttcgtgtgggatgaagcccagtttcgctggtcacaccggcccgcaccgtcccggggcgcttgcccggtcggggacgcctggcgacgagtactgcacgagggtcgggggctactggaggagggtcgggtgtactccgcggggtgcgggcgttcgtgcagtatgtacaacccctggccagtgcctcccgaccctcgtggagtaggccagctcgaagaggctcaggccggtaccggaccaacgacgccgcggcgctcctcggtctggcaagcatgcgctcctggatggcgccggaggggacggcgggggcgggtcaggtcgttcaggtggcgcaagagcccgtcgtggcccagctaccacccgcgctgcgggagccgccgaccccatcgaggacttactttcgccaccaggactgcgttctcccccatatgactgcggggagaccccagtagcctggaggacaacgcagtcctcgatcggaaagtaagtcccgggcgcgaaccgcagccaccgccccggcccacccgagccgcctacgggcctgcttactgcacgcgggcgggggcgaggagcgccgtccatgtcgcctcagcctcgcccccacccatgagtcgagccgctcgtgcagcctcagctcgtcgagtcctcgctctcgccagtgcccgccgcgtcatccgagcttccgacggcatcgctaccgccgacggcgtcaccggtccgccccgtggccacggagcccccgccggtcgccccggcgccgacctccacctcggcccgcgcgtcggcctcctccttgagccgggtgttgaccttctcgacgtcgagccgcatgagcaggaagaggatgagcgcgttggccgcgagcggcaaccacacgtacatgacgtagatcatctggatggcggactccggctgga

SEQ ID NO: 3746 - DNA, 18767 bp, synthetic construct
  misc_feature 1..18767: note = Synthetic
  source 1..18767: mol_type = other DNA
atctcggaaaggcggtcagcaagaagatgatgctggttggcgcgctcttcggcgatcatcccttcaacgacgactcggaagcggtcacgatcgccacgacgctcagcttcaaccaagtcgagaagcaggtctccgcgtgccactagtgtgctcccaacgatcaggtcccaggaggcggctcacgccgcctccgactcaagggtaacggcagataccgacttctatttccatctggacgttgacactccgcacgctgctcccgcctcagaccaccaggcctccatcctcagccggcgctcctcggctgccccaggccacccaccacgcgccacacaatgaaatcgacgacgcccccgagcgcaccccgtcgtaggactgggcgggctcgggggcgtatcccctgtgagaggtgaggactaccgcccgtctcaggcgcggcggcggctcaccagcagggcgcctcccatcacgacgaggatggcgaaagccagcggcaggccgaccttgacaccggtgctggccagcgggcccccggagggaacactgggcactccggacgccgagccgggcaccggcgggtcgctgggcccgacctgcggaggctggctcggcgaggacgggtcaccgggagtagcgggatcgctcggattcggcgacgcggacgtactcggcgtcgggtcctgcgagggggactcgctcgggtccagggtctcactgggcgacggagactcgctcgccgacggagacggcgaggccgactcgctgggcgacgcggacagcgtcggcgacggcgactcactgggctccggtgtcgcggtctcgctgggagtcggcgaggcgctcggcgtcggctcgggggactcgctcggtgtgggagtcggcgaggtgctcggcgtcggctcaggagtgtaggtattcgtgaaggtcacgagcaccgcctgctccttctctctcatggtcaccgtctgggcggcgggcacctccagggtgtatccctggaccacggcggactgagcgtcctcctcgatggtgcacgtggtgcccacgggcagctcgggtccggagaccaccgatccgtcggccttgaccttcacagtgcccctcacgttgttgtcgcaggtgtaggagaaggtgaactcattgtccaccgactcgagaccggtaatggccttggtcaccgagaaggtacccatgtcgcgggcgtaggtgttggtcatcgtcaccgcggctgtctggtccttgatgatctccacggtctgcgcggccggggcggtcagcgtgtatccgttctgaccggccttggcgctgtcctcggtgacggtgcaggtcgaacccgccttgatcttcttggacttctccgaggtcgcggctcccgtcaccgtcagcgacccctcggtgccgtcggtgcaggtgtaggcgaactcgaaggtggacttgctgaagtcgccgtcgccggccaggaccttggtgaccgtgaagtcaccctcctccgcaggggcggggtcggcggagttgcgaagtgtcacggccgtggacttctggtcctcgatggtcaggctgttggtgatctggcccgccaccgtgaaggtgtggcgcccccaggcgacgccagcgggagtgctcgaggccgacgtcgtgtcctcattgagggacagaaccgtccccgccgggaaggtgccgttgtacacggccttctcccccgcggtgactgtcatggacgtgtcaccgccggtgcggtccgcgcggacggtccccggagcgttccaccccgggtaggtgtccacggtagcgccgccgggcagggcataggtgatctggacctcgaaggtggtgccggccggcaccttaccagtctcggatccggtgaggagcttggtgatgtccagcccgccgaatcccggttccatggtgacgttgatggtgaaggacctggagtagtagaccgagtaggagtgctccagatcggtccccaccgcggaggccttgttcgtgtactccacaccggcctggacgacaccgtcggccgtggtgggggtcgaagcgtagtagatgtggtagttggtctgcggcgcgaagggaccggtcaccttgagggtggcggtgttgccctggacctcgacgtcgaggtcgaagtctccctggctggtgtcctggtcggtgccgctggcgtccgtgacctggccgtaaagcttgtcccggccctgggcagtgccgatgttcagcttccactcgctcttggtcgggacataggcctgtccgggaccgagctggtcggtgaaggtgatggtcgatcgggtcttcccgtcaaccgtcagagagccgccgttcctctcaagggccgccttgacctggtcaggtccgaaagtcagctcccagtccaccgtcttagaggtgctggtgacgtcgaaggcccactttctcagcgactgcggcgtgtagtcggggccgacgttctcagagatcttgccgccgggcacaggcacctcggtctgcctaccgttggcattgatcgtcacgttggccgcatcagtggtcgcagcagccaccaccagtgccgaaccgtcgccccgcagaccggtgaagccctgagcaacgatggtgtcaaggtcggcgttgaaggtgcaggtaatggtgcggtcgtccatcacgcactcaccgatcgtgtgttcctccccttggtggatgaccttcatcggctcggacaggcgctcccggttgcggaactgctcgggaagcccgatctggaaggagtccccactcttggcattggcgttgcgggcgtcccaggagaacttcagcttgaggatgtcatcgaccttgaccgaggtgttgtccggctcctcggcaccgttggcgttggagaccaccagggacaggccggagacggtgatcgacgggttgttggcggctcgggcctgcatggacaggacagtcaggagcgtggcgacgagcgcagcaagtgcgacgagcgcacccaccgcacgcgcaggagtgccaagcgctctgggaatggggatggtggacacagtcgacccttcgagaaaaatacgaggttaatctgagagttctctgaatctagagatcaccttgacagacaatccatgatgcgcgtctcatactcggtcacgaaactgcggccattagatctccaccccgttaaggcgcatcaggacgctcggaaccccgagtcgtcaccgagagcttcaccccggcacctacctcggttcgacggctcgacgacaaacgcgaccgcccataaccagcctgagcggggccgactgcgagccggcggcctcccacgcccatttccctgcgtcgccgtgcccgctccccggcgcccggccatcaaggcatcacaatagatacggatgccgcatgtgagcctgcgccacttagttgactgagatcatacttctatgagccccgcggtgcgggtggacgagatcgccacccccgtcacggccagggacagaaccgtgaacaggccataacgcacaccccgccaatcaccaggatcggtcacatccctgagaacccggaccaggcgccagcgcgacaaggcgatcacgacggccttgacctcagaaaatgtccgaatctgccacaaaggcccggatctcgtcggagggcgcacaatgaatcgttgatatttcgggcttttttccgtcgctgattccgccttgcagtgcctttgtggcagatttggtcacgtcctcgcccgaatgagtcccgtgatgtctcaggagtcccacgcgccccaccatgagggcacgacctcctctcgcgctctgctctccgctgccgcgtaccacgagcaaccgcggagagtccggcaggcggaaggcgaagagcccatggacgagggcgagcagcccttcggcgatgcggaccggtacgccggaggccgccgtcgcctcaccgccgggcggcgtccagggcccgctgcgcggcctcggggtccgtcgtctccctcgtgttctcgtctgcggattccttggcgaccgcaagccatccgtctcggcagtcgtactccaggcgcgcagcgtcattgccatactgctggccagtgctcaactccgttccagtactgacgtcgcatcgatcaatagccgccaggagcggcggagccaccgcctcgatgtccgagctgctcctggcgtctgagacgcggaaagagcgccagatgccggagtccgaggctctcagctgcacgtcggtgaaaccggcgtccttcgcggcagtcacccagcctgcgatatccgtctcaatcagactccgggcccccggttcggtctcaatccgcacctgaacgcgatccacccaggcggtctgggagtacatgatggcatcgcccgccggattctgctcctggccgggccgggccgccgagaggccggcggcctcggcctcgccccagtcgacctcgactgccttcggagagttcctcatcgccacgttggcgcgctcagcgccggcctgtaccgcggcgagcgccgtcgtgagcccggttcgaagcgtgccggtggaggtaccgctgaggccgacctccacacccatccgttttcctccgacagtccacgcaaggctcaggcggcctttatcccccatactcacgtccgcctgctcgacggtcgcctcgacaccatcgaagatcgtgaggacctcctccagccccgtgtcgtcgggcaacgtcgcactgagctcgtagtcgcccgagccggcgggattctctctcacactagggccgatgagcagtgtctgctcctgccccgcctgctcaagagccgcctgcaagcgtccggcagcagcgatgtcctcgggatcgggatcggtgcgcccgctgaaccaggcgtcgaccagggtgagggtcgcccccgagccgacggcgaagccgatgacgaccccgaggacgacgaggaggatggagcgtgcacgcggtcggaccatgacccgactctaggatcgggcgccctgcggcgggggaaggaatgggatcggccccttgcggggaggggagcgggcaggcgcagaccctcccgccccccgagccggatccgtcgctaccctggcgccatgacgtcctcgcagacccgcaccgtcactcgccaccagatcttccagaccagtctcatcgcatccctggcccaaggcgtctacgaggacgagatgaccctggccgagctgctcgggcacggctccttcgggatcggcaccttcaacgggctcgacggggagatggtgatcctgggcggcacctgctatcggttgcgcggcgacgggtcagtgagcgtgcccgacctgagcgagcgcaccccgtacgccgtcgtcaccaatttcgtgcccggaatccgccaggaggtgggcggggccggcggggcgctcagccgcagggagttctccgaggtcatcgacgccctcgtgccgagctcgaactacatgtacgcgctgcgggtcacggggcatttcgcgtgggcgagcgcgcgcaccgtggtcaagcaggagaggccctaccggcccatggtcgaggccaccgacggcgaggagatcgtgcggcgcgaggacttcgaggggacggtggccggcttccgcacgccgctgtacgagcaggggatctcggtggccggctgccacgcccacgtcatcgacgacgagcgcacctggggcggccacctcgtggacttcgagctgaccaggggcgttgtggagctctgcctcggcaccgacttccggttgaggctgcccctgaccgaggagttcggggctgccgacctgagcgaggacatgagcgaggagatccgccgggtcgagcaccactgagtcgagcaccactgagcgcgcgagcacggcaccactgagcccctgagccgccgagccgagccgcgcgttcctggacgactcgggtcacggcgcccctgggccgccggggcgccgagccaatgagcccctgggctgggccccgcgtccggttccgtcggtcaccgcccccaggaccaatggacggcgcctcccgccgcgggaacgggcttgccgagcgcctgccagccgggaaccgtcgtcgtggtgcgctcacccgcctccactcggtcccggacccgccaccgccccggcagcccgaccgcggcccgggcgcggtgcgcactcgccgccaggagggcgaacctgatcatgctgatgagccatgtcagcgccggcagggccaggacgaacggcgcgagcgtttcggtcgcggcgggcacggcgcccgatggggcgagcagccaccacagggcggaggtctcccccatgacgacgaagaaggacgccggcctggccttcccgtcgatatcccaccaggtcgcgatcgcgcctccaccgctctcaccgcccggcccgtcgacccccggccaggcccaggggccgcgagcctcccgcgcccaggccaggagagagcgccgcacccgggcgtcgaggatgacgtcccgcaggaaggagaccactccgctgaccaccatgagccctcccagtgccgccacgaggacgccgagaatccagccccgcccggcaccgagccggacaatggccaggacgagcgccagcaggccgacatgaagggggagccacccgccccgggagtcgcggcgacggttcgccgccaggcgactgagccgctcgaccgccaccccgcactcccacggcgcggcgactcccgacgacatggcggacacgtccgaggcccacgcccccggcccctccacgagggcctcgtcggggatccccagcacggccgccgagccccgccccgtcccctccgcgtggacggacgtcgatgaggcctcatcgacgacgacgtcgccgttgatgctgatgcgcgccaggccgtcgctcaggagagtctcctccagccgccggacctcgcgcccccatcgaaggcacccgaccacggggagcgcccagacccccagcccgaccgcgcacagggcgccgagctcgatctcccccagcccccaggaccgcagggtctcgatgcgcagggaggcgacggagcggctcaggctcgcgggagtctcccccgccgtccagcccacggcgaggacgccgacgaccaggaggatgagcacccacagccccagcccccgccgagtcatacgagccggtcggcgtcggaggttccatcgaccgtcacgcatccacgccggctccgcccagccggacgccgcgtgaaggcggcaggaggcggcccagtcccgcagcgctcgcaggtggaactgctcggtggtggcatcggcgaccacgctgttcacctcggtgccgatcatggcgacgcccaggagcgtagccccggcgctgaggatcacaggcgtgatggtgcgccaggcgaggacgtcgccggtggcccagggtcgagcaccgaggtagagcaggaggacgaatgtgagcagataaccggcctggaagacgcggtggccgtgatcggtcacagcgcgcgccgaggccagcaggtccgccagggcccgtctggcccgcgccacgtccctccgggggcccactgcgggatccgccccgaggccgcccggacgcgactccgcccacggggctccgggaccggcgacgtcgtcggcggcctgccggaggacggccatctgagcgtccaggaccgtgacctcgacgagcctggactgatcggggagcgagttgatgccggcgagtcgggcgcacaccgtgccgcggcgggggaccaccgcctcctcctccggcagcgcgagggggtcgtcggtgaagcgctgggcgagggtccaggcgccggtttccagtcccgtcagcccgacggcggaccgtgcgcgcccgagccgagccgacagcacgaggttgtcgatcaggccgccgagaacaacgccgaggacgagcgccgtccccgccagacgagtggtctcctggaagggggccggggcgtaggcgcgcgcgagggtcgtcacgatcgggggagccagggccgcccagatgaggccgggcagccggcggggcagcgtgatccgcagccactggccgacggcgggcagggcgccggggcggacgacgtcgtcggaccccggcgcggcggctccgcccggggaggcgcccggccccccgtcgtgcccccaggaccgtcgcggcaccggggcgctgcgggcccaggcgatggcggctcgcacgtgggcgtggctggatacccactgcatgcggctgacgtagagggcgatgacggcggcggggaccaggacggcgagaaggggaagggaaccggtggccgggtcgtcgtccaccacggccgagacctggatgcccgtgacgagaaggatcagcggcacgagcacctctcgtacgaacggtgtggcggaaccgcggcggaggaaggcggtcgagagcatctcgacggcggcctcggcccgccagggggcgcgctcggcccgctgggtcggggtggggccgtcgaggtagggagtgctcagagcggttcccctggggtggatcgaaccattgccgttggtcgcgacggtgggccggtcggcatggacgcgagggatatcgccggtagcggggttggtcatggcctcacgttactgttccggcacgattcgcgatccagtcgccgcccggatccgagcgcaggcgaccggggagggcagacctgcccctgcgatattcgcagacgagtatcgagtatgttggatgaacaatacgagatctgcgggcgcgagtaccgcgtcgctccgtcctgatcgccgcctccgccggagccgcggccctcggagtcaccgcctgctccaacggctcctcgccgagcagcggcggcggaaccgtgcaggacgacggcgccaccgccactgcctcctccaattccgcgtcatccgctcccgcggccggccaagcagatgcccccaccctggagagcctcaccgcggaagtgggaggcgcattcactcaggagacgtaccacgactcggacaccagcaaggaactcgccttcaacatattccttcccgaggggtactccagcaccggctcctatcccctggtgcactccgatgccagctgcgtgtcggaggatcccaccactttgctgtcgcagtacggcgccctcatccaggcgagcagcgtcacgcaggcgagcgaatccgtgcatcgtcgtcgtgccctcctacaccgagacggtcctggacgaccacgacgggtacaccacgaccgactggctcgacgtcaccgcccgcttcatcccctggctccagatcacgtacctcgtggcccccgctcgcgtctacggcaccgggcagtccatgggctgcatgatccatctcgtgctggcgggacggcagcggctcccccacgcaccgcccaggcccaggctgcatgatccatctcgtgctggcgggacggcagccggagctgttcaccgtcctcatgctcgtcgacgggcagtgggacaccgccgagctccccggtcttgaaagctccacattcgtctaccacgtcgcgggcgaggacgacagggctccgaccggccagaccgaggtcaagaacatgctcgcccaagcgggcgccgacgaggagtgggacgccacggctgatccttccgtcctccgccggcagaagcaggccctgctcgacaagggggagccgcggaacttctccaccttcgccgcgggcacggtgctccgggccgatccgaacaagcagatggagcacatggcctccttcgagcccgcctacaagctcacgggcctgcgcacctggctgctgtcccggcgcagggagtgagcggattccaagacacgcgggcgagggccgagcggttcgaggctctttcggccatcaacagaggcgcctcgtgctatacttgcccgtgactgattcccagtaagcctcgccatgtttgcgaggttgaatgctccgccggttcgccggtctgactgcccgatctcgtagcgagatcgggcagttttctcgctatggtctcagagtctcctgactgtggtatatatctctcatgcctactcgccgcattcgtgcggggatcgacgtcggcacccactccgtcgggctcgcaacgctacgggtcgacgaccaggggacccccatcgaactcctctcagcactgtccctcatccacgactccggaatcggagaggacgggaagaaaacagcgtctactcgcaaggagatctcaggtgtcgcccgacgcgcccggcgcctgctgcggcgtcggcgcaagcggctccagcagctcgacagggtgctgctcgacctggggttcccgatccccgaaccgggcgagttcctcgacctgggcggacagaccgacccgtacctggtgtggaaggtgcgtgctcgactagttgaggagacgctgcccgaggagctgcgcgggtcggccatctccatggctgtacgccacattgcgcggcaccgcgggtggcgcaacccgtactcgaaggtcgaatcgcttctgtcccccgcagaggactcccccttcatggaggcgttgcgcgaacgcatcatgacgggcacgggtgtccttctcgacgacgacatcacccccggtcaggcgatggcccaggtggcgctgacgcagcgcatcaccatgcgcggccccgacggtattctcggcaagctgcatcagagcgacaacgccaacgagatccggaagatctgcgcccgccagggcatctctcctgatgtctgcaaacaactgctactggcggttttcaaggccgagtctccacgtggctcagccgtctcccgcgtggctcccgaccctcttcccggtcggggcgccttccgacgcgcgccgaagtgcgacccggagttccagcgcttccggatcatctccatcgctgccaatctccgtatcagcgagactggaggcaaggacaggccactgactgcggacgagcgccgtcgagtggtcaccttccttctggaagagccgcgagatgatctgagctgggtcgatgtggccgagaagcttggaatctcccgtcagactctgcggggtactgcggcactcacggtggatggcgaacgggcagccgcacagcctcccgtcgatgtcaccgaccagatcatgcgcaagaccaagatcaggtcgctgcggacatggtggaaacaggccgacgccgaacggcgcggcgccatgactcgctatctctacgagggacttgaggactcggagtgcgccgaggtcattgctgacctgcctgaggaggatcaggccaaactcgattctcttcatctcccagctggccgcgcggcatactcgcaggagtcgttggccgccctgagcgaccatatgctggcgacgaccgatgatcttcacgaggcgcgcaagcaggtcttcgatgtggacgactcatggtctcctccggcggaacctgtaggggctccggttggcaacccgtcagtcgaccggactctcaaggttgtcgcccggtacctcgctgcagtcgagaatgtgtggggcgcacctgaggcgattcaggtggagcacgttcgagacgggttcgccagcgagcgtgcggcacgggaacgagaccgggcgaacaaccaccgctaccaggtgaatcaacgcgcagtgaaggagatccagcagtccttcggtgttgagggacatgtgcgatcaggcgacgtcatgcgttatcacgccatctcactgcaggactgcgtctgtctgtactgcggtgacacgatcagctaccacacctcccaactggatcacatcgtccctcaggccggaacagggtcgaacaatcatcgtgagaatcttgtagccgtctgcgagcgctgcaacaggtcgaagtcgaacaccccgttcgcggtgtgggcggagacctgcgggatccatggtgtcggggtcgaggaggccattgaccgcgtacgcgcctggcgcaaccgcccggtaggaatgtcaccacgcgacctgggccgcctcaagaaggaggtcatctctcgccttcgccgtactcaagaggatccggagatcgatgcgcgcagcatggagtctgtggcatggatggccaacgagctccgccaccgcattgccgccgcctaccccgacaccgacgtcatggtctaccgcggcacggtcaccgctgccgcccgcaaggctgccggcatcgactcccggatcaacctgatcggcgagaaaggacacaaggaccgcatcgaccgccggcaccacgccgtcgacgccagcgtcgtcgccctcatggagcggggtgtagccaagaccctggcggaacggtcgaatctccgctgggcacagcgcttgaccggccaggaggagacctggaagcagtacacgggcctgaccgtaggagcgcgagagcactttgaaacgtggcacggccacatgcttcgcctcacggagctgttcaacgagcatctagccgacgatgaggtgcacgtcgtcgagaaccttcgcctgcggctcggtagcggtaacgctcacgatgacacgatccgaaagtacgccactccccggctgggcgatagcttgacggtcaaccagatcgaccgggcctgctcccccgcattatggtgtgcgctcacccgggaggcggacttcgatgagaagaacggtctgccagcgagcgaagatcgttttattagagttcacgggcaagagctgacctccaacgatcatatccagatcttcaccaagaagcccggcaatgacaccaaggagaagcctttcggagcaatcgcagtgcgtggaggatacgcggagatcgggtcgacaattcaccacgcccgcatttaccgcatcgaggggaagaaacctgcctacgcgatgctccgcgtcttcactcacgacctgcttagccagcgacatagcgatctcttctcggccgtggttccacctcagtccatcagcatgaggtgcgcagagccaaaactccggcaagccatcgtgctgggaagcgccacctatctgggatggatagtcgtcggagacgaggtgaatattatcgtcgatccattcaagaagaataccgtcggagagtttctcaaagagtatccaaataccattcgttggcgcgtgtgcggctacgacaccaacagcaaattaacactaaaaccaaggattcttgcagctgaaggattgcagaatccaagtgatgccgtgaaagaaatcgtggaaggtaaaggatggcgtgtcgccattaacacactagccagcacaaaacccacgattgttcgccgagatgctctgggacgccctcgccgcaccagcagatcgggcctcccgacgtcgtggaccatcgagtgagggacactggtggatacggcgtggcgtatcatcgactgctcgtcgttggagggacgcatcacctcggttcgaggggcgatctgcgtccatcaggacgacggcggtgagcgccggatcccaaccgccgatgtggcggtagttctcatgggaccccatgtgagcttctcaacggctgtcattcatcgtctgctgggagcggacatcgtcgtactgttctgcgattggcggggcgtgcctgaaggcgctgcgtacccatggcacgagcacggacgtgttggcgccagacaacgagcgcagtcgcaactctcggagccgcggaggaagaacgcgtggggccggctggtgaaggccaaggtgctggggcaggcaaccgtcctccatcaaagggaccgtcttgcctccaatcgactcaaggacatggcccgttcagtacgctccggcgatccggagaatatcgaggcccacgcggcccgcctgtactggtctcgattgttcgctaccgagggtgatttcgtccgtcgtccggaagcggaggaccaccgcaatagttgcttgaactatggatacgccgtgctgcgtgcccatgggatcagggcggtggtgggcgcggggctcagcccgacgctcggcctgttccatcatgggcgcagcaacatgttcaatctggtggacgacatcattgagccgtttcgtcccgcggtggatgccaccgtgctgtgcctggatcccgaggcaagcccggccgagcaacaggtcaaacagctccttgtcgctgcggtgcaacagccgttccgcagcgacggagcaacactccccacggtcttggaagagttggcgcagcacctgggtcagtactgcgagggagatcgggcgcgcttggacgtcccgtcctggaccgggccgaggcgcgagtcctgatggcggacgatccggtgtggtgcgtggtcatgttcgatctgccggtagcaaccaagaggcaacggaaggaggcgactcgcttccgtcatctcctcttggatgaggagttctggatggcgcagtacagtgtctacgtccgctactccccgacggtcgccggggagccccgcagagcgagcacgattcggaacaacctgccgcgcggcggcgaggtgaggctcctctatgtcaccgaccgcgagtggtctcacgcactctgtttccgcaacgaagagcccgtcgaggccgagccggagccccagcagctcatgatcttctgacctccgacagggagtttgcgctggaaagacgcccctgacagacgtctctgaagtctatcagggggtctggtgactgattcccagcacggcctccatgaggattcgcccatcccgaagtctatcagggggtctggtgactgattcccagccgcatgagaggaggagtagcgccttcacgaagtctatcagggggtctggtgactgattcccagctcagccacagacttcatcgcaccagtcagaagtctatcagggggtctggtgactgattcccagcccccggggccccccggcgcccgggggggggaggctatcagggggtctggtgactgattcccagcccccgggccctccggtgacccggagggcgaagtctatcagggggtctggtgactgattcccagcagatcaacaccttcggcgcgaagaagatgaagtctatcagggggtctggtgactgattcccagctcggagttggacagtgccgggcgcctcagaagtctatcagggggtctggtgactgattcccagctcctggataaccgatgcgtgctcggggtgaagtctatcagggggtctggtgactgattcccagcggggggtattccctgggatagcgggcgagaagtctatcagggggtctggtgaccgattcccagcaggtaccagagtcaaggcccccacaccgcacaggggacggacgccatctgccccgtcggcgcccgaggtgcgtcagtgatgcacgttccatgaacctacggcgttacggtaacgaggtgaggacaatggtacgtctcgatcccgaggtcgcggctgcggcggagcacctgcgccggaagcgccgcatcggtttgggtaaggccgtcaacgaactcgcacgcgcaggctggcccggaagcagacgcccacgcacttccagcagcggacaacggacgtcgggctgaaggtcgatgtcaccgatatcgccagcgcgctcgaactgctggatcagtccgatgccgagggcacccggtggtccttgacgccaacgtcctgcgctacgccgtcgacagcacatcccacttccacgccaccgcacgggcgtggctggagaacgcgatggacggctaggaaaacgggccgcgtgcaggcgagcggagacccttgcccgcacatgcaccgcacggagaacacgggtggggcggcgacgccccacctcccgctactcccctggcccgccccacccgcgagtcatccgagcagtctcaggtcaggccgctaagccgccgtctcacccccacccgtgagtcactcacagtcgttcacgctgcgtcaacctgccgagccgtcgccgtcctcggtgccggccgcggcggccaggccctcgacgccgtcatcggcctccccgtcggctcgggaagccccgccggctccgccagacgcgccagcctcgccgaccccgccagacgcgtcgctgccggccccgtccgccttgaggcgggcgtttgcccgctccacgtcgaggcgcgtgaggaggaagaggatgagcgcgttggcgatgagcgggaaccacacgtacatgacgtagagcatctggatcgccgagctcggctgcacatccaggtgcccgtcgtaatggctggccgccaggagccacccggacacggcggtgccgagcccgccgccgaccttcacgcccagcgaggtgcaggagaacatgagcccgtcgatgcgcttgcccgtgcgcagccaggtgtgctccgaggcctcggcgatcatggcgttgagcgtcccctgcaacgggctcatccccagggccgcgatcccggagagcaccagcatgaggggaatgttgtggaggtaggccgccacgagcaccccgagccgcccgagggtcgcgatgacgtagccgccgatattgacccggtacatctccccgaacctgctcacgaccagcggcgtcagcagcagaccgacgatgagcgggacattgatggcccaggcgaaggtccccagcagcctggcgtcccccaggatgtaggtcatgaagtagatgcccatgttgagcatggccgtgaagatctgagtcagcaggaagacgacgaggatgatgaggtagtacttgttcgacaggagcatcttggccgactcgaccacggtcagcgtgtcgtccttcggctcgtcctcgccctccagctcctccggcgacagctccttgaccgagaacacggacagggtgttgaccgccaggccgagcagcgcgtagatgatcgccatggcccgccagcccgcggcgccaccgccgaacatggccaccccgcccacggtgatgctctggatgagcaggttcgtcccgaaggcgaacatgaagcggatggagcccatctgcacgcgctcggccccgttgcgggtgacgagcgcggtcagcgaggagtaggcgatgttgttggccgtgtagaacacggcgttgagcagcgtgtaggcgatgaagaaccaggcgtacttggccgtgtcccccaggctcgtgggaatcgcgaagatcgcgatgatcatggcggcgcagcccacgaatccccacagcatccacggtcgcgccttgcccatccgggtgcgcgtgcggtccagcagcgccccgaagatgatgtcggagaagccgtcgcagaacctggagaccatcatgagcgtacccacgacgcccgcgttgagcccggcggtgtccgtcaggtagatcatgacgaaggcggacaggagcacgtagacgacgttgcctgcgacgtcgcccgagccgtagcccaccttgttgtaccacctcaggtacgtgcgctcatcggtcgtcccgggggcgtcccccacggccgctccggatcccccggccgttcgcccggtcgcccctccggcgctcccatcgctcatgacatcacctcatcgtgcgtgctgttgctattcatggtgcggagctggaagcagagccccagctccaggtcgcgggcgctcacctggtagcgctcagccaggctcgggccgcagctgttcgagccgataccggccatggcggcgtccaggcacaggaccgtcgagccgcagcgacgcagctcggtgctgtgacgccgtcgggccagctcctcctgcgtgtactgcgagacgttgaaggagaagggccgccgccccacgcaggtcaggcccaggcctccgccggtgacggtcacgtactcgcaatcggcccggctcccgttctcctggggccggatgcagtcctcgtggaaggcctcgacgtcgtcggcgaactccccgtgccagctggcacggcgcttgtccgcatagctctccaacggccccagcccgtaatacgagacctggcgcatcgcctccggcaggaagagtcgcaggcccagccgcggcagggatgggaatccctcggcccggcggacggccagtctcaggtccacctccccgtcgtcccagatggtccaagccgtctccccgcgcaggacgggctggatgctgggtgccaccatggccacctcggcgcggacggtgacgcatcccgacccctcatcgacctccaccccgtaggcccgcgccgcggcctggtggtagtgggcgcgctcccactccaggcgcacgttgcggtcgttgtccgtgggggcccgccagatgttgagctccatcgggcggtccaggagctcctcgccgtccacggccatcccggagggcatcccggtgcgcgcatcgacgacgcagcgcagcccaccggcgacgacctcgatccgcgcgtcctcgcacgccgtcgcgatcggggccccggtacccgcacggtccgcgagcgcccggacgcgccggtggcgcccgtcggcgttgcgaacggggacctcgtcgaagcccaggacgtgcccgacgccgagcagcggctggtccgcggcgagccggtagaccacccgcagatggcatcgaccggcgtccggcacccgcggagcgcaggggaccgcgacctgcgagtgcggcggaacgggccgctccatcgccagcttcccgcgctccacgatgtcaccgtcgcagcgcagctcgtaggagatgcggatgcagcgggccaggtcggtgtggtcgaggtcgttgcgaatggtgatgagcccggcgtcctggtcgtagtccaccactcgggcggggcgctggacgttcttgagctcggccagcccggtgtgggggatgcgatcgggcgagacgaggccatcgacgcagaagttgccgtcgtggatcgcctcgccgtggt

SEQ ID NO: 3747 - DNA, 17788 bp, synthetic construct
  source 1..17788: mol_type = other DNA
  misc_feature 1..17788: note = Synthetic
ccccatcgaggacgtacttttgcaacgaggactgcgttctcccccagatggcgacggggagatcccagtggcctggaggaaagcgcagtcctcgatcggaaagtacgtcccgggcgagaaccgcagccaccactgcggcccgcccgagccgcctcaccccgtcctcagctgaagagcgaggcggccaccatggtgtcgccctccttgatgcccggggggatcgcgaacagcgccgaggcctcgtgcttgaggtactcctggagggcgtcggtcttggtcatgcggtccaggatcgggtagaagttcgtgcgcgggtcacgcacgaaggcgatgaagaacaggccggtctgcagctgccccagggagtcggagccgtcggtgtagttgtagccgcggcgcagcatccggcgcccctggttctgctccggtgagacgacggcgatatgcgcgtcggccggcacgagcgtctcgcccttgtcgtccttggccttgtagtccacggccgtgaactcctcggaggccttcgtggggttggcgatgctcagcggcgccccgtagcgcttgtcgcgccccatggtctgttcctgctcgatgagccgcagccggtcccagatctcggcgagcatgcggatgcgccgggccacgtagtaggtgccgcccgtcatccactcggctgcggcgtcgtcgcccttctggacccacaggtgcttgttgagctggtcggaggagtcctcggccttgatgttgttggtgccgtccttgaagccgaagaggttgcgcggcgtctcctggtccacggaggtcgacgacgtgcgcccgtagccgacctggctccaccgcagtgtggcggtcccgaaggcgatgcgggtgaggttgcggatcgcgtggacgcacacctgggcgtcgttggagcaggcctggacgagcaggtcgccgtcggactgggcggcgtggagctggtcgccggcgaaggagggcatgccctccttgaggacggcgggcatcttggcggccaggccgaagcggtccttgccgtcggcgtcgacgaacaggcccttacccacgccgaaggtgatggtcaggccgttgggcttgtagccccaggcctcgccggtgtccttgggcggcagctgcttgttggagctgggctggccgccgatgagctcaccggcggtcatctgctcggcggccacggcccattcggacaggagggttttcaggtcctcgacgtcggtggcggagacgtcgaaggccgcggtgaacatgttgtcctgggcgggggtggtgatccccgcctggtggtcaccccggaaggggtaggtcgtgaggatggcctcctcggggcggcgggaggcctcccaggcgcggccgccggccacaccggccaggcccgcgagcgcggcacccaggcccgcaccggtgaacatggcacggcggctagtgcccttggcactaggcttcccggcctgtccgggcttccccgtcgcatccggcttctccggctggtcagccgcgtcggatgcgctcacctcatcgggctgctccgccgcgtcgggggccgaggcgctgttacccgggccctccgacgtcggggcctgcgactcctgctgcgcctgcgcggtctcgtcctggggctcatccagggtctcgtcctgggccgcgtcgtcggcgaccggggaggtgtccgactcgtgggccggcttgccactcactgctgtctccttccggggtgtccgggttgtcggggtgccgccgcctcagaggatggttccggcaaccttggacagcgactcgctcagggcgttgacggcgtcggagaacttgcgctgcttgtcggtgtaggcgttcttgtcgggggtctcgccggcgtccttctggaccgaggcgatggtggagtagtccacgtaggtgggctggccgttggaggcctttccggagacctcggccgcgacgagcttctcaaccgccgcgaactgggtggtgatcttctctgcgagcttggcgtccttcttcttcacgagctcctcgacgttgccgtaggcgaccttggcgccctcgacattggcctggaagtcgtagaggtcggtgtgggagaaggtctcctcctcgccgacgatcttggagctggcgacctcctcgaggaggccggaggcgccgttggcgacgtcctcgagctcgagctcgaacttcttcccgccggcgccggtgatgttcccgtagacgaggtcgtagagcgacttggtgtcggcgttgagctggtcggcgaccttcttgcgggcggcgtcgtcggcgaacttgaagggactggaggagtcctgggcccacaggtcggcctcgatgcggtgccatccggtccatccggcgaggacgtccttgtccgtgacggccttgccggcgccggaggcgaggtcctggacgcgggtgtccagggcggcgtcgaggtcgccggcctccttgaggccgaaggactcggcggtgggctcgatgcgctcgtagaactgacgcgccagcgggtagaggctcttggcggtggcggtgtcgccggaggtgtaggcggtgacgaagccctgggtggcggtgaggagctggccggtctggtcgcgcacgtaggcggtgtagttggtgacggcggcctcgcgcgccttggtctcgtcggcactgatgtcgacggcggcgcccttggtgatcttcagctcggtgacgcccttgagctcgccgaccatgttgggcttgcaggcggcgtagtaggtgccctccttgagggaggtggtgagcttcgtggtggtgccggggccgatgttctcctgctcggagacgatctggagcttgtcctcggtgaggatctccagctcgttgggggccgagccggagttggtgatggtgaaggtgaccacgcccgaggggaaggaggtggaggagagcttgcaggcgtcgtcggtgagggtcaccgtgatctcctgggacgccccggagccggaggcgccgcccttggcgttcttggggttgtcggcgcaggcggccaggcccaggcccatggcggtcagggggagcagggtgaggacattgcgtcgcttgatggtgggcatggtctttcctttgcgaggagtggcgtggacaggggcggggagggaggtcagggggtcgcgacggcgtcggcgggctcctcgacgtcggactcatcggcgctcgcggccgccggggttgccccgactgcgcgcgcgggcgaggaccatcggcccgtgatctgaagggtgaggagaaccagggtcgggacgatgtagacccaccagcccacgacctgcaggacggtgggctggaggttgaactggaacatggcctggagcagcacgtagagccagtggaagggcgaggcgccgtcgggcaggtagcgggacaggtcccaggcgtggttcgtgaagccgggaagaacattcgcctcctgcaggtcaccgacgccgtaggcgacgatgccggcggcgacgacgacgaggaagtagccggtcacggcgaagaagacgcgcaggttgatgcgcacggcgccctggtagatgaggacacccagcacgatggccaggacgaggccggtgatgacgcccgccgtcgtctgcatggtggagctctcgatgctggagcgcacggtggcccacacgaacagggcggtctccactccctcgcgcccgacggcgacgacggcgatccagacgacgccccagccggagctgcctgcggacagggacttggacagcgacccctccagctcgcccttgagctcacgggcgttcttccccatccagaagatcatccaggtcaccatgccgacggcgacgaaggacagggtgccgccgaggatctcctgggcctggaaggtgagggtcttggggccccaggtcatgatggcgccggcgaccagcgggatgagcgccgccaggccgaccccgagccacagcttgggcagggcatcgcggcggtcggccttgacgaggtaggcgacgatgatgctgacaacgagcgccgcctccaggccctccctcagggcgatgagcaggttggcgagaaacactcgacctccaagtcacgaatcagtctcaagtcacgacggtcgaggtaagcctagccttagatgttctcgtcgcccaagagcccttttatcgcgttcgtgtgggatgaatcccggtttcgccggccacaccggtccgcgcgccccggggcgccccacagtctccccggggcgttcgcccggtcgggggtcgcggccgaccagcactggttccttgcccccacatgcttccgccgcctccggcacgctcacgccgagaccctcttaagaccaggatcccgccatgatggtgctacactggctacgactgaattcctagtaagctccgccatgtttgcggagtggactgctccaccagcaagccggtctggctgcccggtctcatgctgagaccgggcagttttcttacgccagccccgtaatgcgtccgaatgtggtatgcatctcttatgtctgctcaccaccttcgcgtggggatcgacgtcggcacccattccgtcgggctcgcaacgctgcgggtcgacgagcaggggacccccatcgagctcctttcagcactgtcacacattcacgactctggggtcggcaaagaagggaaacagaaacacaaaactcgtaagaagctctccggcatcgccctccgcacccgacgcctgctgcgtaatcgacgcaagcggctccaacagctagacgaggtgctgctcgacctgggcttcccaatccccaagccagaagagttcctcgacctgagcgagccagccgacccataccgggtgtggagggtacgtgctcgactggtcgaggagcagctccctgaggaactacgcgccccggccatctccatggcggtgcgtcacattgcgcggcaccgggggtggcgtaacccgtactcgacggtcgagtcactgttgtcacccgcagaggaatccccgttcatgagggcactgcgcgagcgcatcatgacaactacgggcaacgtcctcgacgacgacatcacccccgggcaggccatggcccaggtggcactgacccacgacatcaccatgcgtggccccaagggcattctcgggaaactacatcagagcgacaacgctaatgaaatccggaaaatttgcgcccgtcagggcgtctcatccgaagtctgcaagctgctgctgcgggccgtcttcaaggcggagtctccacgtggctcggccgtctcccgcgtggctcgagacccacttcccggtcagggctccttccggcgcgcgccgaagtgcgatccggagttccagcgcttccggatcatctccatcgtggctaacctccgcatcagcgaaaccaagggagagaatcgaccgctgacagtggacgagcgccgccaggtggttgctttcctcacagaggactcgcaagccgacctggcctgggttgatgtcgccgagaaactaggcgtgcatcgcagaaacctacgaggaaccgctgcactcacagacgacggagagcgatctgcggcaaggccgcccttcgacgccacagaccgcatcatgcgtcagagcaagatccgttcactaagaacatggtggacgaagtccgatgctgagcagcggaacgccatgatttgctacctctacgagaaatctgccgactcggagtgcgccgaggtcattgccgagttgccggaggaggaccaggccaagctcgattctctccacctcccagccggccgtgcagcgtattcccgggagtcactaacggccctcagcgaccacatgctggcgacaactgacgatctgcatgaggcacgcaagcaactcttcggtgtcgatgactcatgggtccctccggcccaacctgtgggtgccccggtgggcaacccgtcagtcgaccggactctcaagatcgtcgcacggtacctctctgcggttaagagcatatggggtacgcctgaggtcattcatgtagagcatgttcgcgatggcttcaccagcgaacgcatggcagaagagcgagataaggcggacagacgtcgctacgacgataaccagaaagtgatacagaagattcaccaggactacggtaaggagggatacataagccgaggcgacatcgtgcgtcacgatgccttagagttgcaaggaagtgcctgcttgtactgcgggacgacaatcgatcgccacacatgccaactggaccacatcgttccacaggccggcccaggttcgaacaatcgccgtgggaacctcgtggcagtatgcgagcgctgcaaccgttcaaagtcaaacactccgttcgcagagtgggcgcagaactgcgggatccctgacgtcggcctgaaggaagccattggtcgagtacgaagctggcgcaaacagactcctagcacatcatcaggcgacctgacacgccttaagaaggaggttatcgcccgtcttcgacgcacccaagaggatccggagatcgatgaacgcagcttggagtccgtggcctggatggccaatgagctccaccatcgcatcgcggccgcctatcccgataccactgtcatggtctaccgaggctctatcaccgcagcggctcgcaaggcggccggcatcgactcccgcatcaacttgatcggagagaaaggacgtaaggaccgccttgaccgccgacaccacgccgtggacgcgagtgttgtagcgctcatggaaccaagcgttgccaagaccctggcagaacggtcaagtcttcgcggagaacagcgcctcagcggtcagaagcaaacttggaagcaatacacgggctcgaccgtgggggcgcgagagcacttcgagatgtggcggagccacatgcttcacctcacggagttgttcaatgagcgcctgacagcggatgacgtgtacgtcaccgaaaacattcgccttcgactatctgacggcaacgcacataccgtcgagccgtcaaagttagtctcccaccgcctcggcgatggactgacagtgcagcagatcgaccgagcctgcactcccgccctgtggtgcgcgctcactcgggagaaggacttcgacgccgagaacggccttcctgccagggaagatcgtttgatccgagtccatgggcaagagttcacatccaatgactgcattgaactgttctccaagaagcgcggcaacgaccccaaggagaagccttttgcggctatcactgtacgcggcggattcgttgaaatcgggccatcaattcatcacgtccgcatctaccgtatcgagggcaagacgccagtctacgcgatgctccgcgtcttcactcatgacctgctcagtcagcggcacggggatctcttctctgcggtcatcccaccccagtcaatcagcatgaggtgtgcgaagcctaagcttcgccaggccatcgcagaggacaacgccacctatttgggatgggtcgtggcgggtgacgagctggagatcgatgttaaatctttcaccaaggacaccattgggggtttccttgaagaccaccccaataccacacgttggcgcatatgtggatacgaaaccaacagtaaactgatattgagaccaaggatccttgcagcagaagggctagataatccaagcagcgctgtgagggagattgtcaaaggtgacggatggcgagtagaaattagtgtattatccgcagtacaccctactgttgttcgacgtgacgccctaggccgccctcggcattccagcagatccaatctgcctgtctcctggactatcgagtgaggatcgccgatggacacagcctggcgcatcattgactgttcgtcgctggaggggcgcatcacttcggatcgcggagcaatctgcatccaccaggatgacggcggtgagcatcggatcccgacggccgatgtggcggtgatccttatgggccctcacgtgggcttctcgacagctgtcgtacatcgcctactgggcgcgcacattgtcgtcctgttctgtgactggcggggcgtccccgagggcgccgcgtatccgtggcatgagcatggtcgcgttggggcaaggcaactggcgcagtcgcaactctcagagccgcggaggaaaaatgcgtggggccgcttggtgagggcgaaggtgttggggcaggcaactgttctgcttcagaaggatcgtcctgcggcagcccggctcaaggcgatggcgcgttcggtacgctcgggcgacccggagaacgtcgaggcccatgccgcccgcctgtactggtcccgcttgttcgcctccgagggtgattttctccggcgcccggaggcggaggatcaccgcaacagctgcttgaactacggctatgcggtcctgcgcgcgcacgggatccgcgcggtggtgagcgctgggctcagcccgacgctcggcctgttccatcacggacgcggcaatatgttcaacctggtggatgacatcatcgagcccttccgccccgcggtggatgatgccgtgctgcacctggatcctgatgcgagtcccgctgaacggcaggtgaagcaggttctggttgccgcggttcagcaaccgttccgagacgacggcgctacgctccctaccgtcttggaggagctggctcagcacttgggccagtactgtgaaggggatcgagcccgcttggatatcccgtcgtggaccggtccaaggcgtgagtcctgatggcggatgatccagtgtggtgcgtggtcatgttcgatctgccagtggcgacgaagaagcagcgcaaggaggcgactcgtttccggcaccttctcctggatgagggtttctggatgctccagtacagcgtctacgtccgttactccccgaccgtcgccggcgagcctcgcagggtaggctcgatcaagcgtaacctgccacgcggtggtgaggtgaggatgctgtacgtaaccgaccacgagtggtcgcgcacgctctgttttcgcaacgaagaacccgtcgaggctgagtcagagccccaacagctcacgatcttctgacccccgacgaggcgtttgcgctggtcagacccccttgacagacgtttccggaagtctatcaaggggtctggtgactgaatcccagtacctggctcgccgaccactcccacctgtgaagtctatcaaggggtctggtgactgaatcccagtttgcgtgccttggcgacacggttggcgagaagtctatcaaggggtctggtgactgaatcccagtaaggtggtcagttgatggagtgatgtgtgaagtctatcaaggggtctggtgactgaatcccagtggcacggtgacgactacctggagcgcccgaagtctatcaaggggtctggtgactgaatcccagtacgtaggctagtggccttcggaggtgccgaagtctatcaaggggtctggtgactgaatcccagttgggagactctacgtacatgcgctgagggaagtctatcaaggggtctggtgactgaatcccagttgtgtctgtgggggtgccggccgcggtggaagtctatcaaggggtctggtgactgaatcccagttcgcgggcctcctgggctgcggcggcaagaagtctatcaaggggtctggtgactgaatcccagtaggtctgccaggacggtgttgacgttgagaacgtctatcaaggggtctggtgactgaatcccagtggcgggctcatccgtcggttcctggtgggaagtctatcaaggggtctggtgactgaatcccagtgcaaggcggtcgccgtggctcggcgcacgaagtctatcaaggggtctggtgactgattcccagcgacgccctggacggtgagctctccggtggaagtctatcaaggggtctggtgactgattcccagctggcaggtgattcgggagtgcaccgggagaagtctatcaaggggtctggtgactgattcccagcggagccgtcagctgagctgcgggccgaggaagtctatcaaggggtctggtgactgaatcccagctggtgtcaggtggggtgtgcgggacgtggaagtctatcaaggggtctggtgactgaatcccagcaccgaggtgacatgtgcgcagggtggtggggactccggcgtcttcaggcaaagccggagccaagccagtgccgagccaacgccgcggcactcctcggtctggcgagcatgcgctcctggatggctccggaggggacggcgggggcgggtcaggtcgttcaggtggcgcgcgagtccaccgtggccccgccgccgccctcactgcatgagccactccctcatcgaggacttactttcggtaccaggactgcgctctcccccagatgactgcgaggagatcccagtagcctggaggacaacgcagtcctcgatcgggaagtacgtcctcggtggcgtcacaggcgacgacaacacgagaggcgtcgcgccagcggagaagaactccgccagcgcaccgccccgggaaggaaggtgggggcgagggcgcgccatccgcgcacctcagtctcgcccccacccgtgagtcaagccgctcgcgcagcctcagctcgtcgagcctccgctctgcgcggcgcccgaactcccggcatcgccaccggcggcgccaccaccgacggcgtccccggtccgccccgtggccacagagcccccgccggacatcgcggcaccgacctccacctcggcccgcgcgtcggcctcctccttgagccgggtgttgaccttctcgacgtcgagccgcaggagcaggaagaggatgatcgcgttggccgcgagcggcaaccacacgtacatgatgtagatcatctggatggcggactccggctgaaccttgaggtccccgtcgtacccggaggctgccagcagccacccggacagggccgtgccgagcccaccacccaccttcacgccgagcgacgtgcaggagaacatgagcccgtcgatgcgcttgcccgtgcgcagccaggtgtgctccgaggcctcggcgatgagggcgttgagcgtgccctgcagcgagctcatacccagggccgcgaccccggagaggatcagcatgagcgggaggctgttcatgtaagcggccacgagcaccccgagccgccccagggtcgcgatgacatagccgatgatgttgatccggtacatgctcccgaagcgactcaccaccaccggcgtgatgaggagcccgatcatgagcgggatgttgatggaccaggcgaaggtcttcagcaagtcctcatcccccaggacgtacttcatgaagtaaatacccatgttgagcatcgccgtgaagatctgggtgaggaggaagacgatgaggatgatgaggtagtacttgttggacaccagcatcttggccgactccgctaccgagagcttgtcctcctcgggctcctcctcacccacgagctcctcgggcggcagctccttgaccgagaagaccgagagcgtgttgaccgccaggccgagcagcgcgtagaggatcgccatcgtccgccagccgctcgcgccgccaccgaacagagccacaccgcccacggtggcactctggatgagcaggttcgtcccgaaggcgaacatgaagcggatggagcccatctgcacgcgctcagccccgttgcgggtgatgagagcggtcagcgaggagtaggcgatgttgttggccgtgaagaagacggcgttgagcagcgtgtaggcgatgaagaaccaggcgtacttggcggtgtcccccaggctcgtggggatcgcgaagatcgcgatgagcatggcggcacagcccacgaacccccacagcatccacggacgggccttgcccatccgcgtgttggtgcggtccagcagcgccccgaagatgatgtcggagaagccgtcgaagagccgggagaccatcatgagcgtgccgacgacgcccgcattcagcccggcggtgtccgtcaggtagatcatgacgaaggcggacaggagcacgtagacgacgttgccggcgacgtcgcccgatccgtagcccaccttgttgtaccacttcaggtacttcctctcgctggccgcctccagtccgattcctgctgcgggggcgccggtcttcttgccggcagagtcgctgctcatagcgtcacctcgttgtgagtgctggcgtgggtgatgagggggttgagcaggagatggagctccatccccagctcctggctgtcgacctggtagcggggccgcagggcgggcccgcagctgttggatccgatgccggccatggcggcgtccaggcacaggaccgtgcagcccgacggcgtcagatcggtgttgcggcgccgcgcggccagctcctcctgcgtgtagcgggaggcgttgaaggagaagggcatcgccccgacggcggccaggctcagcccacctccggagaggaggaccttgttgcagtcggcgtggctgccgttctcctggggcctgatgtagtcctcgtggaggtcgacgacgtcggcgctgaaggccccgtggtagctggcgcggtgcttgtcgacgtagctctcctgcgggcccagtccgtagtagtcgacccggctcatggactcgggcaggaagaggcgcagccccaggcgcggcaggctggggaagcccagcgtccggcgcagtcgcaggctcaggctcaggacgccgtcgtcggtgagggtccagatgagccgtccgtgcagggcgggctggaccgagggcgccacgaggccgacgtcggcgctgatggtgacgcgcccgggctcctcgttgacgtcgacgccgtaggcgcgggccacggcctggtggtagtgggcgcgctcccactccaggcgcgcgtggcggtcgttgtcggtgggcgcccgccagatgttgagctccaccgggcgctgaaggagctcgcggccctccgatgacagggacacgggcaggccggtgcgcgtgtcgatggcgcagctgagacggtcactgtcgacctcgatccgggtgccctcccgcctgaccggcaggcgggtctcgccgatggggcggtcggcgagtgaggcgacccaccggtggcgcctgtcggcgttgcgcagggcgatctcgtcgaagcccaggacgtggccggcggcccgcagcgagtcgggtcgggcgagccggtaggtgaccagcaggtggcagcgcccggtgggcggaaccttcggttcgcagcgcagcatgacgctcgtgcgcggcgggacgggctcgaccaggtcgaggtcctcgcggtccacgacgacgccgtcgcagcgcacctcataggagatgcgcaggtactgggacaggtcggtgtggtcgaggtcgttgtggatggtgagcaggccctcctcctggtcgtactcgaggacgcgggcggggcgctggacgttcttgagctcggcgaggccggggtgggggacgcggtcgggcgagacgagcccgtcgacgcagaagttgccgtcgtggacggcctcgtcgtggtcgccgccgtagagctggatcggccggccgtcatcgctggtcccggcggtgaccgcgtggtcgcaccactcccacacgaagcctccgcacatgcgctcgtcggcccggatgatctcccagtagtcctcgaggtcgccggggctgttgcccatggcgtggcagtactccacgaggatgaagggcttgtcggggtcggagtccaggtagtcgcggatctcctcgatggccgggtacatgcggctgtacaggtcgatgcaggagtagtcgtagcggcgcttggagtcgcggtagtaggagctctcgtagtgagtcagccgcgtggggtcgaagtccttggcccagaagagcgccgcctcgagggtgcagccgtaggagcactcgttgccggcggaccaggagatgatgctggggcggttcttctcgcgatggacgcacagcctcatgcggtcgacggtggcctcggtccactcggggttgtcggcgatgggctcgttccagtgctcgacctggttgtcccaggaggggtcggccaggaagcggctctgggtgccgtggctctcgttgtcggcctcggacatgacgtagaagccgtgctcgtcgcacagctggtagaagcgcgggtcgttggggtagtgggagctgcgcaccgcgttgatgttgtgctccttcatcaggcgcaggtcccacagcatgtgctccaggtcgacgacgggcccggtggtcgggtcggagtcgtgccggttgacgccgcgcagggtgatgggccggccgttgaggtgcacgacggcgtcgctcaccgcgacctcacggatgcccacccggtcggtgatgacctcacccggcgtggtgatgaccagggtgtagaggtaggggtcctcggcgctccacaggtgaggggcctccacggtgagccgggcgcggtgggtgtagccgtcgtcgccggcgaagggctccagctcaccggcggccaccacggcgccgtcgtggtcgatgagctcgacatgggtggggacggccccgccccggaaggcgccctggatcctgaccagggccgtggccgggccggcgtcgagaccggtgccggagatcgggcccagcgaggtggtggtgacgtagtcgaacaggacgtcggccgggcggctcaggaggtagacgtcgcggaagatgccgctggtgcggaacttgtcctggtcctccaggtaggtgccgtcgcaccacttgagcaccaggacggccaggcggttggcgccggggcgcaggagctcggtgacgtcgaactccgcggaggcgtgggagacctggctgtagccgacgtaggtgccgttgagccacacgtagaagcaggagtccacgccctcgaaggtcaggtaggtgctgggggcggcggggtccggggtgtagtcgaagtcgcggatgtaggcgccgcaggggttgtcctgggggacgtagggcggatcgaaggggatggggtagcggacgttggtgtactggtggtggtcgtagcccaggtgctgccaggtgctgggcacctgaatcatggtgaagccctccgggaggtgggaggggctcgcctggccgggctcgtcgccgtcggacgtgccgacgggggcgtcctgctcccagaagggctcggtcagctcgtggatgctgggcaggtagcggaaggcccactggccgctgagcaggtggaagcggtcggagtcctcccgcctccaggggctggtggcgatgggatgggacgcgggaacgtagtaggaacggggcggcagcgtgtgttcatggaggacgtcgaggtcctcgaagtgtctcggaacgatcattgttcggctccccatggggttgacgggaacagaggacgcgcagcagtgcgacgcctgcgtggtgacgttaacatactagatggtagcctgcttcgctaggtgtatctaccgacaaattctcggttcaccacccccatgacggatctccatggcaacgtcaccattccgccgggacgtggatgtccctgacactcctgataacctctcgccatgccagggcagagccgaggggcgcagggagcgccgtcgatgagcgacgtggcccgcctggcgggagtctccgctcagacggtctcccgcgtggcggcgggctcggagcacgtccgtcccgacacccgcgaacgggtcctgcgcgcaatgaaccagctcggctactcccccaaccgcgccgctcaggccctgcgtcgcggctccttcaagacgatcggcgtgctgacccagcagatccagcgcaccggggaggccctgaccaccgcgggcgtgctggaggccgccaccgccgtcggctacgccgtcaacctcgtccaggtggagcaccccgcctccgaggagctgcgcgaggccgtctaccggctctcccaccaggccattgacgggctcgtcgtcgtgcaggccgggcgggcggggcgcgagcagctggccctgccgccctcgatgccggtggcggtctcggactccacgctcgtggactactacccctcggccagcgccgaccaggtcggcggggtgcgcgacgccgtcggacaccttctggagctggggcaccgcaccgtccaccacgtgtgcgggcccgaggactcccagtccagcctcatccgcagagccacctgggccaggaccctgcgggaggcgggacgggaggttcccgagccagtacccggtgactgggaggccgcagcgggctatgaggccggcctgcgcctggccgcggactcggaggtgacagccgtcttctgcgccaacgacgagctggccctgggcctcatccgggccatgcacgagcagggaaggcgcgtgcccagcgacgtctcagtcgtcggcttcgacggactggcggtgggcgagtacagtttcccgcctctgaccacggtgcgtcagaacttcaaacggcacggccacgagatggtggatctggtgctggagcaggcggcctccgggcccctggacggcagccgcagcatcatcatccccaccgagttcctcgtgcgcggctcgaccgccccgccggccgcctgagcgcggcgcaacattggcccagccacccacgctgcgggagccaccgccccatcgaggacttacttttggcaccaggactgcgctgtcccccatacgactgcgcggagatcccagtagcctggaggacaacgcagtcctcgatcggaaagtacgtcctcggcgcgaaccgcagccactactccggcccacaaccggccgagtctgcctactccacgagggtggggatgtactggccaaggcttgtacgtactgcacgaaggccccacctacccggagtgcacccaacccacctccagtagcacccgaccctcgtgctctacaggcaggtcagcactcgacgtcggcccagccagccccggcccacgggcccgccctcggctcagtcggcttgcggcaggaggatggaggcccccagggcgaaggggtagccgggtttgaggatgcactggacgaccggctgcgccatctccaggacgctgtcggcgtcgaggccctcctcgccgttggggccggcctcggccacgaggtcggagtaggggatggtgaggtcgagcagtgccatgccgtcccggtgggtggcggagtcccaggcgccgccctccatctcctgcagggtccccaggtggaagctcatgacgccgtggtcgtcgacctgcgcgggcacggacaggatgtggtgcggctcggggtcgcgcggcgcacgcagggtgaacacgatgatgccgccgtcgcgggcggcgcgcagcatgatgcggccgatgtggatgccgaagccaacgatgtcgaagaccccctccatggcctccgcgtagctcagcggcgcctgcagggggatgggggctccctcgccggggtcgttgatggcgcggcggcccgacggcgtggcggccttgagcagcaggagccggccggagtcggtcaggacgccggtctcgactcgctcctgccacccggccggggcctgagcggggccgggctcggactccaccagccccatgcccaggacggtggacaggtcggtgccgtcggcgggccggtgccaggtgatggtggcgtcgtcgtgccagatgggcaggaccccgttgaaggggatgccgaagcgcacgtgctcgcgctcgccgtcgacgggccgggagttatcgacatgactgacgtggctggtgtgccggccggaccgactctccggccctgcgccgccggcaccattgtcctgcggtcctgccaggtactcgctcatgagcccagcctaactgccgcc

SEQ ID NO: 3748 - DNA, 14531 bp, synthetic construct
  misc_feature 1..14531: note = Synthetic
  source 1..14531: mol_type = other DNA
ccgctgctggtggcctgcgtggccgtactggcactggtggtcacggtgtacgcggccgtggtcgtcggcgccttcgtggagatcctcggggtgaacaactccttcacgctgcggcacttcgagtacctgctgtccggcatcgggaatgagtcgatgatcgacaccaccatcctggcgctgatcgccaccccgatcgccggcatcctgggcatgctggtggcctggctggtggtggtgcggatgcgccgcggcgccgccctgatcgacttcctgggcatgctgggcctggcggtacccggcacggtcatcggcatcggctacctggtgaccttcaaccggccggtggcgctgttcggggtcaacatcatcgccccgctcgccggcggcagcgccatcgcgggcggcgccatggcgatcgtcatggtgtacgtggcgcgctccatgccggccgggcagcgctccggcatcgcctccctgcagcagatcgacaaggccatcgacgaggcctcgacgtcgctgggggcctcgggtgcgcagaccttccgccgggtgacgctgccgctgatccggccggcgttcctgaccggtctggtctacgccttcgcccgctccatgacgacgctgtccccgatcatcttcatcaccaccccgcacaccaagatcatgacctcgcagatcctggcggaggtggacgcgggccgcttcggcaacgccttcgccttctgcaccatcctgatcctgatcgtcatgaccgtgatcggcggactcaacctgctgatccgcggcaccggagcgggccgccagccccgctgagctgcgcccgctgaaaggcggcagaacagcaccggggcgcagcgccgtcgtcgtccctcccaaccatccgtcaccagccatgcccccagtcagcggggcgagagagccaaggaggctcccacatgaccacttccaccacctccgcgcagaccggacgtaccggaaagcccgccactgagaaggatgcgcccaccgggcacctcgagctgcgcgacgtcgtcaaggtgttctcgaaccgcggcaaggacgtgtacgccgtgcacggggtgagcctggacgtcgcccccggcgagttcatcaccttcctggggccctccggctgcggcaagaccaccacgctgcgcatgatcgccggcttcgagaacgccaccgcggggcaggtgatcctggacgggcagaacatggtgtccctgccacccaaccggcgccccatgtccatggtgttccagtcctacgccctgttcccgcacctgtccgtgcgcgacaacgtcggctacggcctgaagctgcggcgcgtgcctgaggcggagatgcgcgagcaggtggacgtggcgctgacctccatgaacctgacctcgctggcagaccgcgcccccaacgagctctccggcggccagcagcagcgggtggcgctggcgcgcgccatggtggtacaacccaaggtgctgctgttcgacgagccgctgtccaacctggacgcgaagctgcgcgtgcgcatgcgcctggagatccgccgcctgcagcggcgcatgggcatcacctcgatctacgtcacccacgaccagtccgaggcgatgaccatgtccgaccggatcgtggtgatgaacgcgggccggatcgagcaggtggccactcctgaggagatctatcggcggcccgcctccaccttcgtggcggacttcatcggccgcgccaacttcctgcaggcgacggcgcagaacgtgtctgcgggccgctgcggcgtgcaggtgctggggcgtggggtggaggcggcctgtcactccgacgtgcgcgacggcgacgccgtcaccgtggtggtgcgcccggagtcggtgcacctggatcggctcgacgcggtggcatcggccgtcggctcgggcgagctcgtgggtgacatgggtcgggtgctgtcggccgtgttctacggcgatcacgtggagtacgaggtggagacgcaggtgggcaccatcgtctgcgtggagtccgaccccgacgtcagtgccgtgcacgccgagggcgacaccgtgcgcgtcggcttcgccgcctcccgcgcctgggtgctgcccgacaccggggagtaacacccggcgccgattcttcacgcacccgacagggcggtgcctcatcatgctgagacaccgcccgcgacgcttcggcacttcccgcgacggttcggcacttggcagcgacgcttcggcacttcccgcgacggttcggcacccctactgccgaaccgtcgactgaaagtacgaaccgtccaccggaacacacgaaccgtcagccgaacgtacgaaccgtcagttcaatgtcggctcagaagtcccagtcctcgtcctgggtggcctcggcggtgccgatgacgtaggaggagccggagccggagaagaagtcgtggttctcgtccgcgttgggcgagagcgaggcgaggatcgccgggttgacgtcggtggtgtcggccgggaacagtgcctcgtaaccgaggttcatcagcgccttgttggcgttgtaccgcaggaacttcttcacgtcctcggtcagaccgagctcgtcgtagaggtcctcggtgtactgctcctcgttgtcgtacagctccatgagcagctcgaaggtgtagtccttcagctcggcctggcgctcgggggaggactcgcgcaccgccagctggtacttgtagccgatgtagtagccgtgcacggcctcgtcgcggatgatgaggcggatgaggtcggcggtgttggtgagcttggcgtgggccgaccagtacatgggggcgtagaagccggagtagaacaggaaggactccagcatggtggaggcgaccttgcgcttctcggggtcgtcgccgcggtagtagtccaggatgatgcgggccttgcgctgcaggttctcgttctcctcgctccagcggaaggcctcgtcgatctcggtggtggagatcagggtggagaagatcgaggagtaggagcgggcgtgcaccgactccatgaaggcgatgttggtcagcaccgcctcctcgtgcggggtgcgggcgtccgggatcagcgagacggcgccgacggtgccctggatggtgtccagcagggtcaggccggtgaacacgcgcgtggtcatgttctgctcggcctggttcagcgtggcccaggactggacgtcgttggacagcggcaccttctccgggagccagaagttgccggtgaggcggtcccagacctccaggtccttgtcgtcgacgagccggttccagttgatggcctggacacggtcgatgagcttgatgggctcaggcatggggtcctcccgggtgtgctcagttgaggcccctcatgctaccgacgacgacgacgccctcccggccgcgccgacgtgagatgccccgcggccggggccgacgcatgcacgtaatgcgcgaggcttcccgcagacccgaactgctgatgccttagcctggtgcccttccggcatgcaacgaatggaactgttgatgatcgagtcctacccggtactgtccctcgtcccgccactcctggcgatcctgctggttatagggacgaagaaggtcatctcgtccctggctgtgggcatcgttgccgccgctttcctggttgccgatggcggcatcctcagtaccctggccaaggtctgggaggccttctcccagatcttctggtcggaaggcgcacccaattcctactacatcctcatcctggtcttcctgctgactctcggcgtcatcacctccctggtgctgatgtccggcggcacccaggccttcgccgagtgggcgatgacgcgggtccgcacccggaggggcgcccaggtcctcgcggcggcgctgggaaccgcgatcttcgtcgacgactacttcaatgccctggccgtcgggcaggtcgcccgccccgtttccgaccggcagcgggtgtcgcgggccaagctcgcctacctgatcgactcctcctccgcacccgtcgccgtgctcgcccccttctcgagctggggagcctcgatcatcggcatcatggggccgatcgtcgcagctgtcggcatccaggtctccgacgccggcgccttcatccgctccgcagggatgaactactacgccatcgccgccctgatcctgctgtggatcaccgtcgtcctggagatcgacttcggcccgatgcgccgcgaggagagccgcgccgtctccaccggcggcctgtacgaccccgacgagcagatccccggccagctaaccgactccctgccgcggcacgagccgggggcgatgcgcacactcatcgtgcccttcgccgtcctggtcgccggggtcatcggcggaatcctgggtacgggccaccgggcgtccggctcgtggtccctcctcgacatgctcgccgacaccgacgtcgccctcgctctcaacatcggcggcgtcctcgggctcgcgaccgcggccttctactacttccacttcacgcacgaagacccgatcttcgaggccaagacggccgcccggggtgttgtcgaaggcgcccgctcgatgctgcctgccatcaggatcctcctgtgcgcctggatgctcggctcgctgatctccgaactcgggaccggcgcctacctgggctcgctcgtcgagtcgaccgcggtgtcggcgcggtggctcatcccgatgctgttcgtcgtcgcgggggcgatggccttcgccaccggcacctcctgggggtcttttggcattctcctgccgatcgccggggagatcatgggggcggtagcgggcggcggtgagttgctgatccccgcgttcggggccgtcctcgcgggcgccgtctggggcgatcactgctctccgatctcggacacgacgatcctgtcgagcacgggcgcgggctgcaaccacatcacccacgtcaacacgcagctgccctatgcgggtgtcagtgcggcggcggcgctactcggatacgtggccttctcggcgacggggtccggagtactcggcgttgcggtcaccgtcgtcgcactgagcggcttcgccctcgcgatccgcgcgtggctgccggccatcgacgacgcgaatgaggacgcgtcctcgcctgccgaagaacccgaggacgcatcaaccacagcctgagtgccctcccggttgcaacccacgaggtgacctcgacagcaaatcacgaccttggggtacgttccacgaccccggggtggtcgtaaaacgcaccccaaggccgtaaaccgtcacccaccaccggatgcccgtcggccacccggtacgccccaacacctgaaccgacgacaacagccgatcgctacacccccagatcgggggtcgtcgcgtttgtgagtgtggtggtgtgcgggtgaggtcccagtggtggttgtgggcatccttgctgaagcgctcgggtgctcgtctgacggggcgtaccctcgggccgacaattcgtaccttgacgcgaccgtacgtacctttcggccaacgattcgtactttcttgcgacggttcggcacttagaggtacgtgccgttgcaagaaagtacgaaccgtctgcgcaaaggtacgaaccgtcagccgagcgccgccgacccacgacgctgttctgccccaaaccacccccgccacggcctacaccgccgccctgcactggcttacgcaccaagcccatccggagaacacgcccagcagctcaaccggcccgtgcccggcgtcgtgggccagcccccgcagacacaaaccagctcttccagctacggggcgtcgtgctggaatccggggtgacgtcgggcgcgcgggaggcctgtccgcccacgcggcgtgccgttgacgcccagtcccgtccgtggcggcccaacgctgtccgggatcggcaccaacgactccgacgtcgctgacagccgcgggcagaaccttggaatcacgcggtctctcgatcagccccgcaatcgccaacggcctacgtaccgaactcggacgtccatttactcagcggaacagcgggagggagccggtcagtgaggtgacctgtgcgcgcgggccgatgagcgccacggccaggtagtccaggtccgcggaggcgacggccgcgagcgcgcgagtgtacttgtcataggtgtgcgccccggccgccgtcttggtgaagccgatgacctcgatgggcggttgcggctgcggctgcgctagttcggccaactgggatgcgggagcgaccagtacggggacgggggtgtcggagatgccggcgtgcatacgtccgtcggcgtcgggcacgtccgggccgatgaggtcctgatgccgggcaccgatggtcagtgccaacagggcgctgacgttcgcagccctggcggcagcggtgccctcggcgatgacaatgacgatcttgcggtcggtcgagttctgctggctcacagcgggtctcctcagaggggttgacgggtgttggttgacggacgggtttgatccagtccgcgaaacggtcgggtagagcgggaaaccgactcgacttcgggctgaggccggggcgggctcgacccacgcggaatatagtagtcacccattgcgtgactatgcgggcaacatattgggtgactatgctcccggttgggtgctcttcggggtactcgatgccgcccgagcagctcaggcacgtcacacatcggcagacactgcggccgatgcatcgtgaccgatggccaccgcgcgggcgcggcgtcgtccccgccccagcaccaagttgaggatcggaggacgcggatcatggcttcagtggcggagcagttgcaggcgctgggaatgaccgactgggagtctcgtgcctacctggcgctgctggaggaggcaccggcaaccgggtatgccgtcgccaagcgggccgggatcgcccgctccaagatctacgaggtgctcgcctccctcgccgccgacgactacgtccaggtctcccgcggcaatccccagctgtacgcgcccctgcccccacgcgagctcatctcccgtctgcgctctcgcttcaacgacagcctcgatgccgccgaggcgtccttgtccgccttcgcagccgatgccgtccacgatggcgccatctgggatctacagggacgcgccgccatcatcgagagggccaaccgactcatcgccgccgctcaacatcggatcctcgcggagctgtgggctcaggacgtgcccagtctggaggacgctctgcgcgcggccgccaaccgcgacgtggagatcatcatcgtcggttatggcgagatcgacctcgactgtgcgaccgtccacccccaccccgccacagacaccgtaacggccggactgggcggcaggtgggtggtcgtctcgatcgacgaccgcgaactcgtggccgggaatgtttccgccggggcacactctcgcgccgcctggaccagccaccccggcctggtggtgcccgtgaccgaactcgtgcggcacgacctgtacaagttggagatgctggcgcgccatggggacgtactggagcggagcttcggccccggtctgcaggtgctgcgagacaagtacgcacccctgaactgaaccgaatcccgcccagactcccgcgcagggagtccgccctaacgtgggtggcgcacgcttagactcgatggagctccagcgattccgcggaaatatgcggaaaaccgatgatccgtttgagtggcgagaccgctcctgcgtgcgccggcagcctcggcgcacgcaggagctggtcggcctccttcaccctggatgcatgaacgttgaagtatcaggcaaaacttgccgacaagcgggataggcaagaggcttgagcgtgcgccgcgccccggaccccgctcgaacgcgtctggagcccccggttccgtacacgcgctgaccgttttcgtctgcgcccgcacgcatcgcgaagatccccggagctggagacagcctccctggcctagtctcagcccatgaccgagactccctccgacatccccgcggtgccgcccaccggcgcccagcccgtcggcggctccacccggcgccccaccgccgttgatgccgtggccgagcgctacgtggagcaagtggccgacctgtcccccgagttcgccgtgtccgtggggcttccggggcgccgcggcaagttggacggctactcccccgaggcgctcgacgcactgaccgacctggatcggcgcgcgctgaccgagctggatcgcgtcgccccggttgacgcggtcgaccgggtcaccgtggccgccatgcgcgagcggctgggcgtcagcatagaagccgccgaggccggtgaggcgctgcgccacctggacaacatcacctcccccatccagaagctgcgcgacctgttcgacaacctgcccaccgccaccgaggccgactgggcggacttcgccgcctgcctgcgcgacgtgccccgcgccctggaggagtacgccggctcgctgcgcctggccgcgagccgcggggacgtggccgcccgccgtcaggtggaggcctgcatcggccaggcccgcgaccaggcagcggaggcctccagctcctacacggccctcatcgacgccgccgccacggccgacggcgcgcccctgcccgagtcgctgcgcgctgacctgcgcgcggcctcggcgcaggcacgcgccgcctacggtcgcgtcgccgacttcctaggtgaggagatcgtgccgctggccggggaggccgacggcgtgggccgtgagcgctacgcccgcttcagccgcgagttcctaggcgctacggtcgatctggatgagacctacgagtggggccgcgagcggctggccgccatcgacgccgagcagcgggagatcgccgcgcagctgtacggcgagggcgtgagcgtgcgtgaggccatggaccggctcaacgccgacccggagcgcaccatccacggcaccgccgccctgcaggagtggatgcagcgcagcgcggataacgccatcgcggcgctggatggcacgcacttcgacatccccgccccgctgcgcaccctcgagtgccgcatcgcgccgtcggccaccggcggcatctactacacgggcccgagcgacgacttctcccggcccggacgcatgtggtggtcggtgccggaggggaccgacaccttcgccgcctggcaggagcgcaccaccgtcttccacgagggcgtgcccgggcaccacctgcaggtcggcatgcagacctacgtgcgcgacgagctcaacgcctggcgccgcctggcctgctgggtcagcggccacggcgagggctgggccctgtacgccgagcagctgatggccgacctgggcttccaggacgaccccggcgaccgcatgggcgtgctcgactcccagcggctgcgggccgcccgcgtggtgctggacatcggcgtgcacctgggtaagcggcgtccgccggagctggcggagctgcccggggtcggcgacggcgtgtgggacgccgactccgcctgggccttcctgcgtcacaacgtggccatgaccgagtcgttcctgcgcttcgagctggaccgttacctgggctggccggggcaggcaccctcatacgcggtcggccagcggctgtgggagggggcccgcgatgaggcgctgggccgcgggcagtccctgaaggacttccacatgcgggcgctgcgcctgggcagcgtgggcctggacgtcatgcgcgaggcgctgcgcaactgaaggtgtttcacggcatgcgtctcgcggcgcgccgactgccgccactcgcgcgaccagcacgccgaggagatctctcgttaccaactcgatgcaattcacacccgatactgcagtcgtgtttgacatacaatgcatgtgactgattcccagtaagcctcgccgtgcttgtgaggctgaatgctccaccggcttgccggtcgaatctgcccgtcctcacataggacgggcagttttctgcactaaaccagagacagaccgcacggcggcatgatacaactccctcatgccgccaaagcacattcgcgtcgggatcgacgtcggttcgtactcggtaggactgagcacgatcgaagtcgacgacaacgacgcccccatcaggatcttgtcctccgtgtcccacatccatgactccggcctggacaaagatggcaaggagaaggcgacaacccgccgtaaagcgtcgggcgtggcacggcgcgctagacgactcatgcgcgagcgacggcgacgtctgaagaaccttgacgccaccctcatgcacttaggctacccgctcccggacttcgacgacggcgaggatccctacctgatttggagggtgcggtccgaactcgtagaggctaggctacctgaggagacacgtcgatacgccattgccatggcgatacggcatattgctcgccaccgaggatggcgaaatccgtacaccaagacagagtccctgctcgtacccgcaccggactctccattcatggaggccatgcgggagcggatcaaggaacgcactggcgaaattctcgacgaggatctgacacccggtcagatcatgcagcgagtcgcactgaccacacgccttccgatgcggggcaaggagggactactcggcaagctccatcagagtgacaacgctaacgagatccgccgaatatgtgcggtacagggagtaagcgaggctgaatgtcgcgaaatcattctggctgtctttaaggcaaagtcgccacgaggctccagcgtgggccgcgtgggccacgacccgctgcctggccaggagtcactgccgcgtgcacccaaatgcgatccggaattccagcgttaccgcatagtctcgatcgtggcaaacctcaaggtgcgtgatgacagcggacaacgaagcctgaacgcagacgaacgcagacgcctcgtcaactttctgctgacgtccacgaccgacgacctcgggtgggtcgatgtcgctgacgttctcggtatcccccggcagaacctacaaggtacagcgcaactcaccgccgacggagagcgctcggctgctcagcctcctatcgacgccaccgaccgggtgatgcgcaaatgcaagatcaaggccctgcagtcatggtggacggacgctgactcggaacgccgcagcgcgatggtccgctacctctacgagggcacagaggactccgagtgtgccgaattcctctcgtccctgtcagaggaggagcaaggtaaactggacaatctccatcttcctgccggcagggcagcatactcgttggattctctcgcccggctaaatgaccacatgctcgcaaccaccgatgacctgcacaccgctcgcaaaaacgtctttggcgtcgatgagtcgtggactcctcctgctgagcccatcggcgctcctgtggggaaccccgccgtcgaccggaccctgaaggtagtggcccggtacctcgatgccgtgcgcagcgtgtacggtattccggtctctattcagatagagcacgtccgtgacggcttcaagagtgagcgcacagcacgcgaactcgaacgggcaagcaaccaacgctttgaacagaaccaaaagacggtcgccgaaatccgcaagtcgctgggcgttgacggagaggtgcgccagtctgacgtaaggcggtacgaagcgatcaccttgcaggactgtacctgtgtttattgtggccaggtcatcgactacttcacggcgcaactcgaccatatcgtacctcaggccggggttggttccaacaaccatagggaaaatcttgtcgctgtttgcgagcgctgcaacaaggcgaagtcaaagacagtattctccgtgtgggcggattcgtgtgaaattcccggcgtcagcgttgaggaggccgtcaagcgagtgagatcctggaggaatcgccccggatcgatgcgtccagcgcagctcagccgactgaaaaaggatgtcatcgcgcggctacggcgcacccaggaagacccagaactcgattcccggagtatggagtcggtcgcttggatggcgaacgagttgcgacaccgcgtcgcggcggcattcccagagcctggtacacgagtttcggtttaccgcggcagcattaccgcagcagcgcgctacgcagcaggcatcgactctcgcgtaaatctccttggcgagagaggccaaaaagatcgcctcgatcgccgccaccatgctgtcgatgccgctatcgttgcgctaatgcgtccggagattgcgaaggctcttgccgaaaggtcaagcctccgcgcagcgcaattcctgaccggtgaggaacagacctggaaacagtacacggggcgttaccccggcgaccgggacaacttcgagcgctggagagaggggatgcgccggctcacagaacttctgaacgtcgcgctggcggatgacaacatacacgtcgtcgagaatttgcggcttcgtctgggcaacggtgccgcacacgacgacacgattcgcaaactgagtcatgtccgcctgggggacggcctgacagcagcccagatcgaccgggcctcttcagaagcggtgtggtgcgcgctgacacgggagtcagactacgaccagacggaggggctcccgcctaattcagcacgttcgatcagggtccatggcagaacgttcgatgcggacgatgacgtaacaatcttcgccaaaggctcgggtaagcccaatgacaagcctttcgcggccatcgcggtgcggggcggatacgccgagatcggctcaacaatccaccacgcccgcatctataggattgagggaaaaaagcccgcctatgccatgctgcgcgtcttttcttgcgatctacagaaacatcgccgcgaagacctatttgcggtccctatcctgccacagtcgatttccatgcgctgcgcgccaccgaagctccgcgacgccatacataaccacgcagcagtgtatctaggatggatcgtcgtcggtgatgagttggagatctctgtatccaggttcactacagggcagatcgggtctttcctcgcggagtaccctgatacaacgcgctggcgagtccatggattcttcaacgagtcccggctacgactgcggccctcgcagatgtcttctgaagggctcgccgatgacgcacctgacgccgttcgcaagacacttagcatcccgggatggcttcctgccgtcaacgttttgtgctcctcgcacccagcggtaatccgacgcgatgccctgggccgcccccgcatgacaagtgcaagtaggctcccagtgtcgtgggtggttgagtaggaatctgtcgtggacacagcctggcgcgtcttggactgctcatcgctcagcgggtcggttcgctccgaacgcggagcagtcattatctgccccgacggcgctccgtcgcaatcggtcccggttgccgacgtagccgtcgtactcctgggaatcaaggtgtccatctcaaccgcagtcatgcaccggctgctcgactccgatgtcgtcgtcatgttctgcgattggcggggcgttcccgaaggtgccgcttatccgtggcgcgcacacacacgtgtgggagccaggcagcgcgcacaggccgctctttctttgccgcgacagaagaatgcatggggaagactggtccgggccaaagtactcggccaggctcacgtgctgtcgaaggtggatgatgcgagcggtctgcgacttcgaaacatggccaagtctgtacgttccggggacccagataacatcgaaggccaggcggcgcgattatactggagtcgactatttggcaatgaagactcctttgtgcgactacatgagtctgacgactcacggaatagctgtctcaattatggttacggtgtcttgcgcgctcacggcgtccgcgcagtcgtggctgctggtcttaacccgacactcggggtatttcataggggcaggtcaaacttcttcaacctcgtggacgatctcatcgagccttttcgtcccgccgtcgacgacacggttttgagactgccagcggacgcgtccctaacggaccggtcagtcaagcacgagctcgtgcaagcagtgcaacagtccttcagcgtggaaggcgacaccttgccaacgtccctcgaacgcctggcacagcacttaggacagtacgtagagggcgatcgcgatcggctcgatgcaccccactgggcagggccataccgggacgttatagatggcagatgatccgatgtggtgcgtggtcatgttcgacctgcccgttgggaccaagaagcagcgccgtgaagccacacggttccgcaacttactgctcgacgagggctactggcgggcccagtactctgtgtacgtgcgctactcccccacggtcgcgggcgaaggacgaagagtaggcgtgatcaagagcgggctccccactgggggcgaggtacgcatcctctatgtgaccgaccgcgagtgggctcggacgctctgtttccgaaacgaggcacccgtggaggtggaggaagagccccagcaactcatgatcttctgacgtccaaccaggacttttccttgg

SEQ ID NO: 3749 - DNA, 14388 bp, synthetic construct
  source 1..14388: mol_type = other DNA
  misc_feature 1..14388: note = Synthetic
ggcggttccagttgatggcctggacgcggtcgaccagcttgatgggctcgtgcatgggactcctccgagagtgctcgcctgcggcctgccgcagtgcacccatgctaacgacggtgcgcccaagggcgcgacggcctcgccgcgtcatcgcgcacacacccggcgcacatcagagtcgcacagaggccacctttgccgggaccgcaatcgcgcaccgggcgcggcagccgggactaccgggcgcggcacccgggactaacgagacaaagagacaatgagcccatgaacggagccgcgccccctcccccacgattcaccggggaagcccccgccctcctggccaggctggcggattccgccgagcgactggcgaacgggaccgagtccggtcgcgccgtcgtcggcatcaccggggcgccgggagcgggcaagtccacactcgccgccgaactggagacggcactgagacggcggggcctgctggccgggagcgtgcccatggacggattccacttctccaacgcggtcctcgacgaactcggccgtcaccagcgcaaaggtgcaccggacaccttcgacgtcgacggctatctggcaatcctggaccgggtgcgtcaggccgctccggagggcgaaccccgcgaggtcctggcgccggtgtaccggcgcgatctgcacgagccggtggcggcaggcactcgcgtcgcgggccgcgggatcgtcgtgaccgagggcaactacttggcgctgaattcactgggctgggagggtgcccgggagcggatcgatctgctcatcatggtggaggtggacgaggccgagctcattcggcgcctggtggcgcggcacatgtccttcgggcggcatcgggccgatgccgggcactgggtgcgcgccgtcgatctgcccaacgcccggctggtggcggactgcgcgaaccgctgcgacgaggtatggcggatcggccgatagcgccagagcccacctgtcaacaccgcttcatgccaatgcgactgccttaccctggacgcatgacgtcttcgcggtcgcataccgtcacccgccaccagatcttccagaccagcctcatcacggccctggcccagggagtctatgaggatgagatgacgctggccgaactgctggggcacggctccttcggaatcggcaccttcaacggactcgacggggagatggtgatcctgggcggcacctgctaccggctgcgcggcgacggctccgtgagcgtgccggacctgggcgagcgcacgccgtacgccgtcgtgacgaacttcgtgccgaccctccgccaagacgtggacggcggactcagtcgccaggagttctcagagatcatcgacgctctcgtaccgagctcgaactacatgtacgcactgcggctgacgggccgcttcgcatgggcaagcgcccggaccgtcgtcaagcaggagcgcccctatcggcctctgatcgaggccaccggcggcgaagaggtggtccggcacgaggacttcgagggaaccgtcgccggttttcgcacgcccctgtatgagcaggggatctccgtggccggctgccacgcccacgtcattgacgaggaccgcagctggggcggccatcttgtggacttcgaactgacccggggcgtcgcggagctctgcctgggcaccgacttccggctgagactgccgctgaccgaggagttcgaagaggcggatctgagcgaggatatgagcgaggagctccggcaagccgagcatcactgagccgggccgtcctggccacgggactgctggtggggtgttgcgccggtgcggcggagcacagcacgtgagccgccacgagccgtgtccgacgccagtcgcgcgagcacaggccccggtctctcctgtatctcggcatacggtccgccaactacttgtcggatcgcatcacaagatatacgctaagtactgactgattctcagtaaacttcgccatgtttgcgaacgttgaatgctccaccggcacaccggtcgcgcctgcccagtccttaatcgggctgggcaggcgcatatatctgccataacccaacctcagatgtggttgactacactgcatgaccgccatgcgtatccgcgtcggtgttgacgtcggaactaattctgtcgggtgctgtgctctcaccgtcgatgaggcaggggttcccatgcgaatcctgtcctgcctgtctttgatacatgactccggcatcggtgaagatggccagaagaccgcttccagtcgccgtgaggtctccggtgtcgcgcgccgagcgcgtcgcctgttgcgtcggcgccgcaaacgcctccagcaactggacgcccttctggaaagacggggatatccgatcgttgatacctccacccaaaaggacccttaccttgtatggcgagtgcgtgcgcagctcgcacaagaggttcttccgaatgaaacccgcaagcatgccctctcaatggtacttcgtcacatcgcacggcaccgagggtggcgcaacccgtatgccaacgctcagtctcttctgagcccgtctccagagtccgagttcatgagggcaatgcgtcagcgggtcatggagaagacgggcgaggttctggatgaaaacatcacgcccggtcaagccatggccaggactgccctgagcaccatggtgcccatgcggggtcccaacggggtcctgggtaagctgcaccagacagataacgctaatgaaatcagacggatatgcgagcagcaggggatttctgctgaagagtgcaaggagctcatcctggcagtcttcgcctctgagtccccccggggctccgcttcaaagcgcgtcgcttctgacccgctgccggggcaaggtgcccacaagcgggcgccgaagtgtgatcccgagttccaacgcttcagaatcatctcagttgtcgccaacctgcggatagctgaatcggaaaaagctgctcgccccctgtcgccggacgagcgccgacgtgttgttgattttctccttgaatcgacatcagaggaccttgcgtggacagacatcgccaagttgctcggtatccgtcgccagaatctgcgcggaacagccacgacaactgcggacggagagcgcgccagcgcgcagccacccactgacgcaacgaatcggattatgagcagttgcagcatcaaaacgctgagatcctggtggaagcgggcagatgccgatcgacgtagcgccatggtcagatatctttatgaaggcgcagaagactcggaatgcgctaccttcttgggaaatctgccggagaaggagcagggcaagctggactcactgcatcttcccgctgggcgtgccgcctactcgccaaactcgctggcccgcttgaatgatcagatgctacgaaccgctgatgacctgcatgatgctcgtaaacatgttttcggagtcgatgacacatggaggccgcctgcagaatccattggcgctcctgtcggcaatccttccgtggatcgcacggtgaaagccgtagcacgtttcttgaacgccgtggacgacgtctggggaactcccgataccatccagatcgagcatgtgcgcgatggctttatgagcgagaggacagctcgagagattgaccgagaaaataaccgtaggtttaagcagaatcaggatactgtagccgagattcagaaaatttacggtatccagggagacgttcatcgcagcgacgtcatgcgctacaccgccgtcacgcagcaggactgcgcgtgcgtttactgcggtgacaccatcacctacctgtcctgccagcttgatcacatcatccctcaggcaggaatcggctccaacaatcatcgagaaaatctcgtcgccgtgtgcgaacgatgcaaccggtccaagtcaaatattccgtttgcagtctgggcagaaaaatgcggcattccaggagtcagcgtggagaaagcgattgctcgggtccggaagtggcggaacacccaatccggacgcgcccaggccgcgcgactgaagaagctgcagaaagatgttatcgcccgcctgcgacgcaccgacgaagatccggcgattgacgcgcgcagcatggagtcggtgtcctggatggcaaatgagcttcatcatagggtgaaagctgcgtacccatcggcagatgtggctgtttatcgaggttccataacggcgggagccaggcgagcggcaggaatcgattcgcgtgttaatcttctcggcgagcgggggcgcaaggaccggctcgaccggcggcaccatgccgttgatgccgccgtgatcgcgatgatgactccgggcattgccaagactctcggcgagcgctcgaacctgcgctgggcggaacggctttccggcggggtggagacctggaagtctttcaccggcgccacccccggtgcacgtgagagcttcgaggcctggcgcaatcggatgctccggcttactgagttgcttaatctcgcactcgcagaagatcagattcatgttacagagaacttgcgactgcgtcttgggagcggaaaggcccacggcgaagtacagcccctgaaactgcatcaattgggcaacggcctcaccccggctcagattgaccgagcctcctcgccagcactgtggtgcgcattaacacgggaaccagattttgatatcaggaagggattgcccgcgtcagagacgcgtattatccgtgttcacggaagaagactgaccgctgatgacagcgcatcattcttctcgaagaagtccgacgactccaaggagaagcctttcgcagcgatctccgtccgaggcggattcgcggagataggttcaacaattcatcacgcgagaatctatcgcatcaacggcaggaaacctgtctacgccatgctgcgagtcttcacccaggaccttctcccttaccggaattccgacctcttctccgcgccagttcctcttcagtcaatcagtgtccgctgcgccgaaccgaagctaaagactgcgatttcagccggaaccgctacttatctcggatgggttgttacgggcgacgagctcgaagtgcccatggagagtttcacgacgggtacgataggcgaatttcgcaaagacttcccgactatcacacgctggagaatccgaggattcttcagcgcgacccgctttagactacgcccctcaaccctggcgccagaaggccttagtgacgctaacgactccgtaaagaaaattctcacgattcctggatggctcatttccatcaatggaatctgctcggttcacccgacagttgcccgccgagattcactcggtcgaattcgatcatcgagctcagtcaatcttcccgttagctggaccatactgtaaggaatacatatggataccgcttggcgcattgtagactgctcgtctttagctggcgagcttacttcgggacggggatcagtttctgttcataccgatggcagagagagtactaagatcgctgttgccgacatttcggttctgcttatagggacgcacgttgtcatgtcagcatcggttcttcacagacttctcaaggcagacattgtcgtcatgttctgtgattggcggggagtacccgaaggcgcggcttatccatggcatgaacatacgcgcataggggcacgtcagctagctcaggctcgattatcacaaccacgtcggaagaacgcttggggccgaatagtgaaagcaaaggtcttgggacaatcggttgttttgagtcgcgcggacgaccaggcggccagtagtctccgagaactggccaagaaggtgcgttcaggcgacccagaaaacatcgaagcacatgctgctaggctgtactggtctagaatatttcgggatggacaaggatttcttcgcaacccttcagcggacgacaatagaaataactgcctaaattacggctatggagttttgagagcatatggcgttcgagctgtcgtcagcgccggcctcaacccgacgctcggtatttttcatcgtggacgaagtaacgcgttcaatctggttgatgaccttattgagtcttttcgtcccgcggtggatgatgctgttctctcgctcaagccgagcgattcacttgaggatcgtactgtgaagcaacggctcgtgaccgctgttcaacagtccttcgattctacaggtgcaagtcttcccaccgtactggaacgtcttgctcagcatttgggccagtactgcgagggagatcgaacccgcttgaacgtcccttcctggacgggcccagggagagttgacgatggcggatgatccgatgtggtgcatcatcatgtttgacttgcctgtcttgactatacagcaacgacgcgaagcagcacgtttccgtcattttcttcttgacgaaggattttggatggcgcagtacagcgtgtatgtgagatattctcctaccgtatccggcgagccgcgacgagttcgagcgatcaaggcggccctgccggacggtggcgaggtcagggtgttgtacgtcacagatcgcgagtggtccacgatgctctgttttcgagacgaagcccccatcgcccccgaccccacgccccagcaactcacgattttttaaccaccacggagcgtgctttcgctgagattgcaaggttcaatcccccctgatggactcttctgaagcctaccagggggattgaagactgattcccagccgggcgcgctcctcgagtgacccgagatgaagcctaccagggggattgaagactgattcccagcgcaggtggcagcggcctacatgcggactgaagcctaccagggggattgaagactgattcccagcaaggcggttgtggccgctcacgcagtgcgaagcctaccagggggattgaagactgattcccagcgtggtcgtcagctggatcgtcaacacgggaagcctaccagggggattgaagactgattcccagcactcccacgatcacgccaccggcgccaagaagcctaccagggggattgaagactgattcccagccggccggctaatggtgatcgcggggcgagaagcctaccagggggattgaagactgattcccagccggccggctaatggtgatcgcggggcgagaagcctaccagggggattgaagactgattcccagcggctctccgcgcgcggcggcgatggcgtgaagcctaccagggggattgaagactgattcccagcgcagcgccacggcacatatcatttgaaatgatacgaatttacccgcacttatttcattcgaaatcgcaggcggggccgagcgcatagacgcgccggtgcaccacctcaccacccccgtccccagccgccccctcccatcgtcgaggttggcatcccgagcacccgccagcccggaatcgtcgtcgtggttcgcccatccgtcccggcatgctcctggaccccggcatgctcctggacatggtcctgcacccgccattttccgggcaggccgaccgccagccgggcgcggtgcgcgcccgccgccagaggcatgagcttgaccacgccgacgagccacgccagcagcggcagacccatgagaatcatcgcggccgcatcgggtgcaccgcccgtcggcaggagcaaccaccacaggaccgccgtctcacccatgatcaggaagaaggacgctggcttggcgcttccgtcaacagcccaccaggccgcgagcgcgcttccgctgctgtcgccgtcctggccacgggcccccggccagatccagggaccgcatgcctcccgcgcccagctcgtcagggcgcgtctcagccgggcgtcatagccgacgtcccgcaggaaggagagcgacccgccgatcatcatgagtccccccagcaccgccacgagaacgccgagaatccaccccagccccgccccgagccgggcggcggccaggacgacgaacaacagcccggcatggagggggagccagccgcccgaggaactgcgatggcggtcggcggccaggcggctgagccgttcgacggccaccccgcactcccatggcgtgacgacgcccgtcgatgctgcagaggtgaccgcggcccatgcccccggtccggccatgagagcctcgtcgggcgcctccagcaccgccgtcgagcccagcgcggacaaggacgataacggagccccggcctcgccgatgaccacgaggccgtcagcgccgacgcgcgccaggccatctgccagaagctcatgctccaggcgcccgatctgccgcccccagcgcagacgacccagcactgtgaacgcccagacgcccaggccgatggcgagcaggaggccgagctcggcgtcccccagcccccaggagcggagggtggcgacagtcatgaaacgaacggagcgtcccaggctcgccggcgtctcccccgccgagcagcccacaataaggaggccgacggtcaggaggatgagcatccacagccccatcccccacaggcccgcacgaaccgactgatggcggacgcggcgccacagcccctcccgtatccacgccggcagcgtcgactcatgggccgggtggaggcggcaggagtcggcccaggccctcagcgcccgcaggtgcagccgctcggcgacggcgccgtcgatgaatcccggcagctccgagccgaggatggcggtccccaggagcgcggctgtggcgctgaggaccaccggcgtcgcagtgcgccaggcgagggcgtcgccactgacccagggcctggcgccgacgtagaggatcatggcggcggtgaacaggacgccgacgtcgaaggcatgctgaccgtaacgggccacggcgcgcgccgaatccagcaggttggccagggcggtcctggcccggatcacgtccccgactgcaccttcccgagaccgccccgcccacgaggtgccggggccggcgatgtccgcggcggccttgggcaggagggccacctgggtgtccaggagcgtgacgtcgacgagtccggagcggttggggcgagtcctcgtaccggcgaaacgggcgcataccgcgccggcaccgctggagcgcggcatcaccggctcatccttcggcagcaccatagggtcgtcggtgaaccgctgggcgagattccaggggtcggcttccaggcccgtcagcccgatgagggagcggacgcgcctgagccgcattgacagcacaatattgctgagcaggccgccgaggacgacgctgagcaccaggaccgtccccgccaggcgcgcgctgtcctggaagggggccggcgcataggcgcgcacaagggacgtcacgaccgagggggccaggaccgcccacaccaggccgggcaggcggcggggcagtgcggctcgcaaccactggccgatagcggaggggccgccgcggcggacggcatcgtcatcgggagcgcccgttccgatcgaggaggtccgcggacccccatgatggtcccaggatcgccggggcattggggcgctgcgcgcccagacggtggcggcgcgcacatgaacgcggctcgacttccactgccagtaactgatgtagagggcgatgaggcaggcgaggatcagaacaatgagaagcggaagggagccggtggcggggtcgtcgtcaatcacggcgaggacctgaatgcctgtcatgagaaggatcagcggagtgaagacctcgcgtatgagcgggagggccgctgggcggtgaaggaaggcggcggagagcatctcgacggcgacttcggctctccacggagcgcattcggcttgctgggtcggggtcgggccatcgaggtacggggtgctcaggggcgtaccaccgggatggatggaaccgttgttcgcgacagtgggccgatcgacataggggcggggaatgtcggcggcggtggtgctcatgccctcacgctactggcccggtgcgacacgcaaacccgtcactactacccacacgtacccgcgccgctactcgaccccagcgcctccgcagccgagagcagcgcctctttccactggaacaaacacttgagagcactgctgtgaccagcataagagaaattcatgaattacctgtcaaaagtcttgcactccacaatagtcactggcattcgcgtagattgcacaaatggttcgttactcagcacatgtatcgcgtcgctccatcctgggcaccgcctccatcgggatcgcggcctcggggatcgccgcatgctctcaggcgtcctcgccgagcagcgaaggcacgcgcaccacggaagacgcgcagggaggcagcggttcagccggctccacagcgagcgctccagcatcgggcgagccggatgctccctctctcgacgatcttgtcgcggaggcgcaggacaaattcactcaggaggcgtacagcgatccggataccggcaaagaactcgctttcaatgtattcctacccgaggggtattccggctcgggctcctatccactggtgcactacatcgcggacgccagcaccgtatccgacgaccccaccactccgttgtcgcagtacggcgcgctcatttgggcgagcagcgtcacgcaggcgaccgacccctgcattgtggtggtgccctcctacaccgagacggttctggacgatcatgacggttacacgacgaccgattggctcgacctcaccggccgcttcgtcacatggcttcagagccagtacgccattgatcccgcccgcgtctacggcaccgggcaatcgatggggtgcatgatccacctggttctggccggtaaacagcccgatctgttcactgctctcatgtttgtcgacgggcagtgggatcccagtcagctctccggtctgggcgagtccacattcatttaccatgtcgcgggcggtgacgacagggccctggagggtcagaccgccaccaaggacatgctgacccaggcgggtgtggatttcgcggtcgccgatgaggagtgggatgcgacggcgggcccctccgcgcttctccagcagacgcaagcgctattcggcaaggggaagcagcggaacttctcctccttcgtcgcgggcacggtgctggaggcgaacccgcagtcgatggagcacatggcctccttcgagcccgcctacaagctgacgggcgtgcggaactggctgctggcccagcgcagcgcctgatcgacccgcaccgggcacgccgctagaggctcgccggaggaagccgatgggccggcggcccctctcccatgcgcattcagttccggcagcactcagaatgcccacgccagcctggccggccaggtcggttgggccaagacgatggccgtcagaaggatctgcagaatgctgtgtcgatgacgaaggcgggagtggatctgactgtgcggcatgctctcgaccgtacgcgagctaccgcgggtcgagaacgggtagagctcccctgatagaggaatcggcagggacgtcgggatccggccgattccgcccagcgccgggagcgatgaccatagttgaaggtcttgcgacaagacgacagaggcgacccgcccgaccctcaccagcatcctcactgtagaaactgagcttctcactctacaaagtgacgacctcactgtagaaactgagcgcctcactctacaaagtgacgacctcactgaggtacagtgacgaccgtgaacgccgacgatctgcatcagcatgtcgcacgcatgcgccgccaacgcagcgacgacgcctccgtggaagcgaaggccgctgttcgcgacctgccgaagagcatctgggacaccgtgtccgccttcgccaatacagatggcggaaccatcatcctcggccttgatgagcgcgaggacttccagccggccaaggggttcaccgaggcggtggccaaacgtcggattgacgccctgatctcaggactcgatgcctcgccgcagggaagcgccaaagtagcaccggtgccggactgcgtcccagagcgcgacaccgtggacggccgtcccgtagtcgtcctcaacgtgccatccctgcgcgagcgtctggacattgacatgccatgctatgtcattgttaaagggattctgaacggcagtttcaaacgtatggacgatcatgacgtccgcctgtctccttacgaggtgcacgtcctgagaacccgtcggatcgaggatcccacagaccgtgagccagtgcttggaacaaccattgaggatctcaacccccagagcgtggatcgcctcctcagtgagcttcgcagcagcagctctcacatccttgaccacatcaacaaggacgaccgggagacggccctcaagcggctcaacatcctcacgtccgacggtgttccgaccttcgccggatatgcaacgctagcaccctatccgcagcaagagttcccacggctggtggttgatatagcggtccaccctggcacgcagaaggcccaggacaccagcgtgcgattcctcgatagacaggtgtgcgacggccctattccgctcatggtggaggatgccgtgtccgcagtaacgcggaatctgcgccaccgacgaattacgaagggagcgttggctgaagatattctcgaaattccagaagatgttttgcgggaggccatcacaaacgcagtaatgcaccgcgactactccgcgcacgctcaaggtcagacagttgctgtggatatctatcaagaccgagttgaggtcgggaatcccggcggtctctacggaggcaggaccatcaccaacattgacgaggggcttcccgtctctcgcaacaaggttcttgcgaaccttctgcgcagcgtccccagacctcatagcaggggtatggtcgccgaggccgccggaaccggcgttcctcgcatgatcaatgccatgcgccaacaaggtcttcccgctccggactacgatgcgacaacgatcgaccgcgtgatggtgaaactctcccgtttcggtctccttgaccccgatgtgcgggcgtggctcgacagtcttcccggcgggccgcggaacaccgccgcggattccgttctggcgctgacccgtagagacgggaaggtgtgggtagtggatatacggcgaaatctcggcctcgactccgacgacgtacgggatctcctcggcgagctcgtagcggagggacttctgatcggcatgaatgacggcccttatgtactcgccgatccgaagctgggcatgccgtccaccggagccaggtgggaggtcctgtccgttctcgactcccgggagccactgaaaattcaggagatcgccgagcagacgggcaaatccctctccgccctccgcccgcttctgcgcgaactggttggtgacgggctgattaccgcaaccgcaccgcctaccagccgcaaccgcgcttacctgctcgccgagtaggaggctccaaacactggaagcactgtaaacaccgtctgtccatatcggaggtttagaaacatctccgacgccggcaaccgggtcaggtcccgcggaatcatgccgttcctgggccgtgccagtctttattcgacctttactccgagcgctataccgccgcgctgaatggtgctgagcagcatcgggccagcacatccggcgcatcgggcactgcaagcgttgacgagaaacgcttgcagtgcttgctcggcaagcgttgttgacgtatcctgatcgtgctcagggcagtagccttgcgaagtgagcccggcagccttccggacggtgggtgagccgggtttcgcgttgtctcagatgaggtcaaccttgatcgtcgtgatgtggagcctctcgaccgccgagcgccagtcacctccacgatgccacgcccacgcaacaccatcggcaaacgacagcagcggttcctcgtggtcatgaagatgatcgtaggttccacgccaagaggtacttaactcactcctgagaatctggttatcgctcttcaccgcaggatcatttcgatcaagaaccaatcggacgcatgcggttgtcgccagcgcacgagcaacagcacgcaaacataactgccttccccgaatacctttgacttcagttcgatataactgaactgcaaggtcgcactgcatcatgtcactcagtaccgctcgtcgaacctcatcacgctccttggtgaaatgaatggaacgctgccctcgccgcaaacgactccgcaaaagacgacgataaatatcgacatcagaagggcgaatcataatgacgcaaatcgaatatccattcacctctgactcgtcagcaaatgcatggaaagggcgctgaagattccaatccgccccagagtcgcgcacatgagcaactaccacgttctacccgcttccatgcgcggctcgaacaaggaccagagcctcacaacatgcaggagacgcagccctcgacctcggtgccggtcagggccgcctggcgcagg

SEQ ID NO: 3750 - DNA, 12889 bp, synthetic construct
  source 1..12889: mol_type = other DNA
  misc_feature 1..12889: note = Synthetic
cctccgccctgaatacccgtccgttccctacctggagacatccgtgccttccatcatgacatccacccccactgcggggaccacccagacggctgcttccgccccggtgcccctgccctcgtcgggctcgcgtcgggctctggccgctggcgcggcctggtcgctgcctgccatcgtcctgggcgccgcggcccctgtcctggcctccacggcctaggagctgacggctgtaccgcctggtggcagcgctccggtcccggggtgccgacgccgccgggcgggccgccgcgccgcgtccccgcgggtggggtgctgcgcgcctcatgacgtcgggcccgctcccgcaggcgcgggggcgaggaggagtggtgccgtcagccctaccggctgctggccccgctgcccgtaccgcggcttcggggcccggttcgccacatgctcacccagaacagcagacccacccgttcccgcgggtacggggagcccgggccgtcctgtacgagggatattctgtgtacgaggtaacgccgcgtgtgcacggcggcctgagacggttgccccgcacacacagtgttgtctataacgttattccgcgtgcagaatgttacggcccgcacaaagtattttgtgcgaccgtcctgcaagcggttcaggcgcaggccgccatggtctgcgccactgccgtccggtgcccaccgcctgcgccaccgccacctggcgcccgacgcccgctccgtgggtgggactcaggtggtggcgtcgcgtcagtacgtgtggctgcacctactgtgcacaccacggttgcgaccgtccggcggcatcgcgtcagtgcgagcggttgggtgccgtgccgtcctccaggccctggcggcgtcgcccggtacggcgtctgtgggcgaggatagggacatgacccccgcacccagcctccccgaccgcccggcagaccgacgggcggaggcggccgctgcccccgcctcggtggctggcccgtgcgcggccaggaccgccgggaacgtgggaagctcgggcgggacgtcgtcggtgactggcccgcgcgcgaccagacccgccctccgggaggtaggcgaccccgccgccagggccggctttaccgcagaggccggcaccccgtcctgcacggcagaccgcgttgcccgggaggatggcctcaccaacgccccggcccgtgcaggccgggagacggacgacccgtccacccaggccgcggccgcgtcccccgcagctggccctgcgaccggctcagtggttggtcctacgggcgccccgacgtccggtccagctgcgtccggtccggttgcggacgggctggctgcgtccggtccggctgcgggaagggcgacgcccccagccggttcccagccgtccgcgaccccggcctcccgcccgcccgccatgcccctggcccgcctcgtcgtcggcccgcaggacgcccccgccctggtcctcctccacggcattggcggcagcgccctgtcccaggccgacgccgtgctccactgggcggcacgcggctaccgcgtggtggccctggacgcccgcgggcacgggctgtccccgcgctgggagcccgaggagctggagcgggccggtgaggtgctggtccaggacctcattgacgtcctggaggagctggccgccgggtcccactccgctggccccgggaccgggggcgtaccagctggtgcgcgcctgcttcccgcccccgccggggccgggccccgtgcagctggccgggccagcgccgacgtcgtccgcagtatggctggtgccgtgcgtggcaccaccggtgccatgtacaacgtcgctgacattctgcgtcgtgtcgcgaccggacgctcccggcgcggcgcggcggccgccgacttcgtgtgccacgccgctggcctcgtgcgcgacgcggctggcgtcgtgcacaaggccgctggcgccgtgcgcggtccggacgcccccgagtccgcaggccgcgtcaccaggcggcgcagagcccgttctcacgacgaacaagtaccgttctcgcgagcaacaagtaccgttctcacgacgaataagtaccgttctcacggagggggccggggcggggcccgcccggtcgtggtcggccactccatgggcgcggccacggccatggtcgccgccgcacgccgccccgacctcgtggccggcgtcgtcctggaggatcccgcccgctacggcacccgcagccccgcggagctcctgcgccggggcgccgggcgtgagcgcgcccgggagagggtgtgcgccgacccggtcggggccgtgtcccgcgccctggacaccccgtccacccccgccgtcgaggctctgcccggggtgtgggcggaccagcgcaccgaccccgccctgctgcgtacaggcgtcaccgcaccccaggtgccgtggctggaggcgctcgcggccctgcgcgtgcccacgctgctgctcagcggcgaccgcccgggctcggcccgtgtcggggcccgggggcttgctgaggtcgacgccctgggcagcccctggctgcggaccgtcctggtccccggggccgggcaccagatccgccgtgacgccccccaggccttctacgacgccgtcgacacctggctggccgggctccgttaggcctgcacctcccggggaggtcgtgaacgcaactgggcggtgctccggcctccgacgccggcgcggcgccagcgccagccacaccccctccgcgagaacggtacttattgctcgcgagaacggtacttgttcgtcgtgagaacggtacttgttcgccgcgagaacgggcgggccccgggaggcctgtcgcgtcctccgacaggggcacgtgtctcctggcgtaaacctaggcaggtcatgcgatgccctggatgtcctaccaccgtccgtcgcccttgtgctcctgtgcgtgtcgcaatctgaggatcagaacgaggggcacccccggccgtaccggaacccaggcccctgacctgcgtggacattgagcgcacaaagacgggggtggggtggggtcggctctgatcctcagactgcgacagaacggtcgccccgcaccactcaggccgcgcataaacccggctacgggggtcaggtccgcctacggggagcagggcgcggctgggtgtgagggtgcgccgcgccgactcgggcataggcccgcctacggggccaggctgcgcctacctgccgccaccctctaggccagccgccccggaaggaggcgcggcgaccgtgccggacggggccggtccagggaccataggccgacccaggtggcagcgtgtcagatagagtgccccagagcactcccagcgatgacgctggcccgaccgcaggagcactcgatgaccccagccacgacgccccaccgcacccgccgtcctgtcgctcgcacccgcaggccccccaccctgggccgcaggcaggtcaccggcctggtcctgggcgtcctggccttcctggtccccttcgtcgtcgacgtgcccgacctgggtgagcagggcgagcgcatgctctcggtcttcctcctggccatcgtcttctgggtccttgaggccatccccctcatggccaccgccgtcctggtcatcgccctggaggtcctcctggtctccaaccaggccgtcctgcccgtgcccggggacgccgtcccctactccctgtacctgggggccctggccaaccccgtcattatcctgttcctgggcgggttcctcattgccgacggcgccgccaagtaccacctggacaagaacctcgcggccgtcctcatcaggcccttcaccgggtcggcacgccggaccgtcctgggtctcatgatcattaccgccctgctgagcatgttcatgtccaacacggccaccaccgccaccatgttcgcggtcatcgtccccgtcctgggggcgctgcctgagggacggccgcgcgcgggcctggccctggccatcccggtggcggccaacgtcggcggcatcggcacgcctgtgggcacgccacccaacgccatcgccctgggggcgctggaggacgccggctaccacgtctccttcggcacctggatgctcatggcggtcccgctcatgcttatcgtcctcctgggggcctggctgctcctggtggccctgttcgtgccccggggcttgggcctggagctcgacatggaggccacctggcacaccgaccgccaggccgtcaccttctacgtcatcgccgccctgaccgtcctggcctggatgaccgaggcgctccacggcctcaacgccaacgtcatcggcttcctggcggtggtggccctcatggtcacccaggtcatggacggcaaggacctggccgccctgtcctggccggtgctgtggctcgtggccgggggcatcgccctagggcacggcgtggggaccacgggcctggacacctggatcctgggactggtggactggggcgccatgagcgccaccggtgtggtcgtgtgcatgggcctgctggggctggccatgagcaacgtcattagccactcagccgcctccaacctcctcatccccctggccatgggcctggccacgggcatcgacggcctggaccccgtggtcattgccgtggtcctggccctggcctgctccctgggcatgagcctgcccatctccacgccgcccaacgccatcgcctacgccacgggggcggtgaccacgccggacatggctagggtcggggtggtcgtcggagtggtgggcacggtgctcctcgtcctcctcatgcccccgctgtggtccgccctggggctgctgggatgagccgggtgaccggacggcggccggcgggcgaccccggccaggcgctgggccaggacggcggccagcgggcgcctgacggcggccaggacaccccggcgcctcgccggacgctgggccaggacggcatccagggcccgggccaggacggcggccggttcagcggtcaggctggcatccagggaccgggccgagaggcgtctgagagcggtgccgatgcccagaccagcaccgacggccagaccagaggccagcccaggggacaggagctcttccccggtacccaggtcagcggtcgggacggcatccagggccagggcccggggtcccccgggacgcgccctgggccccgtcctgggacgcaccctgggacacgttctgggacggggcccccgaccctcctcgtcctcgtcgtctccccgacggacacgggcgcccaggcggcccacgaggtcgggcgccagctccactactgcgaggtggcccaccagcacagcgtcgaggagatgctggccttcgtggccacccggcccgacgccgtcgtccccctcatgatggtcagcgacgaggtcggcagcctcgacgtgctggcgggccggctccaggaccgccccgccctgcgcaccacccggctgctgctgctcaccaggcgcgacgagctcacccacctgggacgcgccctggacgaggactgggtccacgaggtcgtctccgttccctggacccccggcgccctggggcaccgggcgggcgcccacgtcacccgctggctgcgcgagaccctccccgacgacccccgcctggcccacctcgacgccgacacccctccggacctgcctcaggccagcctcctgtccaagttcgccggggacgacgacgagctcgtggccgagctcgtggccgcctgcgagcgagtgctgggaccccgcccccgcctccacctgcccaggggggtgcgcgtcacccgcgagggcatgccggtggacgccgtctacatcctggagcacgggacggtcgccctgacccgggtcacccgcgccggcaaggtcaccctccaccacgccacgaccggccgcattatcggcatcctctccctggcctcccagggcagcgccttcgtgacggccacgaccaccagcgaggtcgagctcatcctgctgtccgtggagcagctcgaccgggccctgcgaggggatcccatgaccggggaggcgctcgcggccctgctcatccgctccctggtggggcgcctggagcgcagcgagatcctccaggtggagaagatcgagctccacgccgccctggacgccgagcgcgcacgcctggagaaggagcgggcccggctcgccgaggccttagacgccctggagcaggcccgcctggagctcctggcgcaggagcggttcgcgacgctgggcgagctggcggcgggcgtggcccacgagctcaacaacccggtggccgccctggagcgggcgagcgcgcacgagggggcggcggtgtccaccctcctggcctcccacccccgtggggacctcgcgcgtgccgccctggagcgggcccggaacctgcctgcccgctccacggcggacgagcgggccctgcgccgtcgcctggagaaggctgtgagggaccgggagaccgcacggcgcctggtggcggccggggtggaggatcccggagaggcggctcgtctggcgcgctcgacggcggatctcgccctggtggaggcggcggccggggtggggcgcggggagcgcaacacggtcctggccaccgcccgcatccgctccctggtggccgccctgtccgcctacgtgcgccccgagggcggggcccaggagcgtgttgacgtacgcgagagcgtcgaggacgccctgcggctggtggcccaccggctcgatcacgtggaggtggtccgtgactactcccaggtgccgctggtaccggcccgggccggtgaactcgtccaggtgtggacgaacctcatctccaatgcggccgacgccctggcccggggggcgacggcagcggccgggagcgcccccgtggtggccgggagcgcccccgcagtggccgggagcacccccgacgcccccctggggccacccaccctcaccctgtccgtgcggccccaggacgggggcgtgcgcgttgacgtggtcgacaacgggccgggtattgcccgcgagcacctggaccggatcttcgagccgcgtttcactaccaaccacgggcaggtgcgctacggcctgggactgggcatgggcctggccaagtcggtcgtggacgcgcacggcggcaccattacggtggtctcccgcccggggcggacgcgggtgagcgtcaccctgccccctcagattccgggggcgctggcagcggctcccgccaaccccaaggaggagtcatgaagctggtcgtgctggtggtggaggacgagcccccggtccgtgaggcggtgctgggggacctggagcacctgggcgccacggtgcgcctggaggcggcccaggacgtcgatgacgcctgggcggtcgtcgaggaggtcgaggaggacggggacgagctcgccctggtcctgtccgaccaccgcctgcccgggcgcagcggcgtggacatgctcgtggagatgatgggggatcctcgtaccgccgccgcgcgcaaggtgctggtcaccggccaggccaaccaggccgacaccatccgggccgtcaacgaggcgggcctggaccactacattgccaagccgtggagggcggaggagctgtgcgaggtcgtgcgcgaccagctcaccggcttcgtcctggaccaggggctggacccgctcccgcacctgcccgcgctggacgccgtccgcgccctggaggccctgcgctgaccgtgggccgctggcgcgacgcctgggagggcttcgggtcctggcggggcccgggtgccgaccgcggcgggtcgcggcgaggacgccggggatggggtggcgtcgccggtagtctgaccgcatgtcgaagaagaagcgtcaggtgcgtaaggccgccgtctctgcccccaggccccagaggatcccgttcgtcgtccgtcctttcgagggcctgcccgcggaggaggacctggtggcgatgatgcagatcatcccggccgcctccatgggcgtgcgcctcaacgaggcccacggtgggagcgaggtcacgctcgtcaccgtcctgcccgagctcgcccaggggctcaggcgcacggacggcgaggtcctggttgccctccagacctccatccactccggtgacgcctcccgcgacgtcgccgccgcgctgctggccaccctggagctgggcagcggggcagccctgaggatgaagggcctgcccgagcccggtgaacgccttcaggacgtcctggacctgtccgtcacaccccggatccgtgtgagcgagacctttgacttctggctgaccgagaaggactccgccgaccccaaggccctggaggccctggagaacgccaggaaggagatggcccccactcgcccggtgcccggcgtcgagcacgcctactggtgccgtatgaacggcaaggagttcgtgcgctgggtgcgcggggaggacgaggacgacttctttaacgccctggcccgggtgcacgccgcgcgccagtccgccctggaggagggggcccgcttcattggcgccttccgtgcctgcggcctggccgtccccgtgtgggagctggtggccggcaccgaggccgaggagctgaccgagcccatgaaggccatgggggagcggctggaggaggcgctggccgtcaccggcccgctggacgccgacgcccgtcgcgccaaggccggaattatctcgaggcaggtcagcctctaaaggcgcctccttacctcgtcctcacctcgtcctctctcctctccgccttctccgcgagaacggtacttattcgccgtgagaacggtacttgttcgtcgcgagaacggacgggttgttcgtggggggtggtcgggcgctcactgctcgtgaccgggcgttcacgggaccaggtaccggctgacccgccgaggccgtccccgggcgcggggacctggtgcccgcctcaggccagctgcctaccctggcccggccctcagcggggcagcatgacgctcattcccagggcgaaggggaacccggggcgcaggacgcactgggcgacgggacgggccatggaggccagggcgacgccgtcgagcatctcgtcagcagggccggacagggagccgggggccaggatgcgctggtaggggacctcgaggtccaggaacgtcatcccgtcgcggcgtaccgccttccgccaggtcctcgtcctcatctccatgagcgtgcccaggtggaagtgcatgacctggttctcgtccagctcgctggggacgctcaggaggtggtgggcctcaggatcctccggggcccgcagggtgaacaggaggatcgccccgtcgcgggcggcccgcagcatgaggcgccccaggtacaccgtgaaggcgtgctcgttgaggctggtggccatgacctcctgcacgctcagggagcgcgagaggggcacgagcgcgcccgccccggcgtccttgaccgcccgcctgccggtgggggtggcggcgtgcaggcgcagggagccgtcgttctccagggtggcgacctccaccttctcctgccagcggcctgagctcgcggggccgtcctgggtgcgcaggaggcccatgcccaggacgtcggtgagatccgtgcccggccggtgccaggtgatcgtggtgccctcgtgccacagggggacgacgccgttgaacggtaggccaaagcgcacggtctcagtcatggggccaagcctacggggcggtccccggcagcggccgggggcgcgcggtgggacgacgggcgtgggagcagccggaagcgggcgtggtcggcccggatgtggtcggcctgggcgcggacggagctgctcctggtggccgggtgcctggaaggagatcgcttgcaccgtcgtgccgtacgggttatactgactctcgactgattcccagtaagcctcaccgtgtttgtgagtgctgaatgctccaccggttcgccggtctgactgcctggtcctgaggggccaggcagttataattttgtgactacctcgtccgtcatggatgtgatctaatagtgtccatggctgcaatgcgtatccgtgtcggcgtggacgtcgggacacactctgtcggctgctgcgcgatcgcagtcgatccggcaggagccccggtaaggatcctgtccgcactgtccctgatccatgacgccggtatcggtgaggacggcaaggagaaggccaccagccgacgtgagcttgcgggcgtcgcccggcgtgcgcggcgtctgctccgtcgtcgtcgcaagcgcctgcagcagcttgacacccttctggtcaggctcgggtacccgatcgtggattttgccgagcaaaaggatccttacctggtgtggcgggtgcgcgcccagctggtgcaggaggtgtttcctgagaagacccgcaggtatgcgatctcaatggctctgcggcatattgcgcggcaccggggctggcgtaacccctacgccagaacggagtcgctgctggctcccgctcccgagtcagactttatgagggcgatgcgtaagcgggtaatgaatactaccggtgaggttctggacgaggggttcacgccggggcaggcgatggccgtcgtggccctgaataatagggtcgctatgaggggccctgatggcgtcctggggaagttgcaccagacagataatgcaaacgagatcaggaggatctgcaagacgcagggagtgtccgagcaggagtgcagggagctcattctggctgtcttcgcctccgagtccccgcgaggatcgagcaggagcagggttgccagcgaccctctgcctgggcaaggcgatttcctgcgggcaccgaagtgtgatcctgagttccagcgcttcagggtcatctcgatcgtggcgaatctcaggatcgcgggacgagacggggcgcagcgccctctgctgcctcgcgagcgtaagaaggttgtgactttcctgcttgagtccatgtcggaggatctggcgtggggggacgttgctgagcgactcggtgtccgacgccagaacctgcgcgggacggcttcaatgacagccgatggtgagcgagccagtgcgcagcccccggtggacgtcaccaatcaggtcatgggcagctgccgtattaagccgctcagactgtggtgggcggatgcggacgcggagcgccgtggtgccatggtccgctacctctacgagggtgctgacgactcggagtgcgcggagttcctggggagcctgtcagaggaggagcagggaaagctggactccatccacctgccagctgggcgcgccgcctactcgcgtgagtccctggcactcctcagcgagcagatgctggccaccgacgacgacctgcatgcggcccgtaagcacgtctttcacgtggacgactcctggaagccgcccgcggaacctgtgggcgccccagtgggcaatccctccgtggaccgcacggtcaaggcggtggcacgtttcctcaacggtgtcgcggacgtctggggaactcctgaggctatccagatcgagcatgtacgcgcaggcttctcaagcgagcggaccgccagggagcttgaccacgacaataatcgccggttccggcagaaccaaacggctgtggacgatatcaagaaggcgtacggtatccagggcgaggtccgccacagcgacgtcgtgcgatacactgaaggttattctgggatcgtccgagtgtgctggtgggactcctgggacgacccagggcgggggcgtgtccaaatctgccacaaaggcgccctgggccgggatcagccgcgagaagaagcgcggaatatcaacgattctcttcgcgcgctccggcccgatccgggcctttgtggcagatttggacaacttggcgccgtcgcgggccccgggaggggccgccacgtgccgaccggcgaccacgacgggcactccggcgagcgaacggggcccacgggccgcgtcgctggcctccccggacgccgcccggcgccgagacgtgcacttcgcactcgaaagtgcagttccaaccgtcactttcgagtgcaaaatgcacctctcggcaaagaagcggactgatcgcccctggtgcggactgcggcgcccgaccccgatggggtgcatgagactcgtgggacgcccggggcagtctggtgatgatccaaggccgcggccccggagcctgttgagtcaggctcgcgccatgtgagctcagctcgcacgatgtgagctcagctcgacaaaatccacctgagctcgattcatgtgagctcagctcgcacaatgtgagctgaggtgacatcaccaattcgactcccccgggggcgggcgcgggagaacggagaacgggtcagcagcaggcgtacgccgcgcaggccgagcctccgggggcgggcgcgcgggagaacggctgaaggacttcaagcccgaggtcccggctggctactgtctgggacgtgcggccccgcgcctccggggcagctggggaggagcgttgaggctggcacggcgcagttgacgatgcgacgcgtctttggggcaacttcgccggaatgggccagccaggattctcttccggcgaggggaggggtcggcgcggcgccgtccaataggctggatccatgagcacgcctgccgcctccgccgcctccgacacgcctgccgcctccgccgcctccgacacgcctgccgcctgcgctgtccccgacacgcccaccgccccggtcctcatcgccgtcacgggcgcgaccggccgcatcggcggcgccgtcgcgactctcctccacgagcgcggcgcatcgctgcgcctactgctgcgcgacccctcccgcaccccgcgatgggcccgcgacgcgccgtccgtcgaggccgccgtcgcccagtacgacgatggcgaggcggcgcgcacggccctggcgggcgtcgacgtgctcctta

SEQ ID NO: 3751 - DNA, 9382 bp, synthetic construct
  misc_feature 1..9382: note = Synthetic
  source 1..9382: mol_type = other DNA
ggccagctgggctccgagcactccgccgccgtcctggacctgctcggcgacgtgcacgcggacgggcagaccattgtcatggtcacccacgacgtgcgctccgccgcccgcggcgaccgcgtgctctacctgcgcgacggccacgtctgcgccgagtgctccccgaccggcacgaccgaccagcgcgcccaggccctcacctccttcctgaccgggatggggtggtgaggatgctgcgatcaccgcgatcactgcgatcaccgcgatcactgcgatcactgcgatcaccgcgatccttgaggtcactggcggcgagcccgtctctgctgctggcccgccgcgccctccgcaagcacccgggcctggtgggggccgtgacggtcctgtccctcatcgccgggctgctcatgaacgtcgggctggtcatgatgccccagcacggcgcgtacctggaacgcaaggcagatgagtggaactcccccgacgccgtcgtcctcctgccccagggcgagcaggccgacgccgtcgaggacgccctgcggtccgatgagcgcgtgcgcgacctggagaccacgccgggcgtcaacgtgcagggctccatcccctacgccgactcgacgctgccctccatgttcctcttctacgacgcagacgcctccacgcggatgggacggtgggacgtcgcctcccggctcgatgatccggtggagaatcccgtctgggtgccctccactctccaggccgcgggcggctacgagctgggcgacgagctggtgctcacctctcccatgggcgagcgcaccttccacatccagggcttcaccgagtccacatacggcggcatgccgtcgatcggcctgctgtggctggggttgccgagcagggactacgaggcgctcgagggcgaggcgcgggagcacatggccggcctccaggccgagctcgccgcaggcggacaggacggcaccggcgtgcagcaggcccggctccccggctgggtgccctccacactcatcaaggtgcagacccgcagcgccgaggaggccggcagcctcaccggtgaggttctctcgcgcctggatgtggtctcggcctgggacatggaccgggcgaccctgtccatggccaaccagatgtcggtcggcctcatctccgtggtcgtcttgctcttctcctcgatgatcgcaggcgtggcgctgctcatgctggccttcatgctgcgcggtgccgtccgcgaggacctggagacggtgggcgccctgcgggccatgggcttcaccacaggcggggtcgtgcgccccatggtgctcctcttcgcgctgacggccgctctgggcgcggcggccggggcggcctcgaccgcacgtgcgggcgagggccaccggcccgtgatctggagggtgaggagcaccagggtcgggacgatgtagacccaccagcccacgacctgcaggacagtgggctggaggttgagctggaacatggcctggagcagcacgtagagccagtggaagggcgaggcgccgtcgggcaggtacagggacaggtcccaggcgtggttcgtgtagccgggaagaacattggcctcctgcaggtcaccgacgccgtaggcgacgatgccggcggcgacgacgacgaggaagtagccggtcacggcgaagaagacgcgcaggttgatgcgcaccgcaccctggtagatgaggacacccagcacgatggccaggacgaggccggtgatgacgcccgctgtcgtctgcatggtggagctctcaatactggagcgcacggtggcccacacgaacagggcggtctccactccctcgcgcccgacggcgacgacggcgatccagacgacgccccagccggagctgcctgcggagagggacttggacagcgacccctccagctcgcccttgagctcacgggcgttcttccccatccagaagatcatccaggtcaccatgccgacggcgacgaaggacagggtgccgccgaggatctcctgggcctggaaggtgagggtcttgggaccccaggtcatgatggcgccggcgaccagcgggatcagcgccgccagcccgaccccgagccacagcttgggcagggcatcgcggcggtcggccttgacgaggtaggcgacgatgatgctgacaacgagcgccgcctccaggccctccctcagggcgatgagcaggttggcgagaaacactcgacctccaagtcacgaatcaatctcaagtcacgacggtcgaggtaagcctagccttagacgatcccaccaccaaagactcgcgtttctcgcgttcgtgtgggatgaagcccaacctggccggtcgcactggcccgggtcgccccaggaacaacctggggaaccccagggcgcttgtccggccggggatgccggccagtcggcaccggttccttgcccccacgctcttctgtcacctcctgcgctcgcgcaccgcaaccgtcctgagaccgaagaagcaacttggaactgctagactgacagtgactgattcccagtaagccccgccatgtttgcggggttgaatgctccaccggcttgccggtccaactgcccgatctcatatcgagaccgggcagttttcttacaggaacctcatgatcccctgggtgtggtatgtatttctcatgcctgctcaccaccttcgcgtggggatcgacgtcggcacccattccgtcgggctcgcaacgctgcgggtcgacgaccaggggacccccatcgagctcctttcagcactgtcgctcattcatgactcagggatcggcgaggacgggaagaagaccgcctcgactcgcaaggagatctccggtgtcgctcgccgtgcccggcgcttgctacgacgtcggcgcaagcgtctccagcagctcgacaagctgctgctcgacctgggcttcccgattccggatctgggcgggcagaccgacccgtacctggtgtggagagtgcgcgcccagttggttgaggagacgctgcccgaggagctgcgtggtccagccatctccatggcggtgcgccatattgcgcggcatcgggggtggcgcaacccgtactcgaaggtcgagtctctgctgtcgcccgcagaggactccccgttcatggaggcgctgcgtgagcgcatcatgacggggccgggcgagattctcgacgacggcatcacccccgggcaggcaatggcccaggtggcgctgagtcaccgcatcaccatgcgtggcccggaggggattctcggcaagctgcatcaaagtgacaacgccaatgagatccggaggatctgcgaccgccagggcatctcttccgatgtctgcaagcagctgctgcgagccgttttcaaggcggagtccccgcgcggctcagccgtctctcgcgtggctcccgacccacttcctggtcagggctcgttccggcgcgcgccgaagtgcgatccggagttccagcggttccggatcatctccatcgtggccaatctccgcatcagcgaggccaacggcaaggatcggccgctgacggcggacgagcgtcgtcacgtaaccaccttcctcctggaagaccctcgagacgacctgacctgggttgatgtggccgagaaactgggggttccccgccaggctctgcggggtaccgcgaagctcaccgcggatggtgagcggtcggctgctcaacctccactgaacatcaccgaccagatcatgcgcaagaccaagatcaacgcattgaagacctggtgggcggaggccgatgcagagcggcagggtgccatggtccgttacctctatgaggggcttgaggactcggagtgcgctgaggtcattgccgagctgccagaggaggaccaggccaagctcgattctctccacctcccggccggccgcgcagcgtactcgcgggagtcattgacggccctcagtgaccacatgctggcgacgaccgacgatcttcacgaggcgcgcaagcagctcttcggcgtcgatgactcatgggcccctccggctgaatctgtgggcgccccggtgggtaacccgtcagtcgaccggactctcaaggccgtcgcacggtatctcgccgcggtcgagaatgtgtggggtaagcccgagatcattcaggtggagcatgttcgcgatggcttcgccagcgaacgcgctgcaagggaacgggaccgggcgaacaaccgtcgctatgacgtgaaccaacgcgcgatcaaggagattcagcagtcctacggcgtggagggacatgtacgtccgggcgacgtcatgcgctatcacgccatcacattgcaggactctgcctgcttgtactgtggggggacgatcggctatcacacctctcagctggaccacattgttccgcaggccggaacaggctcgaataaccaccgtgagaatctcgtggccgtctgcgagcgctgcaaccgttcgaagtcgaataccccgttcgcggtgtgggcgcagacctgcgggatccctgatgtcggggtgaaggaggccattggccgggtgcgcgcctggcgcaaccgccctggcggcatgtcgcctggtgacttgaagcgcctcaagaaggaggtcattgctcgtcttcagcgcacccaggaggatccggagatcgatgcgcgcagcatggagtccgtggcttggatggccaacgagcttcgccaccgtattgccgcggcctaccccgacgccgatgtcatggtctaccgcggcgctatcactgcggctgcccgcaaggcggcaggtatcgactcccaaatcaacctgatcggtgagaagggacgcaaggatcgccttgatcgccgccaccacgccgtggacgccagcgttgtcgccctcatggagaggagcgctgccaagactctggcggaacggtcgagtcttcgttgggcgcagcgtcttaccggccaggaggagacctggaagcagtacacgggctcgaccgtgggagcacgagagcacttcgagatgtggcggggccacatgctgcgtctcacggagttgttcaacgagcgcctggccgctgatgaggtgcatgtcgttgagaaccttcgcctgcgcctcggtagcggcaacgctcacgacgacacgatccggaagtatgacactcctcggctcggcgacggcctgtcagtcaaccagatagatcgagccagttcgcccgcattgtggtgcgcgctcacccgggaggtggacttcgacgccgagaacggccttcctgccagggaggaccgtttgatccgagttcatgggctagagctgacatccaacgaccgcattgagctgttctccaagaagcgcggcaacgacgccaaggagaagcctttcggggctatcgcggtacgcggcggctacgcggagatcgggtcaacgatccatcacgcccgcgtctaccgcatcgagggcaagaagcccatctacgcgatgctccgcgtcttcactcatgacctgctcagccagcggcacggagatctcttctccgcggtcgtcccaccccagtcgatcagcatgaggtgcgcggagccgaaactccggcaggccatcgctacgggcaacgccacctatctgggctgggtcgtggtgggtgacgagctggagatcaacgttgactccttcacatccgggcagatcgcgaacttcctgaaggagtaccccggaacaactaggtggcggatcagaggcttctataacgaccacgtactcagactgcgccccgcgcttctatccgcagaggggcttatcgacgccagcgaagcggttagcaagacattgtcgatccccggctggcttcccgccattaaccaggttgcggccactcatccgcgcgtgatccgccgggatgcgctcggccgcgtgcggaaatccagcagatcggggcttcccgcgtcctggatcatcaggtagggatccctggtggacacggcctggcgcatcattgactgttcgtcgttggaggggcgaatcacctcggatcgtggggcgatctgtgtccacccagacgacggcggtgagcgtcgggtcccaacggccgatgtggcgatcgtcctcatgggtccccacgtgagcttttcgacggctgtcgtgcatcgcctgctgggcgcggatgtcgtcgtgctgttctgcgactggcggggtgtccccgagggcgccgcctatccgtggcatgagcatggtcgcgttggggccaggcagctggcgcagtcgcagctctccgagccgcggaggaagaatgcgtggggccgcctggtgagggcgaaggtgttggggcaggcgactgttctgcttcagaaggatcgtcctgcggcggcccggctcaaggagatggcgcgttcggtgcgctcgggtgacccggagaacgtcgaggctcatgccgctcgcttgtattggtcccggctgttcgcctccgagggtgattttctccggcgcccggaggcggaggatcatcgcaacagctgcttgaactacggttatgcggtcctgcgcgcgcacgggatccgggcggtggtgagcgctgggctcagcccgacgctcggcctgttccatcatggacgcggcaatatgttcaacctggtggacgacatcattgagcccttccgccccgcggtggatgatgccgtactgcgcctgactcctgatgcgagccccgcggagcggcaggtgaagcaggttctggttgccgcggtacaacagccgttccgtgacgacggcgctacgctcccaaccgtcttggaagagctggctcagcacttgggccagtactgtgaaggggatcgagcccgtttggatgtcccgtcgtggaccggtccaaggcgtgagtcctgatggcggatgatccagtgtggtgcgtggtcatgttcgatctgccggtggcgacgaagaagcagcgcaaggaggcgactcgcttccgccacctcctcctggatgagggcttctggatggcgcagtacagcgtttacgtccgctactccccgaccgtggctggcgagcgccgtagggcaagtgcgatcaggagcaacctgccgcgcggcggcgaggtgcggatcctgtacgtcaccgaccgcgagtggtcgcacgcgctctgtttccgcaacgaagaacccgtcgaggctgagccggagccacaacagctcatgatcttctgacccctgacgaggcgtttgtgcaggtcagacccccttgatagacgtttctgaagtctatcaaggggtctggtgactgattcccagcgagcgtaccagcgcccgtacttggtgccgaagtctatcaaggggtctggtgactgattcccagcagcaggctatcgacgccagcgacgcgacgaagtctatcaaggggtctggtgactgattcccagccgatcacgaggcggggcttggagtccccgaagtctatcaaggggtctggtgactgattcccagcatgattacctcactgcccccgcgctgcagaagtctatcaaggggtctggtgactgattcccagccctataagggaaccgtcattagaaccacgaagtctatcaaggggtctggtgactgattcccagcacggtggcgtggtagtcacggaacgacagaagtctatcaaggggtctggtgactgattcccagcccctcaacggcatcaacgtcatcaaggggaagtctatcaaggggtctggtgactgattcccagccccgcgctcactacagcgaagacgccacgaagtctatcaaggggtctggtgactgattcccagcgcgccatcgacactgccgtcatccacgggaagtctatcaaggggtctggtgactgattcccagcgtggaggtgaggtacgtgtagccggccgtgaagtctatcaaggggtctggtgactgattcccagcttgcgggcctccagctcggcgaggtggggaagtctatcaaggggtctggtgactgattcccagccggccgacacggtgtcggtcacgggccggaagtctatcaaggggtctggtgactgattcccagctacgggccgctctgcaccttgcctgagtgaagtctatcaaggggtctggtgactgattcccagcagttcatcgacatcgttgaggatgtctcgaagtctatcaaggggtctggtgactgattcccagctcatcacgaagcgttgggaggccgcgcagaagtctatcaaggggtctggtgactgattcccagcccaacatagatcccattggttttaggaagaagtctatcaaggggtctggtgactgattcccagcgcggacaggatgatgtcacccgcctggagaagtctatcaaggggtctggtgactgattcccagcgcgctcaccatccccaccgatgagcccggaagtctatcaaggggtctggtgactgattcccagcgtcgccggccgcgacgtcgagatcggcagaagtctatcaaggggtctggtgactgattcccagctcgctcatcgtgcacctgctgcggttccgaagtctatcaaggggtctggtgactgattcccagctaagatctgagctcctcgctccatgaacgaagtctatcaaggggtctggtgactgattcccagcttcgatgatctgacctccaagatggacggaagtctatcaaggggtctggtgactgattcccagccgttcgcgaaggtgacgacacagatgctgaagtctatcaaggggtctggtgactgattcccagcagtctccatccccagcaagccgcgtctggaagtctatcaaggggtctggtgactgattcccagcacgaccagaaccatacgccacacacacggaagtctatcaaggggtctggtgactgattcccagcaggtcgatgagagcgttgcggtcgccgcgaagtctatcaaggggtctggtgactgattcccagctcggtgtcgctgggggtatgattgcggcgaagtctatcaaggggtctggtgactgattcccagccaggcctcgctcagggcgacctgggcgggaagtctatcaagggttctggtgactgaatcccagcggagaggtggcatgtgcgcagggcgacgggctaccggcgtcatcgggaaaaacccgagccgacgttgaacaagtggcagaacccgaaactggtttcgcacagagtccgaggatgtcacatggcgtcgggatttcgggcgccaccgccccatcgaggacttactttcggtaccaggactgcgttctcccccagatgactgcggggatatcccagtagcctggaggacaacgcagtcctcgatcggaaagtacatcctcggtggcgacgcaggcaacgacaacacgacgggcggtgcgccagcgcaccgccccgggaaggcgggtgggggcgagggcgcgccgtcggcg

SEQ ID NO: 3752 - DNA, 5456 bp, synthetic construct
  misc_feature 1..5456: note = Synthetic
  source 1..5456: mol_type = other DNA
cgtcgtgcccccaggaccgtcgcggcgccggggcgctgcgggcccaggcgatggcggcgcgcacgtgggcgtggctggatacccactgcatgcggctgacgtagagggcgatgacggcggcggggaccaggacggcgagaaggggaagggaaccggtggccgggtcgtcgtccaccacggccgagacctggatgcccgtgacgagaaggatcagcggcacgagcacctctcgtacgaacggtgtggcggaaccgcggcggaggaaggcggtcgagagcatctcgacggcggcctcggcccgccagggggcgcgctcggcccgctgggtcgaggtggggccgtcgaggtagggagtgctcagagcggttcccctggggtggatcgaaccattgccgttggtcgcgacggtgggccgatcggcatggacgcgagggatatcgccggcagcggggttggtcatggcctcacgttactgttccggcacgattcgcgatccagccgccgcccggatccgagcgcaggcgaccggggagggcagccctgcccctgcgatattcgcagacgagtatcgagtatgttggatgaacaatacgagatctgcgggcgcgagtaccgcgtcgctccgtcctgatcgccgcctccgccggagccgcggccctcggagtcaccgcctgctccaacggctcctcgccgagcagcggcggcggaaccgtgcaggacgacggcgccaccgccactgcctcctccaattccgcgtcatccgctcccgcggccggccaagcagatgcccccaccctggagagcctcaccgcggaagtgggaggcgcattcactcaggagacgtaccacgactcggacaccagcaaggaactcgccttcaacatattccttcccgaggggtactccagcaccggctcctatcccctggtgcactccgatgccagctgcgtgtcggaggatcccaccactttgctgtcgcagtacggcgccctcatccaggcgagcagcgtcacgcaggcgagcgaatccgtgcatcgtcgtcgtgccctcctacaccgagacggtcctggacgaccacgacgggtacaccacgaccgactggctcgacgtcaccgcccgcttcatcccctggctccagatcacgtacctcgtggcccccgctcgcgtctacggcaccgggcagtccatgggctgcatgatccatctcgtgctggcgggacggcagcggctcccccacgcaccgcccaggcccaggctgcatgatccatctcgtgctggcgggacggcagccggagctgttcaccgtcctcatgctcgtcgacgggcagtgggacaccgccgagctccccggtcttgaaagctccacattcgtctaccacgtcgcgggcgaggacgacagggctccgaccggccagaccgaggtcaagaacatgctcgcccaagcgggcgccgacgaggagtgggacgccacggctgatccttccgtcctccgccggcagaagcaggccctgctcgacaagggggagccgcggaacttctccaccttcgccgcgggcacggtgctccgggccgatccgaacaagcagatggagcacatggcctccttcgagcccgcctacaagctcacgggcctgcgcacctggctgctgtcccggcgcagggagtgagcggattccaagacacgcgggcgagggccgagcggttcgaggctctttcggccatcaacagaggcgcctcgtgctatacttgcccgtgactgattcccagtaagcctcgccatgtttgcgaggttgaatgctccgccggttcgccggtctgactgcccgatctcgtagcgagatcgggcagttttctcgctatggtctcagattctcctgactgtggtatatatctctcatgcctactcgccgcattcgtgtggggatcgacgtcggcacccactccgtcgggctcgcaacgctacgggtcgacgaccaggggacccccatcgaactcctctcagcactgtccctcatccacgactccggaatcggagaggatgggaagaaaacagcgtctactcgcaaggagatctcaggtgtcgcccgacgcgcccggcgcctgctgcggcgtcggcgcaagcggctccagcagctcgacagggtgctgctcgacctggggttcccgatccccgaaccgggcgagttcctcgacctgggcggacagaccgacccgtacctggtgtggaaggtgcgtgctcgactagttgaggagacgctgcccgaggagctgcgcgggtcggccatctccatggctgtacgccacattgcgcggcaccgcgggtggcgcaacccgtactcgaaggtcgaatcgcttctgtcccccgcagaggactcccccttcatggaggcgttgcgcgaacgcatcatgacgggcacgggtgtccttctcgacgacgacatcacccccggtcaggcgatggcccaggtggcgctgacgcagcgcatcaccatgcgcggccccgacggtattctcggcaagctgcatcagagcgacaacgccaacgagatccggaagatctgcgcccgccagggcatctctcctgatgtctgcaaacaactgctactggcggttttcaaggccgagtctccacgtggctcagccgtctcccgcgtggctcccgaccctcttcccggtcggggcgccttccgacgcgcgccgaagtgcgacccggagttccagcgcttccggatcatctccatcgttgccaatctccgtatcagcgagactggaggcaaggacaggccactgactgcggacgagcgccgtcgagtggtcaccttccttctggaagagccgcgagatgatctgagctgggtcgatgtggccgagaagcttggaatctcccgtcagactctgcggggtactgcggcactcacggtggatggcgaacgggcagccgcacagcctcccgtcgatgtcaccgaccagatcatgcgcaagaccaagatcaggtcgctgcggacatggtggaaacaggccgacgccgaacggcgcggcgccatgactcgctatctctacgagggacttgaggactcggagtgcgccgaggtcattgctgacctgcctgaggaggatcaggccaaactcgattctcttcatctcccagctggccgcgcggcatactcgcaggagtcgttggccgccctgagcgaccatatgctggcgacgaccgatgatcttcacgaggcgcgcaagcaggtcttcgatgtggacgactcatggtctcctccggcggaacctgtaggggctccggttggcaacccgtcagtcgaccggactctcaaggttgtcgcccggtacctcgctgcagtcgagaatgtgtggggcgcacctgaggcgattcaggtggagcacgttcgagacgggttcgccagcgagcgtgcggcacgggaacgagaccgggcgaacaaccaccgctaccaggtgaatcaacgcgcagtgaaggagatccagcagtccttcggtgttgagggacatgtgcgatcaggcgacgtcatgcgttatcacgccatctcactgcaggactgcgtctgtctgtactgcggtgacacgatcagctaccgcacctcccaactggatcacatcgtccctcaggccggaacagggtcgaacaatcatcgtgagaatcttgtagccgtctgcgagcgctgcaacaggtcgaagtcgaacaccccgttcgcggtgtgggcggagacctgcgggatccatggtgtcggggtcgaggaggccattgaccgcgtacgcgcctggcgcaaccgcccggtaggaatgtcaccacgcgacctgggccgcctcaagaaggaggtcatctctcgccttcgccgtactcaagaggatccggagatcgatgcgcgcagcatggagtctgtggcatggatggccaacgagctccgccaccgcattgccgccgcctaccccgacaccgacgtcatggtctaccgcggcacggtcaccgctgccgcccgcaaggctgccggcatcgactcccggatcaacctgatcggcgagaaaggacacaaggaccgcatcgaccgccggcaccacgccgtcgacgccagcgtcgtcgccctcatggagcggggtgtagccaagaccctggcggaacggtcgaatctccgctgggcacagcgcttgaccggccaggaggagacctggaagcagtacacgggcctgaccgtagcagggggtcggcaaagtcgggtcaggtgcttggctgggtgatgagcttgatggctcgttttgggcgtcgtgacagggatctggtggtcgaggcgataccggcgccggggccgtggaccaggcggatgaggccgatggccaggttgcgcagggcggccatgatctcggggccgttacgggtgcgcagctggtggcggtcctcatcgaagaccacgtccctgacccagtggagccggttctcgattccccagtgcccttggacccaggccgcaacctgctcgggctgagcctgctccataggcagcgagcagaccaggtagaccacctcaacggttgtcctcttggccttaccgttcttgcccggactcttacggttcctggtggttctcgtgcgccggacctgaagcacctgagccgcctcagggaagtcgacccaggcgggtgcccaggcggccttgacggtgcgtcgcacccgccgcccgcgagaggagtcaacgctcgagacggacgggacgtccttccagggaagcctcttgagcgtcctgcgcacaccgggctggttgttcttaacagtgaacacgtagtgaccacctcggccgacgatccactgggcggtgcctgtctgggtgtgcatcgcatcggcgctcaccaccgccccgcccaggtcgaggggctcgagaagctccctgagcgccgggatctcgttggacttgtcggctacccgcatctgggtcagcacgacaccggtggcttggtccagggccgccaggaggtgcggcgccgaggcctgccccaggcgggccccgcgcacggtcttgccatccaccgcgatgactgttcttccctcgatggtgccggtgcgagtgcagtaccaggaccttaaatgggcgttgaggtcggtggggtccaggtcctgcaggaccctgcgaatggtcgactccgacggcagtgcctgccccgcctccaaacccagggcctccaggtcggcggcggtcaggtcggtggtgtgctcccagatggccgtcaggctccggcagccggcgagcactccggtcacggccagggacaggaccgcgaacaggctgtggcgcacaccccgccgatcacgcgggtcttccacattcttaagaacctgggccaggggctggcgcgacagagcggtcgtggtggaagatgacatggcggcgtgacctcgctggtgacgggattgagtagacgccttcatcgtcaccatg

SEQ ID NO: 3753 - DNA, 4900 bp, synthetic construct
  source 1..4900: mol_type = other DNA
  misc_feature 1..4900: note = Synthetic
gaggagttcggggcggcggacctgagcgaggacatgagcgaggagatccggcgggtcgagcaccactgagcggggttgtgcaggtcgaacgcgaccaccaccatgactccaggacagcgacaggacggcttcttgccagaacgcgacacaacgcgtaatatgccctttgactgattcccagtaagcctcgccgtgattgcgaggttgaatgctccgccggttcgccggtcgcgtctgcccggttctcgtccggatcgggcagacgcacacacaactaccacgacccagccgcggatgtggttaaatacactacgtgaccactatgcgcatccgcgtcggcattgacgtcggaactaattccgttgggtgctgcgccctcgtcgtcgacgaggcgggggcccccacaaatattctgtcctgtctatccttgatacatgactccggcatcggcgaagacggccagaaaaccgcttccagtcgccgcgagcagtccggtgtcgcgcgtagagcacgccgcctgctgcgtcagcgccgtaaacgcctccgacaactggacgcccttttagagaaacggggatacccgatcgtggacccctctgctcagaaggatccctacttggtgtggcgagtccgtgccaaactagcgcaggagaccctcccggaagagagccgcagatacgctctctcaatggcactgcgccatatcgcacgacatcgaggatggcgcaacccgtacgccaatgtccagtccctcctgctcccggcacctgagtccgaattcataaaagcaatgcgtcaacgaatcatggagaagacgggcgagatcctagacgaaagcatcacacccgggcaggccatggccgaaacggccctgaccacctcgatccccatgcgagggccgaatggggttctgggcaagttgcaccaaacggacaacgccaacgaaatcaggcgaatctgcgagaagcaggggatctctgctgaagagtgcaaagaactcctcttggcggtcttcgcctccaagtctccccggggctcctccctgggccgcgtcgcatctgacccgctgcccggacaaggcgggctcaagcgggcaccgaagtgcgaccccgagttccaacgcttcagaatcatctcgatcgtcgccaacctgcgagtaaccgagcagaacaagggcagtcgaccgctatcgcccgacgaacgcgaacgtgtcgtgaactttctcctcgaatcgacatcagaagaccttgcatgggcagacatcgctgaactgctcggcatccgccgccaggacctgcgtggaacagccacaaccactgcggatggagaacgcgccagcgcccagccgcctacggacgtaacaaatcggattatgagcggctgcagcgtcaaagcactgagaacttggtggaagaaagcggacgccgatcggcgcagcgcgatgatcggttacctctacgaaagcgcagaagactcggagtgcgccgacttcctggggagcctgacggagaaagaacagggcaagctggactcgctgcaccttcccgctggccgtgccgcctactcacacgactcactggcgcgtttgagtgagcggatgctgcagaccgacgatgacttgcatgctgcccgtatgcatgttttcggagtcgacgacgcatggaggcctccggtggaggccatcggcgcccccgtcggcaatccctccgtggaccgcaccgtaaaagccgtagcacggttcctgaaggccgtggataatgtctggggatatcctgaatccattcagatagaacatgtgcgcgatggcttcgcaagcgagagaacagctcgagagctcgaccgagagaataaccgcaggttcaagcagaaccaggataccgtaaccgagattcagaaagtttacggcgttcagggggaagttcatcgcagtgacgtcatgcgctacaccaccgtgacgcagcaggactgcacgtgtgtctactgcggtagtaccatcacctacctgacctgccaacttgaccacatcatccctcaggcgggaatcggctccaataatcatcgggagaatctcgttgccgtgtgtgagccatgcaaccggtccaagtcgaatctttcgtttgcagtctgggcagagaaatgcgatgctccgggagtcagcgtggaagaggctgttgcccgagtccggaagtggaggaacatccaacccgggcgcgcccaggccactcgattgaagaaactccagaaagatgttatcgcccgcctacgacgtaccgacgaggatccggccatcgatacgcgcagcatggagtcagtggcctggatggcaaatgagcttcatcagagggtaaagtccgcgtatccgtcggccaaggttgccgtttaccggggttccataacggcgggagccaggcgagcagcaggaatcgactcacgtgttaatcttcttggcgagcgagggcgcaaggaccggctggaccgtcggcatcatgctgttgatgccgccgtgatcgcgatgatgtctccgggcatcgccaagactctcgccgagcgctcaaacctgcgctggtcggaatggctgtccggcaaggtggagacctggaaatctttcaccggcgccactcccggcgcacgtgagaacttcgggcctggcgtcagcatatgcttcgacttactgagctgcttaatttcgcgatcgcagaggaccggattcatgttaccgagaacttgcggttgcgactcgggagtgggaacgcccacgacgagaccgtgcgtcctctgatactgcaccgattaggagaaggtttcacctcagcacaggtcgacagagcctcctcgcccgccctgtggtgtgcgttgacgcgagagctagattttgatttcgagacgggactgccggcgtcagagaatcgcgttatccatgttcatggaaaaagactgaacgctgacgacaccgtatcattcttttcaaagaagtccggagacgactccaaggagagacctttcgcggcaatttctgttcgaggtggattcgcggagatcggctcaacaattcatcacgcacgaatctatcgcatcaatgacgagaagcccatctacgctatgctgcgagtcttcacccaggatctcattccccatcgacatttcgatcttttctcggcccccctcccgcctcaatcaatcagcgtccgctgcgctgaaccgaaaatgaaggacgcactttcggcggggactgccacttatctcggatgggttgtcacaggtgacgaactcgaagtccccatggaaggtttcacaacgggacagatcggagagttccacaaggagttcccaacgatcacgcgctggaggatacggggcttcttcagtgaggcacgccttagactgcgtcccgcgctcctggcatccgaaggacttcgtgacgcctctgatcccgtaaggaaaacgctgtctattcctggatgggttatttctgtcaatggaatttgctcgacgcacccgacggtcgttcggcgagactcactcgggcgggctcgcaactcaaccaattcgggcctgccaacaagctggacaatcgagtagagcgacatcatggacacagcatggcgtattgtcgactgctcttctttagaggggatgcttacttcagaacgcggctctattttggtacgtccagacaacggcccacccacgagaataccggtggtcgacgtcacggctcttcttttaggtccgcgcgcatgtttttcaaatgcggtcttacataggcttctgcactcggatgtcgtcgttatgttctgcgactggcgcggcgtgcctgagggcgcggcctatccatggagcggccatacacgtataggtgcccgccagttggctcaggctcgtttatcggttccacggcagaagaatgcgtggggccgaatagtgaaggcaaaggtactagggcaatcgattgttttgggccgcgcagacgctcgggcagcctgtcgccttcgtgagatgtcccggaaggtacgctcgggcgacccagagaatattgaagctcacgcagccagactgtactggtcgagaatatttcagggcgaggaacgctttcttcgtgatccttcagccgaagacaacagaaataactgcctcaactacggttacggagttctgagggcgcacggtgttcgagcggtcgtcagtgcaggtcttaatcccgctctgggcctcttccatcatggacgcagtaatgcattcaaccttgtcgatgatctcatcgagtcttttcgccctgcggtggatgacgctgttctctcgctcgaaccaagtgattcacttgaggatcgcgctgtgaaacaacagctcgtggctgctgtccagcagtctttcaattctacaggagcgagtcttcccaccgtgctggaacgtcttgctcagcatctgggtcagtactgcgaaggagaccgaaaccgtttggaagttccttcgtgggagggcccaaggagaggcgacgatggcagatgatccgatgtggtgccttgttatgttcgacttgcctgttctgactaagcggcaacgcagtgaggcgacgcgtttccgtcactttcttctcgacgaaggattttggatggcacagtacagcgtgtatgtgagatattcgccgaccgtgtctggcgagcctcggcgaatccgggcgatcaagacggccttgccagacggcggtgaggttcgagtgttgtatgtcacagatcgcgagtggtccacgatgctctgtttccgcgacgaagcccctgtcgcgcccgaccccgcaccccagcagcttacgattttctaaccatgccagagtgcgctttcggcgggattgcaacgatcagacctgactcgtgacagcttggtgggttttcggtgactcggcgtg

SEQ ID NO: 3754 - DNA, 23840 bp, synthetic construct
  source 1..23840: mol_type = other DNA
  misc_feature 1..23840: note = Synthetic
tttcgtcgtggcaaaccttatatgttaaaacctgcagtagataaggctttaagtgaagggtgcgaaagtgtagaaaaagtacttatagttatacgcaataatgaacctatagaatatattaaaggaagggattatgtttataacgaacttgtgaaaaatgagtcttataagtgtgaacccgaaatcatggatagcgaggatttgttgtttttgctttacacttcaggatcaacaggtaagccaaaaggagttatgcatgcaagtgcaggatatatactttgggcacaaatgactatggaatgggtttttgatattaaagattatgataattattggtgtagtgctgatgtgggttggattacaggacatacttatgtagtttatgggcctttagcatgtggagcaacgactataatgcatgaaggaactcctacttatccaaattctgggcgttggtggagaatgatagaagagtatcaaataagcaaattctacacttcgccaactgccataagaatgcttcatgctgatgcacctgatgagccaagaaaatatgatttaagtacgcttgaagtgcttggaacggttggagagcctatcaatcctagtgcttggaagtggttttatgatgaaatagggagaactaaaagtcctatagtcgatacttggtggcaaacagaaacaggtgggcatatgatcacgcctttaccaggtgctactcctttaaaaccaggttgtgctaccttgcctttgccaggaatttttgcagaagttattgatgaagaaggtaataaaaaagatgaaggtgaagatggattgctttgtataaccaaaccttggccttcgatgattcgtggaatttggggtaatgatgaacgctatatagaaagttatttttctcaagctagaaaagatggaaaagctgtatattttagtggcgatggtgctttttatgataaaaatggttatataactatcacaggaagaacagatgatgtggttaatgttgcaggacatcgtataggaacggctgaaattgaaagcgctattgctaaacatccaagtgtagcagaatcagctgtagtgagtattttggatgcgattaaaggcgagtcattgtttgcttttgtggttttaagtcctgcatccagttgtgatcttggcggagctatagaaactttaaaagaacttaatgacattttaagagtagaaataggacctatagctaaaatagaaaaaattctttatactccaggtttgccaaaaactagaagtggtaaaataatgagaagaattttaagaactatagcaagaggtgaagaaatcaaacaggatatttcaacgctcgaagattctggagtagtagaaatcattgttaaattagctaaggcagagtttgaataacaaggcaaaaagaactttgccttgttgcataaaaattcataaaaataagctataatgataaaaaaataaaaggaaatttttatgcttcaaacttgtattttccctgcggcaggttatgggacgagatttttacctgcaacaaaaactttacctaaagagatgttacctatcttaactaagcctttgatccattatggggttgatgaagctttggaagcaggaatggaaaatatgggctttgtcacagggcgtggaaaaagagctttggaggattattttgatatttcttatgaacttgagcatcaaatttcaggtacaaaaaaagaatacttgcttgatgaaattcgctctttgatcaatcgttgcacctttacttttacaagacaaaatcagatgaaaggcttaggtgatgcggttttaaaaggtaaacctttggttggcgatgaagcttttggcgtaattttggctgatgatttgtgtgtcaatgaagaaggcttaaatgttatggctcaaatggtaaaaatttatgaaaaatatcgctgcaccatcatagctgtgatggaagtaccaaaagaacaagtttcaaactatggagtaatttctggaaattttgtagaagaaaatcttatcatggttaattctatgatagaaaaaccaagtcctgatgaagctccaagtaatcttgctatcataggaagatatattttaactcctgatatttttggaattttagaaaatactaaagcaggaaaaaatggcgaaattcaacttaccgacgcgcttttaactcaagcaaccaatggtatggttttagcttataaatttcaagggaaacgctttgattgtggaagtgtagaaggctttgtagaggcgacaaattatttttacgagaaaagtaaatgttaaacaatacacttttttttaaacaaagtgaaattcacactataagctcttatgcaaatcgtattaatgatgaggtaaaaagtggagatatagggtattatcatcttattgacacaagcttaagcctgattgatgagagtttggcttttatcaaagacaaagaacacataaaaaatattgttttagtgggaatgggaggttcaagttgtggtgtaaaagccttgcgtgatatgctttttaatgaaaaaagcaaccaaagagagctttttatactcgataacacaagttcacattcttttaataagactttagaaaaaatcaagcttgaagaaagtttgtttttaatcatcagtaaaacaggtagcactatagaagttgtatcgctttttaaacttcttattgaacattttaaactcgatatgcaagaattaaaaaaatattttgtttttattaccgataaggattcaaaacttcatcaagaaggtgaaaatttaggtattaaatgcttttttatccctgcaaatgtaggaggtcgttttagcatactttcagctgtaggtatagttccactttgtttttgtggctataatgccaaagctcttttagaaggagctaaagcttgttttgaagatttttttactcataaaaaagatgaaattttacaaaaagcctatcattattgcacacacaaaaatgccaatatcaatgtacttttttcatatagcgatgcttttaaaggctttaatgaatggtatatccagcttattgctgaaagtttaggtaaaaagcaaggctacaaacgcataggtttaactcctattgcactcattggagcaagagatcagcatagttttttacaactcattatggatggacctaaaaataaaactgtaacttttttaaaaatcaaagacgctcaaaaagcgcctattatccctgatattcattttaaatttttagattctttaagtaacaaagtcaatcttcacgaacttttaaacgcccaatgtgatgcaactatgcacgctttaattgctgaaaatttaagtgtcgatgtgatagaacttgaaaaacttgacgcttggcatgcgggatatttgatgtattattatgaactttttacttcaacttgtggtattatgctaggaattaatacttatgatcaacctggtgtagaagttggaaaattaatcttaaaaaatatattgaattcttgataaaaattcattaaaaaagagtataatgattttaagttaaaattataataaaaactattaattaataataattattatttaagaattttatgttataattttaaaaatcaaaaaaaaggagtcaatcatgtcagttacaaaacaattattacaaatgcaagcagatgctcatcatctatgggttaaatttcataattatcactggaatgtaaaaggtttgcaatttttttctatacacgaatacacagaaaaagcttatgaagaaatggcagaactttttgatagttgtgctgaaagagttttacaacttggtgaaaaagctatcacttgccaaaaagttttaatggaaaatgcaaaaagtccaaaagttgcaaaagattgctttactccgcttgaagtcatagaactgatcaaacaagattatgaatatcttttagcagaatttaaaaaactcaatgaagcagcagaaaaagaaagtgataccacaacagctgcttttgcgcaagaaaatatcgcaaaatatgaaaaaagtctttggatgataggcgctactttacaagatacttgcaaaatgtaatttaaggggctttatgccccaattatacaaactaggttataatatccttttttaaaggataaaattgaaagtacttaattttttttatgaaaaccaccctaaatttgaagtaagttatgaaagaaaaaatcaaatttcaaaaccaaatattatcataaaaggcccacgattttgtggtaaaaaaacacttatttttaattttttatctcaatttaaagcaagtgaaattttgtttttagatttatatgatacacgctttgaaaaacaaagtttagaaagacttgctgattttctgaatgaaaatttacaaattaaaattctttgcctttataatttggattttatccctaatttagaaaaaattaaaattcccatcatcttaagtacaaatataaaagatttaaatataaatgggtttgaagagcttgaactcgattattttgattttgaagaatttattagtgtaagtaagaaaaatttacctataaataatttagtaggtctttttttgcaaagtggacgcagtaaatttggagaaaaaaacatacttctaagacaaagcttcactcttttagaattagaaattttaaagtatttagctttaaatttgggtcagcaaatcagtatttctaagatatttatagaactcaaaaaaagattaaaaacttcaaaagatagtgtttatcaagctataaaaaaattagaaaatacttatgtgatctatactttaaaacatgatgaaaaaaaacttcaaaagatttattttaaagattttggcctaagaaataatctttgtatttcaaaggatttttcacatttatttgaaaatttagttttaagcgagctgtttaaatttaaagaagaatttttttataacaaatactttaacttttatagccaaatatctaaaattgcttatatttcaagtccaactttagatattgatttgattaaactacgtgctaagaaaattttaccaaaggctttagaacttggaatttttcatgtgatttttatcactctttcaagcgaggatagtttttttgaacaaggggttaaatttgaagtcatatcttttgataaattttcacttggattttaggtgttgtttgagttcgtatcgtatttttcaaggttgtatcgtttgatgatttttgtaataagattgatataatatcccttgcgttcagaataagaatctaaagttttaatagcctctagccctgttatctctttaccttcgcttttaaatttagatcttgcatcgcgaaacttttcataagcaaaatgacgatttaaatttaaaacataagagtcaacactatcttgcagactatcaaaaatcttaattttgtgttttttatctggatgtcttaaatcaggaattaaacctttcttaccccaagtccattctccaaaaagattgtttgcttctcttgcgaagcgacttgtacctgtagcactttcaactaaagcttgggctatacccatggattttggaattttttgaatacgttttttgtattctgtaaaatcataaagattttcaatgcgatatttgttttttatcatgataagtttttcaagatttgtttggtttgaagtcctaaagcctgttttgtaagcatctttaaaaaacgcttcgataaaagctttttcttgctcaatttttttaaagctttgattaaacatttcattcatttttataaaaaaaatttgtcttttttgatctatatcaagtttataatattcctctccaaatccactctttagatcatcagcaaaaagtgggattagaaaaaaactaagaaaaattataattggcttcaaaacaatactttacctttccttcaaaaaacaattcttcatttttatatgcaaaccccacctcttcaccacttttaggagttattttaactttattttgtacttttttatttaaaaatgccagataaaaacaagcccccattcctgtgccacaagctaaggtttcatcttcaactccgcgttcataggtgcgaacttttaaataattttcatctaaaatttttacaaaatttacattggcattatatttttgtctcattttttgacaaagcattgtatcaaattcatctaaattttgacaaaaatgcactagatgtggaactccagtgtcgcaaagttgccaagtttttcctaattcttcaaaagtattttgcacgctttttattttgcctaaagacacttcaactctatcttgatttacctttgcttttattactcctgcaccggttaaaaaactcatgttaggatttattttgttaatatgatgtgcaaaatgtgccgcagcccttgagccattgccacacatagcagcccttgagccatcgttattataaaattcccattcaaagtcgtatttttcatgaggcaatatcacgataaagccatccgcacctataccctcataacgattacaaagttctttagctaaagcacttctatcttcttttctatcagcatttgttatgacaaaatcattcccacttgcacaatatttataaaatttcacatttttcctttagaaatttcttgtattactttaacacattcttgcctaaaatcggcataagaattagtatttttaatgataaaatctgcttttttaagtttttcttcaatatctatttgagaatcaagtcttgcttttgcagcttctaagctgagcttatctctttgcatgattcttttaaggcttaattctttaggtgtgtaaattactatgactttgcctaaattttcataagcaccgctttcaaaaaaaagaggaatttctacaaaaaaagctttattttccttatctagaatttgcatttgttctaaaattttagctcgaattttaggatgagtgaaattttctaagatttttttagcttctttattattaaaaacaatttctccaaggatttttctatcgattttcttttcttttgtgagtaaattttttaaactaaagggagaaaaaatcttttcaagttctaaagcattttcatctaaaattttatgagtgattttatctgcgctaatgcttttaaagcctaaagaattcgctatttctataaaagtgcttttaccacaagcaattgaagcggttacaaaaaaagcatttttcatcttatgccttattaaaacttttttcgttaaaatacctttttacttcttaaaggaaaataaatgaaaatttcatatgaagatgcaggcgtaagtatagataatggaaatgcctttgtagaggctataaaacctttggttaaagaaacttttaatgataatgttgtaggtggaattggttcttttgctggtgcttttagaatgccaagtggttttaaaaagcctgtgattttaggtgcaacagatggggttggtactaagcttcgcttggcaattgatgctaaaaaatatgatgctatagggcaagatttagtagcaatgtgtgtgaatgatttgatttgtaattttgctacgcctttgtttttcctagattattatgctacagccaagctcgaagtagaagtagcaaaggctgttgtatcaggtattgccaagggatgtaagatggcaaattgtgcattaattggcggagaaactgctgaaatgcctggaatgtatgcaaaagatgattttgatcttgcgggttttgcagtgggtatggctgaagaagatgagattgatagaagtaaatttgttaaaaatggtgatattttattggcacttcctagttcaggacttcattcaaatggttattctttagctagaaaagtactttttgaaagtttaaaattaaaatttgatgacaagatagagggtaaaaatttaattgatattttgttagaacctacaaggatttatgtacgtgattttcttacactaaagccttatatcagtgctctagcacatattacagggggtggtttagtagaaaatttaccacgcgttttacctcgtggtatgggtgcaactatacgcaaacatcatcttaaaactcctgaaattttttatactataggacaggctgtagaagaaagcgaaatgtatagaagctttaacatgggagtgggtttagtaatggttgtagatccttctaatgtaagtaaggttttagaaaattcagatgcctttattatcggcgaaatttgcattaatgaaggtattgttttagagtgaaaataaagcgtcaatacgctttatttttgtattttaagttctatttttgtagtgttttgttcttttggcaaaggattggtttgtgctagataaaaggctacgagtacatttacaagcatagcgataagtaaaagaggagtggttcgttttataatatccattggagctacttttgcaaatccagctaaagctatgattccgcctgctattggtgaagctgcacgacctaaacaagatgcaatttctataggtaaaactagagtaataggtgcaacgcctaattttgtagctatatcaggagctagtttgccaaaagcattaaaagcagcaattccacttcccataatcactgtggcaaaataaactaaaaagcttaaaatagctatactcaaaagaattccaaaccatgcaaaatttcctgttccaagatttgaaaccgcgttagcaaggatattaactccaccaagtgctttaatgccttcagcaaatactccagcagcgatgattatgcttacgactgagataaaaatttcagccatagcttttaaaatcaccattatatcttcgcctaattttctagcatttctgtgtcttgcaaattcaacaagaaaaactaaagaaatgcttacaaaatttgctgttacaacatcaagcttgatagtaaaaaaatacgctgtaaataaaaatacaacaggtaaccaaggaaagagtatgtaaaaagtagggcatttaggatcaatgatttgcggaatttcaacttcatcatttaaaacacctttttctttatctcttttatcaatccaagcaaaataaaaaggaatcaagatggcaataactacaacataggcaatcacactataaatttggtaatttaaaaaaagccctacgacattatcactttgtcctaccatatctgccatattgattgaatttccatcttttggaccataatcaagcgcaattaaagaaagcacacatacagctgtaataggacggattttaagtgagattaaaacaggataaatacatgctaacaaaagcaaaagcaatccagcatagctagaaatgacgatttttaaagccattccaacaacaaaagttccacttaaaatcaagtatttatttttgatttttcctaagggtttatttgctaaaaaagcaagttttgccgaagcattgatatgtttcatataagcagcaaaacctgccacactcatgataataagtcctactccagaaagctgacttttaaaagtcgctgtgataaaagcataactatcaagtaaaacattcaaaaagcttgcatgttctctgctcggagctttttgtataggtgttcctgtgatgtaaaaagcaaaaataagcaagataatacctgaaagaaaaaatacaaaaatgggattgtattttttgagtatataataagcaacaacaattaccgctaaaagtgtagaacatatcataaaaattggcatgatttctcctaaggttattattagcttttattttattttagctaaaatttaactaataaatatttttcatttaaaattttacttattttttgcattataaaattaataatatgtatagtttggttactgaaaggtttatgtttgtataaaaaatgatttttatattataattataaacaaatcataaatattaaaaaggatctagtgtggcaagaattttggcatttgatataggaataagctctattggctgggcatttagcgaaaatgatgagttaaaagattgcggagttaggatttttacaaaggctgaaaatcctaaaacaggagaatccttagccttgccaagacgccttgcaagaagtgctagaaaacgccttgttagacgcaaagcaaggctaaatcacttaaaacatttaatcgcaaatgaatttaagttaaattacgaagattatcaaagctttgatgaaagtttagctaaggcttataaaggctctttaattagcccttatgagttaagatttagagctttaaacgagcttttaagtaagcaagattttgcaagagtgattttacatattgcaaaaaggcgtggttatgataatataaaaaatagcgataatgaagaaaagagtgaaattttaaaagctatcaagcaaaatgaagaaaaactagtaaattatcaaagtgtgggagagtatctttataaagagtattttcaaaaattcaaagaaaattccaaagaatttataaatgttagaaataaaaaagaaagttatgaacgctgcatagcgcaaagttttttaaaagatgaattaaagcttatttttcaaaaacaaagagaatttggcctttctttttcaaagaaatttgaagaagaagtgcttagtgtagcattttataaaagggctttaaaagatttttctcatttggtgggaaattgtagtttttttactgatgaaaaaagagcgccaaaaaattcgcctttagcttttatgtttgtagcgcttacaagaattatcaatcttttaaacaatcttaaaaatactgaaggaattttatatacaaaagatgatttaaacgctcttttaaatgaagttttaaaaaacggcactctaacttataaacaaacaaaaaagcttttgggcttaagcgatgattatgaatttaaaggagaaaaaggaacttattttattgagtttaaaaaatataaagaatttataaaagccctaggtgatcatagtttaagccaagatgatttaaatgaaatagcaaaagatattacccttataaaagatgagattaagcttaaaaaggctttagcaaaatacgatttaaatcaaaatcaaattgatagtttaagcaaattggaatttaaagaccatttaaatataagttttaaagccttaaaacttatcactcctttaatgcttgaaggtaaaaaatacgatgaagcttgtaatgagcttaatttaaaagtagcaatcaatgaagataaaaaagattttttacccgcatttaatgaaacttattataaagatgaggtaactaatcctgtggttttaagggcgattaaagaatacagaaaggtcttaaatgctttacttaaaaaatacggcaaagtgcataaaataaacattgaattagcaagagaagtaggtaaaaatcacagccaaagagctaaaatagaaaaagagcaaaatgaaaactacaaggccaaaaaagacgccgagcttgagtgtgaaaaactaggcttaaaaataaataataaaaatattttaaaattaagattatttaaagaacaaaaagaattttgtgcttatagtggagaaaagattaaacttagcgatttgcaagatgaaaaaatgcttgaaattgaccatatttacccttattctagaagttttgatgattcttatatgaataaggttttagtttttaccaagcaaaatcaagaaaagcttaataaaaccccctttgaagcctttggcaatgatagtacaaaatggcagaaaattgaagttttagcaaaaaatttgcctactaaaaagcaaaaaagaattttagataaaaactataaagacaaagagcaaaaagactttaaagatagaaatctaaacgatactcgctacatcgcaaggcttgttttaaactatactaaagattatttagattttttacctttaagcgatgatgaaaatacaaagttaaatgacatacaaaaaggctcaaaagtgcatgtagaagcaaaaagcggtatgctaacatcggctttaagacacacttggggctttagcactaaagatagaaataatcatcttcatcacgccatcgatgcggtaattatagcttatgcaaacaactctatcgtaaaggctttttcagattttaaaaaagagcaagaaagcaacagtgcagaactttatgcaaaaaaaattagtgaattagattataaaaacaaaaggaagttttttgagccttttagtggttttaggcaaaaggttttagataaaattgatgaaatttttgtctcaaaacctgagagaaaaaagccaagcggagccttacacgaagaaacatttagaaaagaagaagaattctatcaatcatacggcggaaaagaaggagttttaaaagccctagagcttggtaaaatccgcaaagtaaatggtaaaattgttaaaaatggcgatatgtttagagtggatatttttaaacacaaaaagacaaataaattttatgctgtgccaatttatactatggattttgctttaaaagtattaccaaataaagccgtggtgcaaggtaaagataaaaagtcaggtcttataaaagattggattttaatggatgaaaattatgagttttgcttttctttatacaaagatagtttgattttaattcaaactaaagatatgcaagagccagaacttgtttattttaatgcttttacaagctctactgttagtttgattgtttcaaaacacgataataaatttgaaacgctaagcaaaaatcaaaaaatattgtttaaaaatgcaaatgaaaaagaagtaatcgcaaaaagcataggaattcaaaatctaaaagtatttgaaaaatacatagtttcagcacttggagaagtgacaaaggctgagtttagacaaagagaagattttaaaaaaatgagttacgatgaagcttttaaaacactgcttattagctctaatgccaagctaaatttagagctaaatcatcttgtgattaagcaagatgaaaatatagccaaattgtttttaaaagatataaatatcatcattttagaaagcttacaagcaagccttagttccgcactttttaacgcttttgcaaagcataaaatcatcttgctaacctgcgatgaaactcatagtataaatggtgtttttactccttttttagggcattttcaaagtgcaaaaatcgcaaaagaacaaataaatgtaagtgctcaaaaaaaggctattttatggcaaaaaatcattaaaaacaaaatcctaaatcaagcctttgttttgaaaaaacacaataaaatagagcaaagcaatgagcttataaatttggctaaaaaagtaagcttaaatgatagtaaaaatatcgaagctgttgcggcggcgctttattttaaaactttgtttggtgtttctttttcaagagatgagctttgctttgaaaattctgctttaaattatggctatgcaatcattagggcttgtattattagagcagtttgtataagtgggcttttgccttggcttggcataaagcacgataatatttataattcttttgcgctttgcgatgatttgatagaagtgtttagggctagtgttgatgattgtgttttaaagcttaagggtgaaagtgagtttttaagcaaagatgacaaaagagcgttgattggcaatttgcaaagcaaaatcaattttgatgggcaaaattatcctttaaacagagcgataaatcattatgtggcaaattttaaaaatgctttattgtatgaagatgagctaaagatagtaaaatttgatgattgaagataaatttatgcgtgtgcttttgatgtttgatgtgccaactaaaagtaaaaaagagcaaaaactagcaagtaaatttagaaacaatcttataaaattaggttattttatgttgcaatttagcgtttatatgcgtatttgcaagggtttaagttctgcaaaaagttctattgaaaatgtaaaaaagattttgccaccttatggaaatgtaagggctttaatcatcactgaaaagcagtttgataaaatggagcttttgcttggtggcatagtttttaacgaaaaagttaataacgaaaccaatttaacgctttttgatatagatagtcatggagaatttaaatataaaaattcaaataacgaagaaattcaaataaacaaaaaacaagaaaaatatcatcagcaaaatttatttgaattttaaaagcggttttaggggattgtaaccccgcagagtcccgcaaactctttattttagtccctttttaaatttcttatgagattatagcataatttttgctatttttcatgaaaaaaccccgaaattttcattatctggtaaatatctattttaccataaagaaatttaaaaagggactaaaacttctacacttaatttagcattatacccaaaattttaccataaagaaatttaaaaagggactaaaacgtcttcttttttttcaacttcttcaatatcattttaccataaagaaatttaaaaagggactaaaactttagctgttgatagcgaaatattatctttattttaccataaagaaatttaaaaagggactaaaacaatatttacaggcgagttgttgattattatattttaccataaagaaatttaaaaagggactaaaacttattgcattatttataatagcatcgcttgattttaccataaagaaatttaaaaagggactaaaactctacgcatttaaaataaccccttgtaataattttaccataaagaaatttaaaaagggactaaaaaaccctagtggattgaaattctgctagggctaattacttcactaaaaggaggttgtaaatttgaaacttattgaaatttagggttgattaaaatcgaaataaaattatttaaataattttaaggcataaagataatatccactaaactttcattttctaaaatttcacattcttttggtaccaccataagggcagctttattgttaagattgtttataatcgcactagagccttctttcttaccttcaagattggctaaaatgcgtccatttttaaattccacattacaagcgacaaattccaaataaggtgtttttttcttgtaacttccttgtaaaaaggccttgcaaatatagtctttaggttgaagtaaccaagagtttaaaatctctcttgcgtaaagattaaacattaccatagccgagtaaggaaaacctggtaaggcgatgatgaatttttcattagccttggctattttgatatgtctacctggttttatgtcggctttatcgatgatgatttcatattcttttacagctttttttaaaaagtcaaaatcccccatagaaaccccgcctgttgtaatcaaaatatcacaactttgcaaagcgctttcaagggtagaaaaagtggctttttcatcatcttttaaaagaggaaaaacccttgtatcgcaatttaaatttttagctaaattagctatggcgatatgatttgaagagcggatttgagcaggattttccaaggcttctcctagatcttttatctcacttccactgcttaaaacccctacaataggctttataaacacaccaatgtgaaaaaatccaagttcagctaaaagagctatttcgctataatttaaccttgtgccttttttgagtaaaatttcatcttttttatagttttctcctaccgcacgcacggcaaaagcttggggaacttttttttctataaaaagagtatcattttctacgcgtacattttcaacagggactaaagtatcgcttccttcgctcatgagtgagcctgtaaaggtttttacacaagtaccattttgcacgctaaattgtggcatagtgcctgcaggtgtgaggcctaaaatttttaaaggcttatcttgatcttcaaatttgatcgcataaccatccatagccgaagttggaaattcaggctgatttttaagggcttttatgtcttgagctaaaatgcgtcctaaacactctgtaagagctattttttcaatcttttcataagttttgatatgagagtgtaaaatttttaaactttcttcataagacattaacattttttatccttttaaaagtcctgcaccgcaaagtttggttgatctttctttggcataaattctttctttgtttatcacatcatacttccaaatgggtgcgcttgctttaaaatcttcaacaaattcattaaggagtttaagtcctaattttctttgtttgcttaaaattcctgcaaaataagagctttcatgaaccgccacatcgcctatagagtgagcaaaaagcaagctaataccatcaaaatctactcttttttgccactcatcaaaccatttttttaaaagcggttcataaatatcaaaactaagtgcctcaatgcctccttcttcacgcacaataccacaaaaagtcagcaaagcaccgcagtttttattcttggcaaattcataccattggctataaattttaggaatatctaaagaaccttgatagagtgtaaaatgtttcatttaacccccacaaactggcggtaaaagtgctattttatcaccatcttttaacttagtgttttcatcaaaaatgatttcatcgtttaaagatacggcacaaagttctagccattcttttaaactctcatctttttgcaaaatttcttttaattcttttaaattttttacttcaagttctaaattttctttatttatagggcctaaaaattccacttttaccattttattcctttacttctaaatttcccatcattcctaaatcttcatgttctaaaatatggcaatgatacattctaagtcctttaaaatcttgtttcattctaagtcttaactcttcattaggacgcacatttatagtatctcttaaggctctaaattcggctttttgaactttgccattgagttttgatgagatgagttcaaattgcgtgccgtgtatgtggaaaggatgatccatgtgagatttatttatcactatccagtcttcaactactccaagcttggagcttaaatcaatgcgttttaaatcatagcttttgccattgattaaaaacatagacgcaagagcgatttttaattcgctttcactttttcccatcataccatgcatttgcatatgatcttcactcatgattatttctttaaattccttaggttcttctgaaggtttgaaaatttttaaattttttggaagttctacattttctttttttagactaatattagctaaaaatagggtattaggttcttcttttaccatcattttatccctatcataataagcactttctagcttaaaattcccatcttttggagcgtcgattaaaacttctacgcgagaagcaggacttaagaaaagttcttctttataaatagctttttctataagtccaccatcagtaccaacaagtataaacttagctccttgtatgcgtaaatttaaatatcttgctgcagtagcattataaatgcgtatgcgttcgtttgtggcgagtttgattttaggtttaaattgtccattaatgagtacaaattctccttctctaccatttagccaatcatttaggttgttgttcggaatttgagcgttttcatcaagacgcaaatcgctaatcatcaaatctttttcttttaaatgacttaaagcatctttttttgctttgatcacaaaagcccctgctaagcccataaaaacttgtttagaagtggtataatgagggtgtggatgataccagtaagttcctgcgctatcttgaggaatttcaaaacgatatattctttcttttcctgctaagataggatcatgtgggcttccatcttgatcaggtggcacaggaacgccatgccaatgtatagttgtagcttccttgagtttgtttttgactaaaatttcaagtttatctccttcaaaaacttctatttttggagcaggtactagaccattgtaagtataaaataaggtttttttacctttgataagctctatatgattttctttgatttctagggtagcacgaaaaatatttttttctttactttcatttttgagcaaaggcaaggcttttaaaatttctccttgggggaattgttttggatctaaaagttttaaattttttggagcaaagttgataaaagaagtatctaagtcatgatttatagaatgatttttatgcatagagtgcatatcgtgcataggatttgcataggctacacccatacttgctagagtaagtgcattaaattttaaaaaatttcttctattcattagtttttccttttgcttgattttttgtattatagtcattatttttttagttttagtaaatatttattttgaaaatttgatttaattttgttatgattttagcaatttaatcaaggaaaaataatgttttatgaaaaaattcaaactccagcttatattttagaagaagataaattaagaaaaaactgtgagcttttagcaagtgttggtgaaaaaagtggtgctaaagtgcttttagctttaaaaggttttgctttttcaggagcgatgaaaattgttggagaatacctaaaaggttgtacttgtagcggactttgggaagcaaaatttgctaaagaatacatggataaagaaattcatacttattcacctgcttttaaagaagatgaaataggtgaaatagccagtttatctcatcatatagtgtttaattctttagctcaatttcataaatttcaaagcaaaacacaaaaaaattccttaggtcttcgttgcaatgttgaattttctctagccccaaaagaactttacaatccttgtggaagatactcaagacttggaattcgtgctaaagattttgaaaatgtggatttaaatgctatagaaggacttcattttcacgcactttgtgaagaaagtgctgacgctttagaagctgttttaaaggtctttaaagagaaatttggtaaatggatagggcaaatgaaatgggtgaattttggaggaggacatcacatcaccaaaaaaggctatgatgttgaaaaacttattgctttgtgtaaaaatttcagcgataaatatggtgtacaagtttatcttgaaccaggtgaagcggtaggttggcaaacaggaaatttggttgctagtgtagtagatatcatagaaaatgaaaaacaaattgccattttagatacttcaagcgaagcacatatgccagatactatcatcatgccttatacaagtgaagttttaaacgctagaattttagccacaagagaaaatgaaaaaatttcagacttaaaagaaaacgaatttgcctatttacttactggaaatacttgtttagcgggtgatgtaatgggagagtacgcttttgataaaaagcttaaaatcggcgataaaattgtttttttagatcaaattcattacaccattgtgaaaaacacaacttttaatggtataagacttccaaatctcatgcttttagaccataaaaatgaacttcaaatgataagagaattttcttataaggattattctttaagaaattagtattatttataatttgcataaaatattaattttactcggaagagaatcaaagatataaattttatgcaaagtattttattttttcaaatataaaatcaactcaaatatctaattttcaatactttgatatgattttttaagattttaagtccttatagaattttattgaaattcagtgatttttaaatcaaatagtattaagataaatcgatttaaaaatcggctttaaaatgaatattaggtatattttgcataatattcattcaagcaaaatttaaagctatttttgaaaattttgaatgcatggaggctttaatggatttggaaaaattaagattagctagaagtctttattatcaatgtctaggagagctttttgttttttcattttctgaagaaagattgtcaaaattacaagagtatttaaagacaatgcaagaatgtttatttgatgaaaatttaaaatcaaattttgatatcttgctcaagcatttagatgatgaaaattctatacaagcattttttaaagaatatgatttgctttttttaagtcttaaaaatagcattccaacgactttttcttacatagaagaaggttttgaaaattcaaatcctttactttgtgtgcgtcaaattttagtcaaaagtaaaataagacgcaatgaaaaattttttaaagaaagtgaagatagtgttggattttgtttattgttgatgagtgaatttttaaggcaaaatgaagatgatttagccaaagaactttttgaaaaagtgatcaataaaaacatcgatgagtttttaggtgatgttttcatgaataaaaatgcgaatttatacaaggaaatttcaagtattgcattggcttttatggaatttgaaagattttgctttgaagtagaaaaacctgtaaaaataaattctaaaaaagtgcaaaacgatctatcgcgttcagaatttttaagaagagaagcaaataaacaaaggaggactcgtgaaaaatcgcagggaatttcttaaaaaatccacttttgccttaggggctgctggagtgcttggtagtacgactttagctctagctaaagatgaagaaagaaaagatttagttaaaggtaaaagtaagaaaaaagaagtgctttttcaaagaagtgctaattgggaaaattattatataaaggctgagtaatgtcaagtgtaggtgaaaatatcaagcttacgcgtcgttcttttcttaaaatggcagcactttcaagcctagcaacaccgttgcttgctagaagtgaaactttaagagaagcgagtgctgatgagcttaaagaagcgtacgaaggtagtaaaaaagtaaaaacagtttgtacagcctgttctgtaggctgtgggattattgcagaagtgcaaaatggtgtttgggtgcgtcaagaaattgctcaagatcatcctgtgagttcaggtggacattgctgcaagggatctgatatgatcgatatggtgcgttcgcatgtgcgtttaaaatatcctatgaaaaaagaaaatggagaatggaaacgcataagttatgagcaagctttaagtgagattggagaaaaactagctgcttatcgtaaagaaaatcctgaaagtgttatgtttttaggttctgcaaaaatgagcaatgaacaagcttattatgtgcgtaaatttgcagcgttttttggaacgaacaatgtagatcatcaagctagaatttgacacagcgcaacagtcgccggtgtggcgaatacatttggttatggcgctatgacaaaccatcttggagacattcaaagaagtaaatgtatcattatcattggggcaaatccagcggtaaatcaccctgtgggttttagacatttcttaaaagcaaaagaaaaaggcgcaaagcttattgttgtagatcctagatttacaaaaagtgcagctaaggcagatatttatgcaagaattcgtccgggaactgacattgctttcatgtatggaatgctaaaaattatctttgatgaaggtttagaagatacaaaatatctcgatgaaagagtttttggaatcgataaaattcgtgaagaagcagcaaaatggacagctgaagaagtagaaaatgttacaggaatttctaaagaacttttagtgcaaattactcacgaagtagctaaaaataaaccaactacgcttatttgggctatgggtttaactcaacataccgtaggaacttcaaatacgcgtttagcacctattgtacaaatggtacttggaaatataggtaaatttggcggcggagttaatatcttacgcggacacgataatgttcaaggtgcttcggacatggcttgtttaagcgaaaatttacctggttattatcctttaaatgaagcgacttggagatactatgccaaaatttggggcgtagattatgagtggcttttaggaaattttgtaagtaaagattggatgcataaaaccggactttcacttgctagatggtgggcagcagctttaaatggaaaagatggcaatgatgctatcgataatgcaggaacgcctttaaaagctttagtagttatgggaaatggtatcacttcaaccgcacaacaagctaaggttaaagaaggtttagaagctttagagcttttagttttggctgatccttttgtaaatgaagcagggattatcgcagaaagaaaagatggaatttatcttttacctgcagcaacacagtttgaaacaagcggaagtgtaacagcaacaaatcgtagcggacaatggagatttaaagttgtagatccactttatgaaagcatggaagatcaagaaattttatttgagcttgctaaaaaattaggcttttatgaagactttaccaagactttacgcgatgaaaaaggtgagatcgtttggcctgaaaatgcaacaagagaaattgcaaaagcagttagaagtatagggcttaatggttggagtcctgaaaggcttaaaaagcatactttatactgggataaatttgatgaggtaactttagaaggaaaagacgaagttgctggcgagtattacgggcttccttggccttgttggagtgataaacacccaggttctcctgtactttataataccgacattgaagtagcaaaaggtggtatgggctttagaaacaattttggacttgagtatgaaggagagagtttacttgctaaaaatgcacctttaaattcgcctattgatacaggttatccacaaattactaaggataatatagaaaaagttttaggcattactttaagtgcccaagaaaaagaaaaaatgggatcaacttggtcttatgatgatagcaatatcatagcaactaaatgtatagaaaaaggcatagttccttatggaaatgctaaagctagagctgtagtttggacttttaaagataaaattccactccaccgtgagcctttacattctccaagaaacgatttggtacaaaaatatccaagttttgaagatcaaaaagcactttatcgcgtggatactaaatttgtttctgtgcaacaagctaaggattattctaaagaattcccgcttaatcttgttactgcaagacttgtgaatttaaatggtgcgggtatggaaaatagagcatctatgtatctaacgcgtttaacacctgaaatgttttgtgagatcaatcctgaattagcaaaagagcaagacattaaagcaggagatatgatttgggtgcattctccagagggtactaaaattcatgtaagagtgaaggttaatccaggtgtagcaaaagatatgattttcttacctttccattttacaggggtaatgcaaggtgtggatttaacacataacttcccagaaggaactaagccttatgcaagcggagaaagtgctaatacggtaacaaattatggttatgatattatgtgtcagattccagagactaaaggtgggctttgtagaatcagtaaggatggaaaatgagtaaggtaaattttgcaaatttggaaaaagaacgcttgaaattcttttgtgataatgagcgttgtattgattgtaatggttgtgcggtagcttgtgatgaagcacatgagcttcctattcacattcgccgtcgccgtgtgattactttaaatgaaggaattcaaggaaaagaagtttcaacttctatttcttgtatgcattgtgatgatgctccttgt

SEQ ID NO: 3755 - DNA, 23351 bp, synthetic construct
  variation 2362..3891: note = note, n is a, c, g, or t
  misc_feature 1..23351: note = Synthetic
  source 1..23351: mol_type = other DNA
aagtgcgctcgtggattttgagcgaatcgtaaatactgatattatcgagcggtttaatctatttcccgcagcaaaactcacaggaagcccaaatgagggctactctagcggggacgcgctaaatgccatagaggaagtcgcaagagaagtgctatctagcgaatacacgattgcacattctggaatgagctaccaagagaaggcaaacagcgggagctcttatgtcgcatttgggctagggcttgtgtttgtgtttttgattctttgcgcacaatatgagcggtggcttatgccactagccgtgcttacagctgtgccttttgcggtgtttggcgcgagtgcggcggtgtttgtgcgcgggctagaaaacgacatttacttccaagtggggttggttacactcatcgcacttagtgccaaaaacgcgattcttatcgtggagtttgcccagcatttgcgcgaggagagcgggtttggcataatggagtctgccataaaggcggcaaaactgcgatttcgccctattgtgatgacttcgcttgcctttagcataggcgtgcttcctctagcactctcaagcggtgcaggtgctgccgcacggcacgctatcggcacgggaatcatcggtggtatgcttgctgcgacatttatcgctatattttttatcccgctcttttggagcttcatcgctaagctaggcgagattataaagacaaagtttgggagcaattaaaatagctatgaatgctttagtgctagatacttacaccaatccactacaatgagtggactctagctaaaacaagaatacccaatcttatgcggtggatggggtaaagtaaaatcagcaaatgcttcttaaggagcgtgaatgagtaaggacaaaaaactttgggctatggacgcacaagagtttgcagagtatgcaaagacagcaagcaagactgaactagcagaatacaaaaacgagttaccccaatacatcgagtatctacaagcagagttgcgaaagtatgaggcagagcaaaaagcactcaaaggcgcaagcactagattgggactacacctaattgagcaactattaagaaaagcaaaaggggaaattccagcacaagacaatgcagacaaaaacgcgcaatggcgcaaaaatactgacataatcgcagacaacacaagcgttgaaaaattctacgagattttggatggcttaagcgatgatgaaatgagcgaagtccttgaagataactgctacgaagagttggaagtggaatgtttgattgaggatgcacaagatgacttaagacgctttagagagcacgagatgattttggaggaactcggcatatagctataaaacaaaaatctaggacattttgcctattctagcaaaatctacaagcctagccaagatttttggtttggctacgctgcttgttgcttactccaaaagccaaacacttcggcaaaaacactagcaatgatttgaagcaaatcgcacctttttgtcattgtgaggcgtgtgagtaagcacaacgaagcaatccaaaaaataatatagattgccacgcaaattcgctacgctcattttctcgcaatgacgaaaaagtggtgcgcaatgcaaaatcaacacacgatgacaaatctttccacgcttttgccaatgcaaaagatacccacccccaaaccccctccgcaaagggaggggacttcaagaagtttccctataaataaaactctttgtcatattgagggcgtagcccgaagtatctcaagtagaatctaatagagatatttcggtttctacgaaacctaaatataacaacggataaaagcgtggattgccacgaacgctaaagcgattctcgcaatgacgaagtagcgtgtgtattgccacgcaagtttcgcgtagcaaaatcgtggcaatccacgcgtttatcgccattgcgagattttactaaagaaacttcggcttcaccttgttttctaaagaaactgcactacgcttgttttgccacgcccatttcatttgctcgcaatgacgaaaatcgccatttaagaattagcaaaatatttcaaaatctctcttaagccgaaaagcccttaagcaaaacttcagcttcattttttagtctagttttatcccaaatccattcccaaaatcttaccaaactcataaaatcaccccaccaaaaatcacaaaaacagcaatttttgcaaaaatacgattcccaaacacgcgcaaaataagcacttacacagcaagggggttttagccgcttgttaaattctcttatggtaaaataaagcccgcgtcatacctgcacttaaatgcgttttagccgcttgttaaattctcttatgnnnnnnnnnnnnnnnnnnnnnnnnnnnnnnnnnnnnnnnnnnnnnnnnnnnnnnnnnnnnnnnnnnnnnnnnnnnnnnnnnnnnnnnnnnnnnnnnnnnnnnnnnnnnnnnnnnnnnnnnnnnnnnnnnnnnnnnnnnnnnnnnnnnnnnnnnnnnnnnnnnnnnnnnnnnnnnnnnnnnnnnnnnnnnnnnnnnnnnnnnnnnnnnnnnnnnnnnnnnnnnnnnnnnnnnnnnnnnnnnnnnnnnnnnnnnnnnnnnnnnnnnnnnnnnnnnnnnnnnnnnnnnnnnnnnnnnnnnnnnnnnnnnnnnnnnnnnnnnnnnnnnnnnnnnnnnnnnnnnnnnnnnnnnnnnnnnnnnnnnnnnnnnnnnnnnnnnnnnnnnnnnnnnnnnnnnnnnnnnnnnnnnnnnnnnnnnnnnnnnnnnnnnnnnnnnnnnnnnnnnnnnnnnnnnnnnnnnnnnnnnnnnnnnnnnnnnnnnnnnnnnnnnnnnnnnnnnnnnnnnnnnnnnnnnnnnnnnnnnnnnnnnnnnnnnnnnnnnnnnnnnnnnnnnnnnnnnnnnnnnnnnnnnnnnnnnnnnnnnnnnnnnnnnnnnnnnnnnnnnnnnnnnnnnnnnnnnnnnnnnnnnnnnnnnnnnnnnnnnnnnnnnnnnnnnnnnnnnnnnnnnnnnnnnnnnnnnnnnnnnnnnnnnnnnnnnnnnnnnnnnnnnnnnnnnnnnnnnnnnnnnnnnnnnnnnnnnnnnnnnnnnnnnnnnnnnnnnnnnnnnnnnnnnnnnnnnnnnnnnnnnnnnnnnnnnnnnnnnnnnnnnnnnnnnnnnnnnnnnnnnnnnnnnnnnnnnnnnnnnnnnnnnnnnnnnnnnnnnnnnnnnnnnnnnnnnnnnnnnnnnnnnnnnnnnnnnnnnnnnnnnnnnnnnnnnnnnnnnnnnnnnnnnnnnnnnnnnnnnnnnnnnnnnnnnnnnnnnnnnnnnnnnnnnnnnnnnnnnnnnnnnnnnnnnnnnnnnnnnnnnnnnnnnnnnnnnnnnnnnnnnnnnnnnnnnnnnnnnnnnnnnnnnnnnnnnnnnnnnnnnnnnnnnnnnnnnnnnnnnnnnnnnnnnnnnnnnnnnnnnnnnnnnnnnnnnnnnnnnnnnnnnnnnnnnnnnnnnnnnnnnnnnnnnnnnnnnnnnnnnnnnnnnnnnnnnnnnnnnnnnnnnnnnnnnnnnnnnnnnnnnnnnnnnnnnnnnnnnnnnnnnnnnnnnnnnnnnnnnnnnnnnnnnnnnnnnnnnnnnnnnnnnnnnnnnnnnnnnnnnnnnnnnnnnnnnnnnnnnnnnnnnnnnnnnnnnnnnnnnnnnnnnnnnnnnnnnnnnnnnnnnnnnnnnnnnnnnnnnnnnnnnnnnnnnnnnnnnnnnnnnnnnnnnnnnnnnnnnnnnnnnnnnnnnnnnnnnnnnnnnnnnnnnnnnnnnnnnnnnnnnnnnnnnnnnnnnnnnnnnnnnnnnnnnnnnnnnnnnnnnnnnnnnnnnnnnnnnnnnnnnnnnnnnnnnnnnnnnnnnnnnnnnnnnccgcttgttaaattctcttatggtaaaatttggaagcagtaaagagcagtgcatttgcagttttagccgcttgttaaattctcttatggtaaaataacaaggcgtctcattgataaagtttcttggttttagccgcttgttaaattctcttatggtaaaatatcctgtgagaatatatcgattttatcggcatttgagagtttttgaaagcccaaaatccccataaaatcgagataatcaagcatagagagtctaacaagcggctaaaataagggaagcaggaaatcccgcagggtcccgcaaggggtaaaacgcaatgaatggattgtgttgagctaatccctaaacctgcccgttttcttttttgattctactttttaccttacacatacttaaacatactacacttaaatacacctacttaacctactttaccaacttccaaagtcatatcacctcacacaatgccttttaatatttttgtcaagcaaaatttgctgataaaagatactccaccaaatacttaaaagcaataaagagatatttcgctaatgctcaatatgacaaggacagcaatgacaaggtagcaattataacacagcaataaagacagcaacgacagagtagcaaatcacaaaatagcgataatctctagctataataggcgacaaatatacttcaccaaaatatgacacaaaaatttggtttatgagagcataaaaactagcaataaaaaacaacaaaatcaaataagcaagcaatccccaccaatccctagaagtatcaaaaatcatcaaaatacaccaaagcaaactaaaacttcagcaaaccccacaaacccaccaaaaatctcctcaaaacccccaaaatattcccaaaacctacatagcactttttgaaaaatcaatcaaatcctgcgttgtgcgcacagattttggcagcgataaaagcgatatttcaaacacctttagcgcggttagcgcgtcagcataggcacgatgtgaagtaggcgtatttatccccaaaaattcatttagatactgcaaagaataccgcttagcaagtatcgtcctgcgggctaaatctatggtgcatagctttgggtttagtagcttataaagccctgcttgctccatagccacacttacaaacccatagtcaaatcccacattgtgtgctacaaaaacactctgtgccaaaaactccctaaaatcacgcaaaacctctcgctcttttcgtgcgttttctagcattttgggtgtaatttgggtgatttctacgatagtttctgggacaaaatacgcgtggataagctcgctaaactcgcccaaaattttgccatttttccactttatcgcaccgatttcgatgatttggtgctcttgtggtttgctccctgtggtttcaatatccacaaagcaaaattcctgctccctccacgatagttcattgtgcgctaggaagtaagtatccccgcttgattctagtggcaagccctgtgcgcgtagtagctctacttgtagatacgcttcctctatgtcaaagtctttatcaaaatctctagtcccaaaatctttggcaaaatcttgtgtgaaatctaaactagaatctagtctgtccccaaaatcctgccctagatttttttccacacttttttttgcactttttactatactactttttcccgtgcttttgtgtggatttttgtgcgtgcttttggtatctgtgtagcttgtttgattcttgctagattgttgcaaaatcccataaagctcctcataagagattttgctttttgtcagccttgcttgtagctcttttgcgatactcaaagtcatatccttagtctttagcccgatttttttacaatctctatcgtgggttttttagcaagtctatggcttggcgataatccctagcaccaaatacaaaactccccgctacgagtatgtctacacctgcttgcttcaaagatagagcgtttttgtcatttactccgccatcgacttctattaggcattttggatttttggcttctattagttcgcgcaagtttcgtgctttttctaggactgaagggataaactcctgcccaccaaatcccggatttacactcattagtagcaccatatcaatatctggcaaaatatagcgcagattttcctcacttgtgtgtgggtttagcacgactgcgggacgcactccattacctcgtatgtggcttataaggcggtgtaggtgcttcacttcttcgatatgcacgcttataaattctggctttagtggcaagaagctatctacaaaactttctactttttctaccattaggtgcacatctagtggctttgtagcggcgtttgctacgctttttatcacaggtgcgccaaatgtgagatttggcacgaagtgcccatccataatgtcaatatggacaaaatcagcacccgcttcacagatagaggctacctcctcgccaagtcgcaaaaaatcgctagataaaatactcggtgcgactagcatagtggcaggctttttgtggtggaatctacgcagtgggagcaaagatgagcagacaaaaatatgtcaaatgaaagcgtgtgaagcaaaagtgcaagtggcatagagggtgtagaaagtagattttgcatcgcgtgcctttttggttggtatctttaggcgtcatatttgtagaaaaagttttagcgataaatttcaaaaattaaatgctatcataagtgtattaagaatataattaagcctttataaaaactagcaaaaatataaaaattcatacaaaatctaataaagcccacccttaaaagaggagcgaaaaagaatgaaaaaggagtgaaaatgcaagcccaagcaaaaatagattttgcaacactaaagctatgtttgcaagagtgtgctatcgctgtgcatagcgcactacaaagccagaatgtaggctatctatctagcacaaactctagtggggatatgcagctaggagtagatgtggcgtgtgataaactcatagaacaaaaactcttagagctagggtgcgtaaagggagtgtgctctgaagaaaaacaagaagcactctataaagattctagtgcaaatcttttggtggcttatgacccgctagatggctcaagtctttttgactcaaaccttagcgtgggctctatatttggaatctatcaaggggagtttgcctctagtgcgatagtaggggcgtgctatgtggtgtatggaccgcgcttagagctagtgtgggcagatagcacagatgatgaggtggggcattttttgtatgattttgctaggggggaatggcgtaaaaagccagccttgcgtttgggagagaaaggcaagctaaatgcaccgggtgggacacaaaagcattggagtgagaagcacaaggtgctagtggattctctttttgcgcaagggtatcgattgcgatattcggggggaatggtgccagatttgcaccagatacttataaaaggtggagggctatttagctaccctgcgacacaggacgcaccaaaaggcaagctaagaaaactttttgaggtgtttccatttgcttttatctatgagaaagcaggtggagagggcatagatggacactgctctttattaaagctagggtgtgatggactgcacgataccacgcagtgcttcttaggcagcaaagcagaaatcgccattgtaaaagaagcatataaataatctcacgctagagtttaaaaagcgtttttagaaaaacgattttatagcgacaaacaaaggataaaaaatgagtgaaataaaaacccctgataatatagcacaaagcacagaagtcgcaaatggcacaatggatatatttgagaaaaaactccaagatgagctagatagtctcaaaaattgtcagcaaagtagcggggtggattcttgctttgcgtgtgagaagatgctagagtgtcccacgcgcaaatcctatgtaagtgctgtgtatgagagtatgagcaagggacaagaaggcggggattttgatttttagacagaatctataattttgcttggcaaggcaaataaacataaaaggctagaggaaatggaatttttagaggattttttacatacaaaagacatacaaaaagcgaagatttttgagcttttgagatgcaaagagcaagaagcaatcatcttgcaatatatgacaaaagcactactagatggcgtgcaagaagtgggtgtgatagagctagtgcacaactgctttggcgagcaagtaagccaagatagcctaaacacttcacaagacttgcaaaatcctgccaaagctaccaaaaaaacgacaaaaaaagattccctacaaaaacaaaactcacttcaaaatcccctccaaaactcactatatgacaagccaaagcaatccctaatcattacccacctccctactatccgcacgcttttggatttggggtggattgtccttagtgagatgtcgcgatttaagcagccaaatatcaaggacttggctttgctagagctgctaagctgtgaggtaagcctctctagcgcgtttttgcgcctcatagagagaggacatagcgaagtgcaaatgcccgatgaaacgccttataatgaccatctagagtatgtcaaagaccaatttttgcgcatacatttggcaagcaaatttagcccacaaaatgacaaaaaaaacaccgcgctaaaatcccagataaacgcgctagaaaaccgcataaaagagcgacttctaatcaccacaaaagagatttcagcacacaaaatcatcaaagactacgcgctaaacccaaaagaagagatgatattttttgcgttgcttaaagaggaatactacggaggagatggctactaccgagatatgaacaacctcatagacttgataagtgaaagcgaatatgacaaaatgaaaaaccgcgccctgcttgatgaaaaatccaccctcatagaaaaaggactacttgactttggggaaatgctaaatccatttggtggaatcgtgcggacattttatatccccgaagagattttgcacaaggttatccgcgagccctacaagaaaaaaagcaaaaaaatcgccctagcttctgtgctagaagagcaagaaatctttgagctactgcgtcccaaaagtagcctagatgaaatcgtgctaccacaatccactaggacaatgatagactctatcctaaagcaagtagactctagcgtggtagctagactaaagcaatgggggataaaagacaagcacaaaggagtagaagcaaaaatccttttctacggtgcagcaggcacgggcaaaacgcttagcgcacttgccatagccaaagccctaaaaaagcaagtgcttagctttgactgctccaaaatcctctctatgtatgtgggcgagagtgaaaaaaatgtgcgaaagatatttgacacatacagcgacataagcaaaaaaatcaaaaacgagcccgtgctactactagatgaagcagaccaattcctaagcacgcgcataacctctagctctggcgcggagaaaatgcacaaccaaatgcaaaatatatttttggagcaaatcgagcgatttagtggcgtgctagtggctacgacaaatcttgtagagagtatagattctgcgttttctaggaggtttgactacaaaatcgagtttaggcgaccaaatgaggagcaaagacgcaagctgtgggaaaaatacctccccaaaaacgcacaatatgagccaaactctagcatagaatccctctgcaaggagctatctagccatagcttaagtggcgctcaaatcgccctagtgataaaaaacaccgcctataaagtcgccactagagataagcctatctttaccaaagatgactttatagaagctataaagcgtgagctaagcggggactttgatagtagcaaaagtgtggggtttatatagatttagctagattttgccgtgctttttgcgcgtaaggtggtggggtatgagtggggcgagattgcgtttttggctttgttttttttgctttgtttggcttggagtggtttttgctaagttaaatataatatttaaggagtggaaatgtcgcaaaatcaaaatccaaacacacaatctcatctcaatcctactacacaatcaagtacgcagtctaacccacaaccaaccacgcaagagagcttaaaaatcttaggctttgatataggtgtggcgagtattggctgggcgtttgtcgagggtggagagctaaaagactgcggagtgagaatcttcacaaaggcagaaaatccaaaagatggcagttctctagctttgccacgccgtgaggcaaggggagtgcgtaggcgactagcacggcgcaaaggtaggctaaatgcgctaaaagtgcttatctgcaaggagtttgggctaaatcgtagcgactatctagccaccgcaggggaactaccaaaggcttacgccacgagcaaagaaacaaaaagcccatatcagctccgcgcagaatcactagagcgcaaacttagtgccgatgagtttgcccgcgtgattttgcatatcgccaagcatagaggctatggcaacaaacacgcaaaagaatcaagcgatgatgatagtggcaaagtcaaaaaggcgataagtgaaaatcaaaaagtgatgagtgaaaaaggctacacaaccgcagggcagtatctctatggcgagttttatcaaaaggcgcggaattttagcgaggcagaaccaaagtcccccaaaaacgcgcgaggcacacaagaatttaaaaatgtccgcaataagagcgaaaactatgctaggtgtttggcgcagagtgagttgcaaaaagaattagagattatttttgccaaacaacgcgaatttggctttcaatttagtgataaaaagcataaaaccatcaatgcaaatggcaaacttaaagagctagattttgcagacgcggtgctagaaatcgcatttttacaacgcccactaaaaagtttcgcagataaagtcggcaaatgcaccttttatgaggataaaccccgcgcaccaaaagactctttaagtgctatcgaatttgttgcgcttacgcgtatcataaacactctagcaaatatcacaaagcgcagtggcgaggtatatagcgcggataaagtgcgcgagattctatccatagtgctagataaaggcgaaatcacttataaaaacttgcgcaaagtcatcgcccttgatgaaagactacaattccccaaagactccaaactagactacgcaaaagaggacgccgaaaaagcaaaggcaatagaatttagcaaactaaaagcatttagaaaggctttgggtgggagctttgagggatttatccgtgccgagctagattctatcgccacagatattgcgcttatcaaaagcaaagatgagctaaaagccaaacttgccaattatcaaagcctaaatgatgagcaaagagagaaattaagtgagctaagttttgataaatttattgatttgagttttaaggcattggaggcgattttaccccttatgcgcggggataaagatgataaaatctatcgctatgatgaagcgtggagagaagcgggactagtcgaagtagccaaaaagacgcaaaaaggcgatagcctcccacctctaatagaatatgagaaagatttagcaaatcccgtagtggcaagggctttggcagagtatcgcaaagtgcttaatgctttgcttaaaaaacacggcaaggtgcataagattcatttagaatttactcgccaagcgggtgtgagtagcaaagagcggggcgaaatcatagccgagcaaaacaagaggcttaaggcaaatgaagaagcgcgaaaaaggtgtgaggaatatgggctaatcccaagtggcaaaaatatccttaaactcaaactttggcaagagcaaggcgaattttgcgtatatagtggtaaaaaaatcacacaaagtgatttgcgtgatgaaagcacattgcaaatcgaccatatctacccatactcgcgaagctatgatgatagccaaaataacaaagtgcttgtttttacagatgccaatcaaaacaagctaaatcaaacgccttatgaagcctttggcaaagatattagcaaatggaatcagattttagggcgtatcgaaaaactaccaaaggcaaagaaaaatcgcatcacaaacaaaaattttgcaaacaaagaagctgggtttatcgcgcgaaatatcgtagatacaagctatatcgctagacttagtgctagctatacagacgcatttattgagttttgccccctagcagaaaatgaggataccacgctagggcgcggcgaaaagggaagcaaaaaacacataagtgtggtaaatggttcactaacggcgactatgaggcattattgggggctaaatactctgctagatggcgagaatagcgaatcaaaagatagaagtaaccacctccaccacgccctagatgcgataatcatcgcttatgtgaatgatagcgtgataaaggcttttagcgactttaagaaaacccaagagcaaaacaaagctcggcttatcgccaaagagatagaatcagccgagtataaaatctcacgcagatttttctcgccaagtggctttgaaaacaatgaggcatttcgtcaggctataaagcgtaagattttgggacaatctcttgaatctagagaaaatgatatgacaataaatagtgaggctttgggcgaaaaagtgggcggaatctttgtcagcaaaccacctagaaaacgcgcaagaggtgctttgcataaagagacttttagtagcattgatgataaagatttgctaaaaacctatggcggcaaagagggtgtgaatcgcgccataaagctaggcaaagtccgccaaatcggtagcaaaatcgccgataatggcacaatggtgcgcgtggatatttttcgccataaagtaagtggcaaattttatggtgtgccaatttatacgatggatttcgcacttgggattttgccaaataaagccgtagtgggtggcaaagataaatctggcgtgataaaagattggctaccgatggactcaaattatgaattttgttttagcctttttaaagatgatttgattttggtgcagaaaaaggaaatgagcaaggcggagttgtgttattttgctggatttgacacttcgggtgggcaaatcaaagtcgaaaaacacgacaaccattttgctactcttacggacaatcaaaggttgctttttaacattgcaacaccaaaagaagttgcgggtaaaagcataggtatccaaaatctaaaagtctttgaaaaatggcaggtttcgccacttggcgaggtaagcaaggcagagttcaaagagcgagagcctatcgcactgaaatccactccaaaaagattcttgcaaggatagccaaaatgtttgattcgcattttcgcacgctatttataagcaatcctgcgcatttgcgactagaatccaagcgactaatcatagagcgcaaagaatctactagccaccacaaagccctagcacacaaagaagcaaaagatagcgataacttgagtgatatatactctccctataaaagcgacaaaaaagatagcatagctatcccactagctgatattgcctatatcatactagaatccccgcgcataacccttagctccgctctgctagacgcactctctacgcacaaagtcgcacttatatcgtgtgatagctcgcacttgcctagcgggatttttacgccatttttggggcactatcgctcgctatccgtgcttgagtctcaaatcgcgctaaaaaagcagacaaaaagcattatctggcagcaaatcataaaatccaaaatcaccaatcaatgctccgccctaaagctagccaaaccaaatgagacaaaagcgatagattctctccaaagcctagccaaatctgtccagctaggagactctacctacaatgaagcaaaagctgcggcaatctacttcaaagcactttttgggaatagcttcatacgaatgcgtgatataaatagtcaaataaacgcgataaatggactagaaacacaagcccaagaagcccaaatggcaaatagcgatagtgcagtagacgcggcagacacaaaagatagcgcgccaaatgctatcataaactccgcgctgaactatggctatgccatagtgagggcggctatcgtgcgcactctctctagtagcgggctaaaccccgcacttgggctatcccacgcaaacgcgtttaatccatttaacctagctgatgacatcatcgagccatttcgtgcgtttgtagactctctagtggcggaaatgctctcattgggtgagtttgggcaatctagcgagctatctctacaaaaccgcacaaagctagctcaaatcctaagcacacaagtgtgtatgctctgctttgcccctgctacacaagcgcacgccacacatacccaaagtctctcaaacgccacaaacaaaggcaagctctacccgcttatgcgtgctgtaatcgtctgcatacaaagcctagtaaagctcatagaatcaaatggcgacataagcgggctagggtttgatttgcctgtatttatggaggatatttcaaatggaagagaaatttatgagggtgctagtgatgtttgatatgccaacttctaccaaagaggacagaaaggcaagtgcgaaatttcgcaaagacttaatcaaagaggggtttatgatgctgcagtttagcgtgtatatgcgcatctgcaaaggcgtagcaagcgcaaacaatcatattgataggctatatctctacctcccgcgcaaagggcatatccgcgctttgatacttacagagaagcagtttgataatatgcgacttctgctagggcaaaaaagtgaatgcgagagagcaaacgccccaagacagctgactttgttttagcggattttgctttttttgtggattttgtgcgtttgttttgcgctttgggtggtgggctaggggggtggcttaggcttagtttggacttaaagtttgtgtgattttgcgctaaaaatgtgtggatttattgcattatttaagaaaatttggcatatttatcgtttctaaattttattcatagaaaggacacacaatggaaaagattggaatcttttatggaagcgatggcggaaacgctaaaggcgtagcagagaaagtatctagcgcactaggaaatgctgagctaatcgatgtggcaaacgcaagcaaagaccaacttgcagggttcaaaaaccttgtgcttgtaactcctacttatggtagtggcgacttgcaaagcgattgggacgattttttgggctcgcttagcgatggcgatttctcgggcaaaactatcgggcttgtaggacttggcgaccaagacacttatagcgacacttttgccgatggtatctctcatatctacgcaaaagcaaaagcaggcaaaatcgtaggacaaacttccacagacggctatgagtttagcgactctcaagcggtggtagatggcaagtttgtagggcttatcatagatgaagacaatcaagatgacaagacagatagcagaatctcatcttgggtagattctatcaaaggtagctttgcgtaagactctttgccttaaaatatttcaagtgcctccaaatcatttacgcttttagcttagggcggagcgagggtttggaggctttttatttttaaacttgctttagcttggcttttcacttctatttttttactactttttttgtttttcgctcattttaagattttgcttttttgtggattttgtgctacactttgggaatatattttgcttaaaatccttaatttatttcccaaaaaggattttcctatgagccctattagtagtatttctagcacaagcaggacagatacttccgcgctagccgagctttttgcaagtcgctatgccccacagagtgctaccctgccacaaaccccagcgcaaaatattacccaagacataagccaagcccaaaaccacctagacacaagtggtgcgactactcctgctagagattctgccaaaacaaacacgcagcaacaccctcaaaccacccaagatagcaaaactgatagcaaaatcccttacaacagcgcggaaaaagacacattgccaactttgcaagactttatccacgaccctgcaaatgagcaaaactccgcgctaaatctagtaagccaaatcaaccaaatatccaacataaaccaagtaagcgatacccaaaataccgctcaaacacagcaaggtgtgcaatctataagtcgacttgaagatacatttaccccatcagatgagcttagcgcggctatgagggcaaaatcgtatttcaaaaacgcacttattgatgctgatagcttcaaggctatggctcgccagcttcacaatgacggcgtaatcaaccgcgatgaaatgatgatggtggattttttgagtgaaaaatcgccaaatatatcgcttaaggattttgactctatgataaaaaacgacaatcttagtcgtgagatgcgcgggcttatcgcacagcttgtgcaaaaaatccatttgatgaattacctaagtggtggcgcacttgcctaatggggctaaaatagctcataaacgcgtttgctaagtaaaatctacttagacaaaatctagcagacgccacccacaatctagcacaaagattgccaaaaccttgccaagcaccacaaatcacaatgataccaaagacactatcaaagcaatgggtggatttcctagatgatgagttttcgcaacaatattttggcgatatagtagcccactacaaaaacgcactaaaatccaaccaaaccattttcccaccaaatcatcttatttttaatgctttcaatctaactcccccacaaaatgtcaaaatcgtaattttagggcaagacccatatcacgggagtgtgtttatcactgatagtgagggagtgaagcgcgaagtgccacaggctatgggactaagctttagtgtgccactaggtgtgcctattccacctagcttaaaaaacatttacaaagagctgcaaatctcacttggatttctcccaccaagacacggggatttgagtgcttgggctcaaagaggtgtgctacttctaaatgcgattttttctgtgcaaaaaggcatagcaggctcacataaacacttcgggtgggaggcgtttagcgatagtgtgataaaaaaactatctagcaaaaaagaggggcttatctttatgctatggggtaactacgcaaagcgcaaagcaaccctcatagattctagcaagcacattatcttgcaagctgcccatcctagccctctagcgcaaggctttgtcggcagtggcgtgtttgcaaaggcaaataccgcgcttatagaaatgggcaaggaagcatttgattggagcttgccacccttaggctaacactgctaatatacttagaatcaaatcaaaattccaacaaaaatcacgcatagatgaacttgctaaaaaaccttataaaaaatttaccagcaaaaatccacgattcgcacagacgcgaatctatgattttatgctactttttgcgccatataataatattggatttggcattgaatgctgagctaacgctttatcaatatgcttttaacaaacaaatctatctaaccacgccacacacgctatttatggcacttaaaacaataaacattagctggacttatgtggagagcgatgagaaagtgaaagaagcgtttggcgaaatggagaaaatttatgataaatttgaattgttgtgcaaggactttaaaatctttgttacaatatcgcagtttttgtatgatattgaaagagattcaaagtagtacattgtggtatattgatttacactaaaaagcaaggttagccattttcgtcttttttatcactgcgcttatgagatttgcttgtcctttggtaattttgtggtattttttagaataaaactttgtctggcaagtgaggtaataatcgcagggataagcgatagccaagcatttggcttatcttacactacaaggtaggcaaatatccccaaactccctacgataaatataaacgcactcagtgccccaagcccttgcagggcataaaaccaacgcatattgctctctctatctctttgctcgactttttctagcccaatgaatttaaaacgcttgatgagtggggattaactaaacttgcaaaagaaactgaaaaacaattcacacccaaagagctggagcaaatgcgacaagaagttaaaagagatatgatgaggatatataaaaagaacgcaaggtgtaataggttacaatgcttgattttgcacgaaatttccacattgccttctttttgaaatattgtgcttatattacaaattaaattaagcaaaatttgatacaattccacactttttaaaatggtagcgtaataccaaaaagtattaaagggttaaaatggcgcaagtagatatgattactatacaaggctacaaatctattaaatatttggaggattttacacttacaaaattaaatattcttattggtgctaatggggtgggtaaaagtaactttatctctatttttagactacttaatgaaatgtataataagagattgcaactttacacacaaagcaaatctcctgataattttttatattttggtagaaagcagacagacaaaatttattttaaatttcaatttgatagtaattcatacaaggtcactatcagtcctactcaagaaaataaactcttgattgaaagtgaatatgtaggttttttgaagcacgagtatttgataggcaataacttagaagaaagccatattagtgaagctggaagctatgctaggtctaaagctgtcggaatatattctgcttactatataagcaaatggaaaatctatcatttccacgatacaagcgatacttcaaaaatgaaaggaaaaagtgctagtattgataatcttatctttaagcaagatgctgaaaatctagcaccttatcttaaaatgcttaaagataaattcacacagcattacgagcaaatcatagcaactatacaaatggttgcaccatttttcggtggatttgtgctaagagatgatgaatatattcagcttgaatggtttgataaaacagacccggatacgccatttaaggcgcattatttatcagatggcacattgcgatttatcgctcttgcgactttattattgcagccttttgagctaatgccagatacacttatcattgatgagcctgagcttgggcttcacccattcgcgctttgcattttaagcgatttgattaagcgagcaagtaaagaaaaacaaatcattatttcttcgcaatcagtagaacttatcaattattttgagccacaagatattattgttgtggatagaatggacaatcaatccacctttaaaagattagatgctactgacttggaatcttggctaaaagattattcgttaggcgaaatttggaaaagtaatctcataggcggtcgtccttaatgaaaagagtttatatactttgtgagggacaaagtgaggaagtatttattaggcaagttttagccccctactttatcaatataaattcacaacattgtcttatccccatagttacaaaaacttccgctggacacaagggtggcggtttgaaatatcatagaataaaaaaagagattctagccctgcttaatcacaaagaagcctttgtaagcacattttttgattattatgccctgcctaatgattttccaaaatatgacaaacaaaatggtgatatttatgagaaagtcgctattttagagcagggtttttatgaggatataaatgatagtgacgactgctaccaaagatttttcccgcatattcagccttatgaatttgaaagtctgctatttagtgatattgataaaattattcaggcagacacagagtggagcaataataaatcttactttattgggcttaaagcgattattgatgaatttaacaacccagaattgattaacaactctctacaaaccagcccatcacatagactaaaaaatatattgccaacatatagaaaggttttgcacggcaaaattattactgaaaagataaccattacacacataagagaaaaatgtagccatttcaatgagtggtgtaagaaaattgcatcgttgtaatatttataaacactatgacatagcagtgctttcgtaaaatccaaagtgaaaatgaaatggaaaatgcgcaaatttaataagtgttgcgataaaattgccataaatatttttacttaggggctttatggttgttgcgatatttaggattttaatctttatgctctttgcgttgctattttctgcgtgtgcgatgagtggtggcgaatctgccccaaatccgcccaatctatcatcaaatccaccgcacttaaatattaagcctaatctcacccaaatttccccgcccattccccaaaaactagccgattcgcccaaagatagcattatcaaagtccttgatgaaaatgggcagattcgttgctatatgcccgatgtgcggagtgtttatgctgtgattggcacttgtcgcacgagctgggcaaaacccgcgagatacgatgtctttgggcgaatcgcttataatgtagaggatacttggctttgcctgactgctcccgaatcagtagcgcaaacaaagcgcaaagataaggactacctaacgctaaagccctgtgtcatcaatgataaaaaacagcggtggaagctcaaaaatgacttgttctactcgcttgatgaaagctatgtgataaaagatgacggcgcgtatctctatgctacgactttgcgtgatacaagcctaaagctaagtaggattcacacctcgatgagtgaatggctaagcaccattgcgcgtcctacaaatcttagcattctcacttccctagcgtgggattacaccacgagagagggcacacagcgatattttctctacaataacggctctagcagaaacaccacggatttgtattacaacttagagagcggacatatcgcgcaatatgacgactataaggggctaaactgcctttatgcggatttgggtggggcgcagtggagctgggcttggtggggcaaatgcacggacgcaaaagctcctagcaaaaatcgcgcttattggcgatttatccgcgttagcgaggctgaatctgtcctattaaactttcaaggcgcggcgttgcgcgtaactagcacggggattcattgggggacgccatacattgtcgcgcccaaatatctgctaaaagatagcgcaaactaccctacttcgcgctttatcatcgacaaagatacgcaggattggcttagatttatctatgcaaatatcggggataatctgccattttgcccagctccctcaaatgaaacgacaaaaagcacaaacacagaacaaaatccacccaaaaatcagcttaaaaatcaatctccacataaaaatccgcaaaacacacattccccacaaaatctaaaaaaccctcctaatgattttgtcataaacaattcttggcttgctaggcttttggcgattatccacacgagtgatagtggggagagtagcgtaggtgtgtgcggtatatgcttgttgcaatcttttcaaatcatcgctgaaattttggaaaatccgcgagttccgcgccaaagtggcggatatttctttaatacacaaatgggcgcaaatccctttgtgtcctttgaatcgcgcaattcattgctttatcacacgctagatgacattgtccgctggtttcctgcttatgcggagagtcctactatcacagagcaaatgaggtttgactacaataacaacctagccctaatgagtgcaatcgcacttttgccacaatatgattgggcaatcaccactcgtgcacaagggcagagtgatattcctcgcgtgatagattctatctttggctcggcttatggaagtgcatttgtagtgctacttcgtatgcagagcgcgcagcaagagggaggacacgctatggtggctataaggacaagtgctggtgtggtgcttatccccacaaatgtgccaatgagtgcggaggaacttcgcatttttactacgcctttgcgcaatagaggcgagtttttggctagatttagtgaatatggctttagtatcacaaatatcgcgctacttgtgcgcgtggactgctagcaaatccatttgctagcaatatctcgcttagcaactgcacgggcgagggcgaaaatagacgcggtagtggcgcaactcctacaagtgcgcttgtaaatcaatgtgctagcgggcgatgcttggagtagttggatttcatagccctcatcatttttgcccttatgctttttgggattttgcaccatttttgtgctaggcttatttttctaagcacaagcgcgattcttaaaaaatgctttttgtttgccaaaataaatgcaggcaaaatttagtataattgcgcgaaatattagccataaggacacaaatgactttagcttcgcaaaagtgctacacagattctataagccaatctagcaacttgcaggacttccctttgtttttgctaggcgatgcaaaagatacgctaaaaaccttgcaaccactaagcattgattttgtgctgacttcgcctccttatgatgatttgcgcgattatgaggggtttagctttgattttgaagctattgcgggcgagctctttcgcgtgctaaaaaatggcggggtaatggtgtggattgtgggggattctgtggtaaatggcagtgagagtttgagtagctttaggcaggcactgcatttcaaagatatagggtttagaatccacgatacgatgatttatcaaaaaaacaatttttcaaaccctagcaagacgcgctatcatcaggtgtttgagtatatgtttgtcctctcaaaaggcacgccaaagacattcaatccacttatggataggaaaaatgtctatgcggggtatacgacatttggcgaaaacaccacgcgcaagaaagatggcaacttcacaaagcaaaaaaagcgcgtgatttcagaatttggtatgcgctataatatttggaaaggcaacacttcagggcaggaaaatatgtgcaaatccataaaacaccctgcgacttttccgctgtggctagcacgcgaccatttgcactcgtggagcaatcaaaacgacattgtcctagaccctttttgtggctctggcacgacaggtgtagcctgcaaagagctagggcgcaacttcatcggctgcgagatagaatcaagctacctagatttcgcaaaagagcggataa

SEQ ID NO: 3756 - DNA, 23333 bp, synthetic construct
  source 1..23333: mol_type = other DNA
  misc_feature 1..23333: note = Synthetic
taactaaagtagccttagtaatttcttctttaatcatagtagaatcagcttggcttagatttaagacattgcttaagccaatgaagtaatttccttctttattgacaatcacagggaaaatatcacctccttttgttttgccaattacaaaaaacgatgaggggaagctgactagttcttttttaaattgaacttgcacatcaatatcggttagctctttaatgctctttttaaaattagtctcaaaatcagcatttgctagtgttagaatgagggttaatagggtaatggtttttttcaatgttaatcctttcataaaatgagaaattgtaatatattttttgtaaatattatttaaagataagaggattcttggcgttagaggggatgaagtcttctaaaaactcttcttgcagatgagattgtatctctagcgtaaaatttcctatgaaagcttcttgtaggataataatgggggaggtgaagaatccataaggatagagtttatgccgcaaatcactttgtttgtgtgtagctaatccttcttttagaagttgctcaaagctatctttgacgaggtattcccttaaaggttcaaattctaaaaacataatcccctctttattagcataaccaatcccattatcccaaaattctatttttgcttttgtttttttagggagtatggaataattacagataaagctagggatagctttgccctcttgcgttaataagccttgaataagttggtaatgcaagatttttcttttaatgctttggtagggtttattggatttttctaactcctctcgagtttggaatatttttaaacgcaatgcggggagattgcttgaagactttggggtattaagactagagagtagctctagggatattttatttgctgcttctctttgcttttggagagcaaagatacaaccacaatagttttggcgatagaggtttgcttctttagcaagttggttttgtatttgtgtgcctccattgctcctaacatcaatggggaggaatcctaattggtatttttgtgctatggcttcaccttgtgagaatagctcattttgggatttcatagggcttgcgagtaaggttgtggtgaattctatgcaatgggtttgttgggctattttcgcacttttttctaaacgataatcaaagcaataactacatcgttcccccttttctggctcatcttctaatcctctagcaccctttaaccactcttgtaaatcatattctccctcaataagtgggattcctagcatttcacagcttctttgcacatcttttaaacgcataaggtattcttcataagggtggatattggggttatagaaatatccgcaaaatgctttttgggggtatttttctttaagttgggtaaggaagtgatgactatctacgctgcaacaaatatggactaaagtcgtgctttgttggctaaaatcataaggaatttttgacatttataagccttttttgttggtattataagcattaaatcctaaaagggaactttttacaagcttaagtttaaagggaaaataaaatacaagcattctttagggtaaagtcttaaaaggattttaaaatcttctttttagcccttttttgctccctgattagattgtccttatccccttattattgcaacactaaaaagctttttaaacattgttatattcttaattaaatatcgtttattctaagcaaaaccaaagattcttatcaaatatttgttttgaaactggaataaaagttactatatgtaattttgatttggaggattcaatgtttaaaaaatatcattgggagtttttgtctagttgttgccgcttttagcgtcagatgaattaatattgataatcttttcaaaaaacaaattggacttaagaagcattacaagcttacagctactaagcacagggaatgctaacattaaatttcaaagtgcagtagtgcaaagagaaatcgcagtcaatgagtataaaagcttttacttaacatctcaaaacttaaggggatatagcgaccctgtggtgtattttctatcgtctccaaaaatcacattagacttaggggtaggacagagactctaaacaaaagattaatggatagcaaaattcacaattgcgttctattcctacactaaggttctacttatagcattaattcctatacagccatatcccttagtgcttctttaggcggtagttctgccgcacctgatgcgatttttggctttactctttagcggaagctttaaagaagtgtttaaggcaatagaaaagattgagattgaatttaatgcaaactaaaaggcgaaaaagtaaaattgagtgaatggggaaattttaaatcaaaagcatttaaaaacttcttgggtgctacgattaaagcatatccactctttttatctctatcccatatactataaaattctttcttagagctgatatattccccatagcttggatcaaggatttgtagataattacctttgtgattaataataacgacaaaatgagggaatcttggatcatcctcaattttgacaagcagaggaatattggtaagcttatctaaagtctctctatttaaagcataggaattagctacaaagcctagcttttggagggctatttttagctctgtgaagcttaccatatcggtatttattttttcgttcattacccttaaaacttctacctcggttaagtttctattgtctaagatatttagcaatgtagcaagagaggaagcaccacaagattcttcatagttttgcctaactacccttttgttttttattgtttgataggattgcacgataaattctgcatttgtaaaggttgcagtaaaaagaaaagccacgatagtgattccctgtaaaagttttttcatcgttaatctctgttattggggttgaattttatttccactatgcattggtttgatgcaagaaattttgtgcccttttgtataaatcttgggtatagttatgaatatcttgttggctaatagtccaattattatgcaccgcttttgtaaatttcatcgttaaatcaatgcctgttgccatagaatctaagctagagcgataatgcccaagctgtgtaaaggcataaatatccattgtaacacctccaaagtttgcagcaatctcattaggtgcaaaaatcttagattttcccaaaagttccatagaatcttgtaatttaaacttgatgagttcttttagtttctctgggctttgtaaggcttgttttcttaagttaatctcttctaaagataattttttgctcctgttgctaacttcttcactaagtatctcatttaagcgattttctatcttctccctaagttgtgttttacctccacctaaaaccctagcgtcttgtgagtttaaaaagcttacaaacaaggcttcttgagagaaatttgtatctttttgtggatagaagtttaaatttttcatctcttctacagagaaattaagttcatatactcttagattaagatcaatgctttgtaattgtgagcttaaaactttagcttccctaaaagtctctttattataaagattagtaactttaaagtcctctaaactttccataatgctaaatgctttcatcatttcagtatcttctaacatagattcatttgccatatatcttttatcactaaaacccttgggtagtttttcaatttcccctgcagaataagattctttgatttctggcataatttgtgtaaagacattatagtattggttaagggtgttagctatatctatgtgtttgaatacttcttcattggatatgggtgcttcattgaatatattatgccattttccataattccattgcccaatttttataatttcttctaaggtgcttttatgcaatttaaatccacttggaagtccagcggcagcattaaaatcctctcctagataaccttgcttatctacactataaccataaaactcattttgtatccttacctcttgtatttgggatttgtttgtcttagcatttcttatgagtaattcatcttttaataactctgctactatatctgtctttttatgttctatagtagttagattgttaggtatatattggataaagtcggatatggaatgctttatagcaagattcttggtatctatgggatatgaagaatctaaaacttcttgggtattaatattttgtttaggagtcttagattctgtattaggaatcttatatatagcattagaattgaaattagaatttgaaactttcattttttcctcctttatccttaaatgattaatatatagctttaaattgtcttaacacttcttgtgcattaccataatgttgccaaaactcatgtgttttaccatcaggagtagcataagttaaataatattgtttttgcccactcatatatctatatttggcgacaataaagccattgaatccaaattctctagatacatcgtatgcactttcataagtatttgaaccacttgttacaacaaatgcatacgatctaccatatccataatgatcatattttgaatacctaataaatctataccctccaacaacttttccttcctcttctatacttaaaagtctcacccctttatcagaatcacttaacgctcccttagtaacttttgctaaaaaatcctctgcaaaagcaactatagaaaggaagcttagaatagccattacattgaaaagttttttcattttgaatctcctttgaaattattaagattgaatctcactataatggaaccaatctaaaaagctcttttctttgagtttattatgttaaaagtctttatgtcgttaccttttgttaagggttatttttaaaattttttccataggctgaagccaaaaatcgcatcaggtgcagcagaacttcccccaaagctaccactaacagaaatcgctgttgtagcatttaggctataggtggaacctaaagaaagggtagggatagaacgcaattccgaactttgattttcattaatcttcctctctgtttggaatctttgttctactcctaaatctaaagtgatttttgggcttaagataatagagagattcccaccgatataaatgctattcccataatcaatcttgcccattttaaactttctaccttgattgtatccaactcctgcataggcagaatacactacagggtcgctatatcctcttagagccatctctaaattttgggattttaaatagaaattttttgtgtgttctatggctgtttctctctgtattactgcactttgaaatttaacttgtggcacaaaatctgcaacactatcaaaagtataaattaatccaagccatagggaatcaaagcttaaattattttcgtttgaaaaattgctattgaaagcatttgtgtattctttccttgcgtaacttcctccaccagatattaaaacatcaaattttggtgtcaaggtgtaaataaaggtttgattgagggagatttgcttagtatctttccatatcgttgtatctccttggattgaaagggtgggatagagggcataggaatttgcattgcctgtgctaagcaaagaaaagtttgtaatgctccttaatcctaattgttttttgaaaagattatcaatgtttaattcatcacttgccaaaagatagctagatattgctaaaagtataagaaagatctttttcattatcgcccctttgaagtattgtagaaattataagcaaagggtgttccatttattttcttgtaacaaaaaataaacaagcctataagaagaatcttaaggcttttaagaaaaatttttattttaatactttttaagttagtgcatattagagtttgaagcctaacaaaatatttttaaagaagattcaatgaaaaaagtgtttttaactgcagtttttgctttaggatttattggtgtagccaatgttaatgaagctgtggaaagaatgcaacaagatagaatcgcacctattgtagcttgggggataaagtaaggtgtaatgtgggggattagatatactattgggtgcttttaatgaaagacatccaattaatagtggagttggaatacacggttggcgttggtaatgttagaaagccttattggtagccttatagaatcctttatgctatgcaaaaataaagattatttgtgtttgtttgtattagtggtgatagcttttatgctctttatagttttttcttatttgtatggggatttttagaatttataagggtttatcataaggcttgttgtaatatgaaaataatattgtgcagggaatctaagcaattgtttgtcatagcgtagaaatagataaaaagtaataggcttgatgctaaatatattctataaattgagcaatgcaattattttaagtagcctaaattcgtcttgtgccttttttaacataggtggaagcccaaaaattaggattagattagtatttaattagattagtatttaagcggtatgaagtgttagatagcttattgtttatgcattggcttctttaataattataagggcttattttttataagcataatacaaaaaggttcccattcctacgataaagacaaaagttagaaaaatcaccaaaataatatctaagctactcattttgtctataccttgacttctatttgctcttgcactttttctctaagttgcccacaagcagcacttatatctaagcctttggattctctaatggtgcataaaagtcccttttggaggagatattctctaaaggcttctactttttctttgctgggtcttttataggggcttccttgatgaggattgaaataaatgagattgaccttagccttgattttattaagcaaggctacgagttttttcgcactttttaaatcatcattgagactatcaattatgaggtattcaaacattatgcgttttctgctatcaagagggaagtttgagatttcttgaatgatagattggatattataggctttattgataggcataagctctgtgcgtaaatcatcatcaacagcgtgtaaagaaattgcaagttggattcctagattgagagtccctaattttttgatttttggtgcgattccgctagtagagagagtttgacgacgcggtgagatatttaagccatcaagctcggataatattcggatacattttgcagtattttctaaattatctaaaggttcccccatacccatataaacaatattaatagccttgttgggtggaatgttttggtcttttttgatagcaaaaacttgataaaccatttctcctgcttctaggttacggacaaatcctcctttagcagtgagacaaaagctacagcccactttgcaaccaatttgtgaggaaagacaaagcgtaaatttatcctctttcattcttattagcaccgattcatagctatgattatcataggttttaaagaggtatttgatgctcccatctttactttcttccttttttaataaggctgtagatgtgcttgtatagttttgtgctagaaactctcttaagtctttgggtagattaaccatattttcaaagtggctttcataatgcacatagagccagtggtaaatttgtttggctctaaatgcgggaaaatgctctttgagggattttgcaagttcttctaaagtgtagttaaaaatatagagtttatccattttgtctgtctttaacataggattctatttttttcacggctattttatgattagccagaaattcttgatgcgattctttatgaatgtgattagtagagcaaaatattccaagagcgggtaaattaaaatactttgctacctgtaagatactaaaaaactccatattttcataagcaattccaaattttagtagattttttgttagctgattatctgtgctaatgtagttgctagagttgatgattttatggggggttgattgtgatagtgtttcatgtgaaacactttctagggtaatgcagttgtctaaaggcgtataagattgttgttgcaaaaaggatagttcgatgttactagcacttttagattcaaaaacctctaaaaggcttttagaatcatcataacaaccacaagttccaataaaaataatttcattaggtttatccttataaatagaataagttagctgaatgctactttgtattaatcctatgccaatgggttttgcaaatgagaaagtctctatatctcccgcacaataaaacataatttttccttaatttggtttttgaatctctttataataaagagaagattcttcttttttaatagttttttgggaggggatttgcaacacttcaaaaaatcttgatttttctagataggcaatttcaataatatctccaactttcacattgcgacttgctttaacagggattccagctatttttataactttattgtctatcatatcttgagcaatggtgcgtcgttttgttatatttaccgcattgaggaatttgtcaatccgcatctatctccttgtttttgtataattgtagccaaaagaatattaatttatcgttcgtgatataattatgaaaacttttaaggagtgaaaatgaagcaatcggttaataaagtagttcttgcttatagtggcggacttgatacgagtgtgattttaaaatggcttggggataattatcattgtgaggtggtaacctttactgctgatattggacaaggtgaagaagtagaacccgcaagagcaaaggcagagaagctaggaatcaagagcgaaaatatctttattgaggatttgagagaagagtttattagggattttgtattccctatgtttcgagcaaatactatttatgagggtgaatatctcttagggacaagcattgcgcgtccattgatagctaagagattggtagaaatcgctacaaaagtaggagcggatgctattgcacacggagcgacaggcaagggaaatgatcaagtgcgttttgaggttggggcttatgctttgaagccagatattaagattatcgctccttggagagaatgggatttaaatagtcgtgagaaattacttgcttatgcggaatctgcagggattcctatagaaaagaaacaaaatcaatccccatattcaatggacgcaaatttattgcatattagttatgaggggcaaatcttagaagatcctaatgtcgcacctaatgaagatatgtggcgttggagtgtttcaccaaaagatgcacccgataccccaactattattactattagctttaaaaatggagatggagtggctattgatggagaggctttaagtccagcaaatttttgggctaaacttaatgaattaggaggcaataatggtatagggaggttagatttagtcgaaaatcgctatgtaggtatgaagtctagaggttgttatgagacgccgggggggactatttaccttaaagcacatcgtgctatggaatccctttgtcttgatagagaagaagcgcatttgaaagatgaaataatgccaaaatatgcgagtctgatttataatggatattggtttagtcccgagagggaagctctgcaagccttgattgataaaacacaacaaaaggtagagggggaagtgcgattagagctttataaggggaatgtaactattcttggcaggaaatctaagcaatcactttttaatacggcttatagcacttttgaagaggattctgtctataaccaaaaggatgcggcagggtttataaagcttaatgctttgcggtttataatagcgggcaaagcaagggaataaattcacttttattgatttttgtaagggttgttgatatttagggttagagtaggtttaataggaaaatgaagagttattattaatggtatttattgtattattgatgaatttagtttaaaaggaggtttgtagatgaggattcttggttttgatataggcattacgagcattggttgggcttatgtagagggagaggagctaaaagattgtggggtgagaatctttaccaaagcggagaatccacaaaatggtgattcgcttgccgcaccacgcagagaagcacgaggggttagacggagattagcacggagaaaagttaggcttaatgtgattaaaagattgctttgtaaagagtttgggctaaatttaagcgattattttgcaaatgatggggaattaccaaaggcatatgagacaaccaaagataccaaaagcccctatgaattgcgctctcttgctttggagcaaaagttagagcctaaagagttagcaagagtgattttacacattgccaagcatcgtggctatgggaacaaacacgcaaaacgcgatttagaagcagaggagaaagcaaaaaaggcagcagaaaaagccccacaagaaaaagaatctactacaacaaatggagattctaaaaaagagcaagagaaagtgctaaaggcgttgtatcaaaatgaaacattacttaaaaaatatcaaaccaattatcaaaccaataataaaaccaatgatgaaactaataataaaactatctttttggttggtaaatacctctataaagagtttcaggacaaagggcaaagaatccgtaatacaaccaacaattatcagcacacaatgcgacaagaatggttaaaagatgagctagagtttatttttaaaaagcaaaaagactttggggcaacttttagcgaaaattttgaatcccaaattttggaaacagccttttaccaaagggatttaaaaagttttgaagataaagtcggcaaatgtgtgttttatgaaaatgaaaatcgcgcacccaaagattccttaagtgctatggagtttgttgctctcacacgcattatcaacaccctaaaaaaccttgagaaaaaaagtaagaatcttggcattggtgaaacctatggaaaagataagattcaagagattctaaaaattgtgcttgataaaggcgagatgagttataaagaattgcgaaaaatccttaaacttaatgagtcaattttatttgctaaagattctaagcttgattataccaaaggaatgcaagaagctgaaaaggcaaagtttattgagctaaaaaatcttaaagctttcaaaaaagcaatgggtggagactttagcaagtttcctcgtgaggagctagataaaatcgctaccgatattgtcctcattaaaagcaaagaaaatttagctaaaaaattgcaaaactattccgcattaagcaaggagcaagtagaagccttaagcaatttgaattttgcaaagcatattgatttaagccttaaagcacttgataagattctaccctttatgcgtgaggggttgagctatgatgaggtggtgaaaaaggtaggattgcaagagcatagaaagtataagcaaaagggcgagtttttaatcccgctaaaagagtatgaaccctatttggcaaatccagtcgttgcaagagcattaagcgagtatcgcaaggtgctcaacgcacttttaagaaaatatggaaatgtgcataagattcatttagaatttacgcgtgaggcaggcaaaaactatgatgaacgcaagaaaattgaaaaagagcaaagagagcattttgaggcaaaccaaaaagcgataaaacaacgtgagattctaggattacccattaatggcgcaaatattcttaagatgaagctttggatagagcaaggggaatgttgcgtttatagtggagagaaaatcacaagtaagcatttttttgattctaatgccttgcaagtggatcatatttacccctactcacgcagttttgatgatagctatatgaataaggtgcttgtgtttgctaaagaaaatcaaaataagcttaataaaacgccttttgaagcctttgggagcgataaagagaaatgggataggattcttagccttagtgcaaaactccctaaacaaaagcaacgtagaatcagcaataaggactttaaagataaagaacttggctttattgcacgcaacatcaatgatacaggctatattgcaaggttagcaagtcaatggacgaataattgcctaaagtttgaagatttgcgtgaaaatgaagtaacgattgcaggagaaaagggcagcaagaatcatctagaggtgataagcggacagctcacatcaatgcttaggcattattggggcttgggtgataaagatagaaacaatcacctccaccacgcagtagatgcagtgattattgcttatactaatgcaaagacaattaaggcatttgcagattttaaaaagaatcaagagcaaaatagggcaaaattctatgctaagcaaatttcagagcaagaatataaaaggcaaaggaatccttttgagccttgtgcgaattttaggcaaagagttgaagaaaaaattaataaaatatttgtctctaagcctcctagaaaaagagcgagaggagctttgcacaaggagacatttggttctatttgtttagatggtaacaataattgggtggcaagatttaaaataaaatccaaaaaagaacaagaggacatcaccaaagaaaaagccacaaaggcaaaatacaaagatgaatttaagggagaggaaaacattagaaaggctctaaagttaggcaagattcgtaggattaataatactcaaaaagatattgctattggtgataaaattgtaaaaaacgaaacaatggtgcgtgtggatatttttaaagacaaaaaaggcaaattctatgctgtgcccatttatacaatggattttgcacttggaatcctgccaaataaagcggtagccacaggtgaagatgaagacggagtgattaaggattggatagaaatggataagactaaatatgaattttgctttagtctttttaaagacgatttaattaaggtgcggaaaaagaaaatgaaagaggcggagttgtgctattttgtaggttttgatacagatggttctcgtattattgttgcaaaacacaacaatgattaccaaacaatgacagaaaatgaatgtaagctatttacacttaaggaaaaaaagaaaaagcagaaaaccttaaatgatgaagaagacaatcaagaacgcatagaaacagaatataaaataataggcggcagaacaggaatccaaaatcttgaaacctttgaaaaacaccaagtctcacctttgggcgaagtgcaaaaggcagagtttgaagatcgccaagagattaagctcaaaagtagccctaaaggaaaagactaggattctataaggagggcaaggaatgtttgattcagcctttcgcaccttatttttaagcacacccgcgagattaaacttagaagataagcatctttgtatagcacaaaaagacaaagaaagtgtaaagattccacttgtagatattttgtgcgtgatgttagaatctcatcaaatcatgcttacaaatgcactcttaaatgcgtttgctctgcataaaattgttgtttttacctgcgatgaatcccacctaccaagtgggctatttatgccatttttagggcattttagaagttttagcgtgttgcaatgccaaattaacttaagcaaacaaagaaaggcgattctgtggcagcaaatcatcaaggcaaaaattcacaaccaagcccttttactaaaaatgctgcataaaaaagaaagtgaggaattagaaactttagctaaaagtgtgaatttaggagattcaagcaataacgaagctaaagccgcagcaatttatttcaaagctctttttggtaaaaacttctcccgcaaagtgcaaatttttgaagagagtaaaatgggaacgataaatgctgcactcaattatgcttatgcaattatacgaggagtgattacaagaagtctttgtgtgagcggactaaatcctgcacttgggataaatcataaaaatcagtttaatgcctttaatttggcagatgatttgatggaaccttatagaatctttgcagattctgttgtcgtgcagatggttgaagttggggaattagaggagagcttaagtttgcaaaatcgcgtgaagctggtaagtattttgcagagtgcggttatcgtagaaaataagctttatccacttactcgtgcaggcgttgtgagtgcgcaaagtgtagtgaaatgtttagagagagaaaatcttaagcttaaactgccgctattttgcgaggaaaagagtaatggaagagaaatttatgagagtgttagtgatgtttgatatgccaacttgcagtaaaaaagagcgtaaagattatgcgagatttcgtaagtatcttatcaaagatggctttatgatgttgcaatacagcgtatatatgagaatctgcaaaggcgtggcaagtgccaataattatttggacaaggtgggtttgattgtgcctcccaaagggcatattagggcattaatccttactgaaaagcaatttgacaatatgcgattattgctaggcagtagaagtgagaatgaaaaagctaatgcgccaagacagcttacgcttttttagtctattgtcaagttataaggacaaagtttctaaagatttaatcgctaaaatgtttgaaaatacttattggtaaaaagatttaaagtagattcggttttaagggattgtaaccctgcggagaccgaaaactccttattttagccgcttgttaaattctttagtgggattatatcttagattttcttaaaaatcactcatttaggatattttacacccttaaagcctttcaaataccgcaaaatacgataattgagaaagtgtattttaccataaaagaatttaataagcggctaaaacatcataattgtgcaaaatattataggctaaattttaccataaaagaatttaataagcggctaaaaccaaaagcagtgattatactgctttaaaagaattttaccataaaagaatttaataagcggctaaaactcataagcccatttagagagtaaatcctccattttaccataaaagaatttaataagcggctaaaacatcctcacagattctaaaaattaagtgaggattttaccataaaagaatttaataagcggctaaaacttaaaacaaacattccctctctagcactcaattttaccataaaagaatttaataagcggctaaaacagaccactgataaatattgaacctaatatcattttaccataaaagaatttaataagcggctaaaactaagataaagttaaaatctttaaaatctaaattttaccataaaagaatttaataagcggctaaaactatcgggcataagagcttagagaacattccattttaccataaaagaatttaataagcggctaaaacgggattttatattgggttataagtggatatattttaccataaaagaatttaataagcggctaaaactagaataacaggaaagacgataacaaatacattttaccataaaagaatttaataagcggctaaaacgaataataaggttaataaggatttgttaagtcttaatgcaagtattacagatatgggtatgcgtaagattatttttgtgaatttgcaaagaatggggtttattgatagatttagcaaaaagaaagaattatgtgatataaacagaaaatatcaatatagatatgtaaaaatcacacaaagaggcttggattttatccattcaagagatatttttgatgaacaaagacatttaggtattgctttggatttttgtttttgatggtgtggtgcaagatgttttagatattttaaacgcacttaaaccgcaatatataagcgttagtgaaatgatgttttttataacctatcttggcaaggagtatcagggtaacatattaacaaaagataaaattgtagaatttatcaacgaatttagaagtttaaaggcaagagccaaagttgtagaagatgtcgtaagtgaattttgcagtccttcaaattttgaaggcaataaaacagacaagcgagacttccataattggagaaacgaaacgcaaagtatgtttaatagctttgacttgatgtctttgtttgaatacgatacagaaaggcaaagactattgcttaaagctaatatcaatggtgaaaaaatcacattcaaacgcagcagtttaattaaggcagaatattttaagcaacacgaggtgcaaaaagatgtccgctttgagcttcaccatatcgtgcctttttattatgcaaaagatattgatgcactaaaagccattgataattggcaaaatttaatttatattgacgcaaattctcacaagattttcagccttgataaaagtgctaaaaaggcgataagattaaattttagagacttggacgctgtgcttgataatttaataggcgatgaaatcttgttgaaatatacagacaacattaaatacaaggtagaattacagcagagattaataaggtataatcaaaatttacttggaataaatgcttaagaatatatattaccaagttagtggtctaacaaaaataaaattttatgcttacatacaatcaacaacttttatttgcaaaagaaacctaaatacctaaaggactaccaatgctcacaagcgagagtttcaaggattttgtgttagagaatcttaaaagcacattagaggatacaccttatagctttagcgtgaaaaattttttgttattataaatttacgctattggttgaaaggcacaaccaatttgcttgtttaattaagcgtaggctttcttatacaatccaaaaattcccaataatagtaaaacacccactccatagcctaatagaatggaattaaaataacttgctatagcaaagctaacaaaagctactaaagcggttgtgcttacataaggtagttgtgtaataaaatggctttctaccgaacaacctgcacctgttgctgataatattgtagtatctgaaataggtgaagcgtggtctccataaacagcaccagaaagcacagcagacattacaaatgcaaattctacattattagtggttgctaaatttaaaccaataggtagcataatcgcaaaagttccccagcttgtgcccgtgcaaaatgcaataaatgcagagataataaaagttgctaaaggaatagctacagaagaatagcctaccccgccctctagccaaacttttgtaagattggctaagtagattcctgtttgcatatcttctttgataactggaccaatactccaagcaagcaccaaaataaagcttgccggaatcatcgaataagtgcctattttaaaaatagggaagaaggctcttttttctaaatatttccacgaaattaaaagattaaggactaaagctgcaagtccgccccaaaagagagagaatcctgtttgagtatttgctaacatttccaataaatcaagcttaccactttctttatagcctgtccataaaatcaaaagtgtaataaaaccaattaaagcaaaaatggggataattaataatcctatatgactaccttctttttgggtggtagagagaaagtcacgaactcctctatttttgtattttttcatagcagggagatttatttgccaataaatggtcaaaaaaactgcaaaaagagcaaaccaagcataataatttccccaaatacttgagagcaaaacaaaaaaatcttgcccttcacctaatgttgccattattcctaagatataggctccccagcttgaaataggcattaaaatacatacaggggctgaggttgaatcaataatataagcaagtctctcacgtgtagagtgattagcatcatttaaggatttcgtaagctgtccgacagttaaagcattaaaataatcatcaatgaaaattacaatgccagcaataaaagctaaaaattctgaaccctttgcggtattgactttattttttgcccattgcacaaaagcggctattcctccagagtaggctatcatttgtgtgatgattcctaggatgattaagaagccaaatacatagagattagaactttcccattgaatattaccagtttcattaaaactataaaaaacactagaaatgcttttataaatataaacaagcacatcccatagactaccaatattaaaagaattcccatttgcggtagcgttatgataagttaccataacaccggctatagctataccaataaataaagacaaaactactcttttggtgataaatacaagtgcaatcacacaaagaggaacaatcaaacttaaagcagaatccgcatacataaaaataaccttaaacctttaataaatacatttaaaatataatttgttacttagagtgattttcctgaaaattgaaaacaataccttccttgtttgcttccaagaaatacttttgtgtaacagtttttgtttcagtgtaaaaattaatcgcttgttttccataagcgtgtaaatctccataaaatgaacctttccagcctgtaaatgaaaagaaaggcagtggaacaggaataggcacattaaccccgacttgccctacagttacttcttttataaagtaatttgcacaggagagtgaattagtaaagatggaagtgccattaccaaactcattttgattaataatttctaaagcttcatagatattattgacttctatgatacataagacaggagcaaaaatctctcttttgtaaatctccatatgtgtttttacttgagtgaaaacacaaggacctagccagtttccatctggataaccttcaacttgaatatttcgaccatctaatattaggtttgctccttctttaatgcctgtttcaattaggtcttttacacgcttaagagatgctctagtaataagcggaccataagctgcattaggatcattccaagcaccaggtttaatagcttttagtttttctattaggcgtggaatatattttttagaatcaccaacaaaaatggcaacggatatagccatacatctttgtccagctgcacccattgaagcaccaattagagcgttaattacttgtgtttcattaatatcaggcataattaccatatgatttttcgccccaactaaagcttgagctcttttaagattatgagtagcttttgaataaatataggctccgacttttggagatcccacaaaggagtaagcttttattagaggatgttctaaaagtatatcgacttgttctttttgcccatgaacaacttgtaatagtcctttgggtactccactttctaaaaataattcagctaatctcatagcagtttttgggaccatttcagagggttttaatataaaagcattaccggcaacaatcgctaaaggaaacatccataaaggaatcatacccggaaaattaaaaggtgtaattcctgcacatacgcctaaaggttgtttataagaaaaggtattcatttcttttgcgacattttcaacggtttctcccatcattaaagtgggtgcagaacaagcaaattctacaacttcatagccacgtgtcaaatcgcctttagcatcatcaaaagtcttgccctgttccattgaaagaattgtagcaagctcttctaaattgtcttttattaatgcttggtattttaacataactcttgttcgtgccataataggcgtatttttccattgtaaataagcctcattagcggacttaaccgcttcattaatctcctcttctagcatacaaggaactttggctatgcattcttgagtgagtggagatagcacttcaacaaattgctttgtttggctctcaataaaatttccattgattaacgctttaatagtttccataaatcatatccttaaatcaaagcattgtaaaaacgcttctatattgaaattgtcttaaaataaaatttcagttataaacttacaaaattttttaaattttagaaaactttaataaaacttcacttaacttcctataaaaattattcattgtgttttttattaccgaatatatttttaattttaggaatatccatttttggtgatacataaagcatttcaatgaataccaaataaagtatgtcaaactatttttatttggcaaatttcaataaagaatatatcgcatttatagcagcctttttaagtatttgtgttttaaatccatgcttaaatgctaaaaaattgacaatatatataaaagaaatcttaaatattatcaaaaatatatgttacaaaaatacaccactacaaattaagtttgttacaaattttcaaaatacttttctttttatgaaattctaattcataataacaatacattatcattttaaaatatgtgaaaggagtgtaataatgttaaaaaagtttttaatggttagcatactttttagtatggctttagcaaaggatgtcaatattgtatttattagtggtgggaaggatactgatcctttttggaatgttgtgaaaaatggttttcaagatgcgggtaaagaactaaatatcaaaacagattatcgcaattccccaacaggagatttaacggagttagcaagattaatgcaatcagcaatttcaaaaagacccgatggaattgtcgttactattagggatagaaattctttgagtaaagagataaaaagagctattgatttaaaaatccctgtaattaatgttaattctggacaagaatatacaaaagaattaggaatcttaatgtttattgggatgaatgaataccgtgcgggtttgttagcaggacaaaaagctaaagaggagagaggagattccatcaaaagctttgtgtgtgcaaatcacgatattacaaactttttgcaagagcaaagatgtcaaggttttgctgatggtttaggtattaaaaatgatatggttgatgtgggacaagatcctacagagattcaaaaaagaatagaaccttttttaacaaaagtggatgcagttcttacaacaggacctcaaagcactgaacctgtgattaatttatttaaaaataaaaagttaaataataaaccttattttgtagcttttgatttaagtaaggaaactgtcaatgctattaaaaacgatatgattgcttttaccattgaccaacaaccttatttacagggttacttgcctgttattttcttaaataaatatgtccgttatggaatgttgcctagtcaagatgagattcttactggaccagcatttataacaaaagataatgtcaaatttgttgaagaatatgcgggtaaatatagataaaaatcaatataaaaggagtttttatggcagatgagcgtctgaaagaagaaagtgtttttttaaaagtcttaaaaagacccgaattcccgcctgttttaggtgtagttctaatttttgtaattttttcttttttggcaagtggggatatgttttctcttgagggcgtcctgtcatggacagaacaggctgctttaattgggattttagcggtaagcgtttgtttattgatgattgctggtgagtttgatttatcagttggttctatgatagggtttgctggaatgatgatagctatttttgttgttgaatttaaaataaatccagcagtagctattgtgctaacctttattttttcaatctttattggttttttgaatggttatttggttgttaaaacaagattgccctcttttatcgtaacattgggaactttatttattttaagggggctaactgttgctttatcaaggctttttactaaccaaactcttgtttctggggttaatcaatacacagcagatagtattttggctgccttttttggtggcgaaacttttacaagcctttttacatttcttgcccaaagtggtattatcgctacttatgatgatgggactcctgttgttacaggtattaaaatggttgtaatatggtggattggtttaacaatttttggtgttattttgttgcgtttaaccaaatatggaaattggatctacgctataggaggagatgaacaagcctctaaaaatatgggagtttctaccgataaagttaaaatttgcctttttatctttactgcagtatctgcaaccatttttgctacttgccaagtttttgattatggttcagcagatgcccaaaggggtattttaaaagaatttgaagccattattgctgttgttatgggcggagcattgcttactggaggttatggaacagtgattggtgcttctttgggggctttgatttttggtattgtcaatattggtattagctatacaggaattgataatgattactttagggtttttttaggttgtatgcttttagtagcggtgatttttagcaattctgtgaggaaaaaggtgatgagacaatgagtgcgccaattattcatattgaaaatattacgaaacattttgggaatattattgctttaaatggaattagtatggatttatatccgggtgaagtaatgtgtttattgggggataatggagcaggaaaatctacccttataaaaactttagcaggtgtgcatgaaaaaacttcaggtatttataaaatcaatggtaaagatgttattcatcctactccccaaaagattttagatgaaggtgtagcgacagtttatcaagatttatctacgattcctctaatgtcacttacaagaaatttctttttaggtagagaagatgagattttaaaaaagattccctttttaaacattttggattttaaaaaggcgaataaaatcactattgaagctatgcaggagataggtataaatgtgcgagaaccctctcaacctattggcacattaagtggaggggagagacaatgtttagctattgcaaaagcggtgcattttggggcaaaagttttaatacttgatgagcctacttctgctttaggggtcgcacaatcttcaatggttttaaaatatattttacaagctagaaaaaggaatctaggtgttatttttattacgcataatgtttttcacgcctatgcggtaggggatagatttactattcttaatcgtggaaaaactttaggcacttttaaaaaagatgaaattacaacggaggaattgcaaaacaaaatggctggagataaaactatacaagatctaacggctgaacttggcgaagcgacaaaaaacctataatggagaaaatttatgaaaacaattaaattgacagtagggcaggctatcgttaagtatcttatgaatcaatacattgaaattaataacaaagaagaaaggcttttttat

SEQ ID NO: 3757 - DNA, 23249 bp, synthetic construct
  misc_feature 1..23249: note = Synthetic
  source 1..23249: mol_type = other DNA
atagcgaccttgtggtgtattttctatcgtctccaaaaatcacattagacttaggggtaggacagagactctaagcaaaagattaatggatagcaaaattcacaatcgcgttctatcgctacactaagttctacttattcctatacagccgtatcccttagtgcttctttaggtggtagttctgccgcacctgatgcgatttttggctttactctttagcggaagttttaaagaagtgtttaaggcaatagaaaagattgagattgaatttaatgcaaactaaaaggcgaaaaagtaaaattgagtgaatggggaaattttaaatcaaaagcatttaaagacttcttgggtgctatgattaaagcatatccaccttttttatctctatcccatatactataaaattctttcttagagctgatatattccccatagcttggatcaaggatttgcagataattacctttgtgattaataataacgacaaaatgagggaatcttggatcatcctcaattttgacaagcagaggaatattggtaagtttatctaaaatctctctatttaaagcgtaggaattagctacaaagcctagcttttggagggctatttttagctctgtgaagcttaccatatcggtatttattttttcgttcattacccttaaaacttctaactcggttaagtttctattgtctaagatatttagcaatgtagcaagagaggaagcaccacaagattcttcatagttttgcctaactacccttttgttttttattgtttgataggattgcacgataaattctgcatttgtaaaggttgcagtaaaaagaaaagccacgatagtgattccctttaaaagttttttcatcgttaatctctgttattggggttgaattttatttccactatgcattggtttgatgcaagaaattttgcacccttttgtataaatcttgagtatagttatgaatatcttgttggctaatagtccaattattatgcactgcttttgtaaatttcatcgttaaatcaatgcctgttgccatagaatctaagctagagcgataatgtccaagctgtgtaaaggcataaatatccattgtaacacctccaaagtttgcagcaatctcattaggtgtaaaaatcttagattttcccaaaagttccatagaatcttgtaatttaaacttgatgagttctttgagcttctctgggctttgtaaggcttgtcttcttaggttaatctcttctaaagataattttttgctcctgttgctaactttttcactaagtatctcatttaagcgattttctatcttctccgtaaattgtgttttgcctccacctaaaatctcagcatattgtgagtttaggaagcttacaaataaggcttcttgggagaaatttgtatctttttgtggatagaagtttaagtttttcatctcttttgcagaaaagttaagttcatatactcttaggtttaaaccaatgctttgtaattgagagcttaaaactttagcttccctaaaagtctctctattataaagattagtaactttaaaatgatcccaacttctcatggtgctaaatgctttcagtatctcaagatcttctatcccaggctcatttgccatatatcttttatcactaaaacccttgggtagtttttcaatttcccctgcagaataagattctttgatttctggcataatttgtgtaaagacattatagtattgtttaagggtgttagctatatctatatgtttgaatacttcttcattggttaaattagggtcgaacaatccagtagccaatcctccataattccttgtcccaattctaatgatttcctctaaggtgcttttatgcaatttaaacccacttggaagttcagcagcagcattaaaatcctctcctagataaccttgcttatctacactataaccataaaactcattttgtgtgcttacctcttgtatttgggatttgtttgtcttagcatttcttatgagtaattcatcttttaataactctgctactatatctgtctttttatgttctatagtagttaggctattaggtatatattggataaagtcggatagggaatgcttcaccataagatttttagtatccacagaatgtgaagtatctaaaacttcttgtgtagtaacattgggctttagaatctcttgagatttcccattagtagcttgatttatagtactagggctaaagctataaacattatgacttgaaactttcattctatcctcctaatattaatactgggctttaaattgctttaacacttcctgtgcattgcgataatgttgccaaaattcataagttttaccactaggagtagcataagttaaataatattgtttttgcccactcatatatctatattgtgctacaattaagccattgaagccaaattctctagccacactatggggattatctaaattatcagttacaacatacgcataggatctaccatatccataatgatcatatagaggatccctagtaaagctgtatcccccaacaactctcccctcctcctctgcactcaaaagtctcacacccttatcataatcacttaaggcaccatttgtaacctttgctaaaaaatcctctgcaaaagcaaccatagaaaggaagcttagaatagccattacattgaaaagttttttcattttgaatctcctttgaaattattaagattgaaactcgctataatggaaccaatcttaaaaagctcttttctttgagtttattatttttaaaatttttatgttgttaccttttgttaagggctgaacttaaagaaagggattccatctagctcacctttaataaattatttaaaaaagtattcattttttcttgttgggttttagcctcatagggtttagattctttggaatcttgtttgatctgtgtgctttggtaagactcttgcttgtttaatgcttgaagctcttgtgcattaagcgaatgagaatctaaaatctcttgaaagacttttagaaatgacgataaagcattaaaaaatttatctttatcttcgccccagttaatcgtgccattatgtgtataacctaaatctaccaattcttgtagatgggattctacagagattttaccatttaacaaatcccaaaatctctcatctatatcataattaatcacataagtattgggaaatttctttgttttttgtatttgagcatcgagaagtttgttatattcttctacttcatagaaaaaatccgaatgttccccaacgatttcatttcctaggaaagacattatcaatagcccactcatagagattttatctccctcaaagtaacgctcttctatgtggaatctatggtcttgtctctgttggagtatttcatcaatatctattaagccatgatgaatagagaatggaacagaaatacccgttttcccgattttgtcccacacttccataaattttctactttcttgcagatttaattgcataacaggtttgctattttctctactagaacctaaagtatagatatatctatggggtaacgctctcacctcatcgggcttaagcatcgcattactttggcttaaatcaccaacgaaatcttgaaaagaagcaaacgcattcttgagtgtctttgccatatcaatttctttatagtcagaatcataatgactggtgttatcataataaaattcacctaaatctttataaacaattttataatctagcggaagtccagcggcagcattaaaatcctctcccataaagcccttttcatctatgctgtattttccaaaagcaatgccctgtaataaatcaatctgcatactaagctgtgtaatctcaaaattctgtttaatcatttcctctaggcttgtttcctctgggcttttcctccttctattttctttttttaacgcctctaattgtttttttaattcgttgatcctttctttatcaattttaacttcttgcaccttatctatagtatcctcattgtttttcatcggattaaagagggataaagcgggattgaagtccccttgtaagtagagatttgaacttttctctagcatctttgcaaaggaatcattagaattactgctttgggttgcattgtttgttaaataacctaaagggttcgttctattttctacacgcataggacctcctagtatctcttagaatctaaggcgtgcttagccctaaattgatagaagtttgctaagtctcttgcttttttagtataagcttcataaagtttattgctccctaccaaagtgtagaatacgctgtaagtgtatttgtgattgaaaggaacacttctagagtagtgatagttagattgcacataaatttgctttacttgtccccaagtaactccaatagcatcactccgtgcttgcggacgatattcttgtctaagtccaagatgtcgtccattctgataagtatctcgcttaaattttaaaacttctatggggttgtttcgattgactttgtcgccaaaaaggtctatttctccatacaccgtatatcgcactggaaaaccatagtttgatattctacgatcaaatggtctgtatatatatattcccccaacaacttttccttcctcctctgcactcaaaagtctcacaccctcatcataatcacttaaggcaccattagtaacctttgctaaaaaatcctctgcaaaagcaaccatagaaaggaagcttagaatagccattacattgaaaagttttttcattttgaatctcctttgaaattattaagattgaatctcactataatggaaccaatcttaaaaagttcttttttgggtttatcattttaaaagtctttatgttgttaccttttgttaagggttatttttaaaattttttccataggctgaagccaaaaatcgcatcaggtgcagcagaacttcccccaaagctaccactaatagaaatcgctgttggtagcatttaggctataggtggaacctaaagaaagggtggggatagaacgcaattccgaactttgattttcattaatcttcctctctgtttggaatctttgttctactcctaaatctaaagtgatttttgggcttaagataatagagagatttcccccgatataaatgctattcccataatcaatcttgcccattttaaactttctatcttgattgtatccaacccctgcataggcagaatacactacagggtcgctatattctcttagagccatctctaaattttgggattttcaatagaaattttttgtgtgttctatggctgtttctctctgtattactgcactttgaaatttaacttgtggcacaaaatctgcaacactatcaaaagtataaattaatccaagccatagggaatcaaagcttaaattattttcgtttgaaaaattgccattgaaagcatttgtgtattctctccttgcgtaacttcctccaccagatattaaaacatcaaattttggtgtcaaggtgtaaataaaggtttgattgagggagatttgcttagtatctttccatatcgttgtatccccttggattgaaagggtgggatagagggcataggaatttgaatttcctgtgctaagcaaagaaaagtttgtaatgctccttaatcctaattgttttttgaaaagattatcaatgtttaattcatcactggctaaaagatagctagatattgctaaaagtataagaaagatctttttcattatcgcccctttgaagtattgtagaaattataagcaaagggtgttccatttatttttttgtaacaaaaataaacaagcctataaaaagaatcttaaggcttttaagaaaaatttttattttaatactttttaagttagtgcatattagagtttgaagcctaacaaaatatttttaaagaagattctaatgaaaaaagtgtttttaactgcaatttttgctttagggtttattggtgtagccaatgctaatgaagctgtggaaagaatgcaacaagatagaatcgcacctattgtagcttggggaataaagcaaggtgtaatgttgggggattagatataccacttggggtgcttttaatgaaagacatccaattaatagtggagttggaatacacggttggcgttggtaatgttagaaagccttattggtagccttatagaatcctttatgctatgcaaaaataaagattatttgtgtttgtttgtattagtggtgatagcttttatgctctttatagttttttcttatttgtatggggatttttagaatttataagggtttatcataaggcttgttgtaatatgaaaataatattatgcagggaatctaagcaattgtttgtcatagcgtagaaatagataaaaagtaataggcttgatgttaaatatattctataaattgggcaatgcaattattttaagcagtctaaattcgtcttgtgccttttttaacataggtggaagcccaaaattaggattagattagtatttaagcggtatgaagtgttagatagcttattgtttatgcattggcttctttataattataagggtttattttttataagcataatacaaaaaggctcccattcctatgataaagacaaaagttagaaaaatcaccaaaacaatatctaagctactcattttgtctataccttgacttctatttgctcttgcactttttctctaagttgcccacaagcagcacttatatctaagcctctggattctctaatggtgcataaaagtcccttttggaggagatattctctaaaggcttctactttttctttgctgggtcttttataggggcttccttgatgaggattgaaataaatgagattgaccttagccttgattttattaagcaaggctacgagctttttcgcactttttaaatcatcattgagattatcaattatgaggtattcaaacattatgcgttttctgctatcaagagggaagtttgagatttcttgaatgatagattggatattataggctttattgatgggcataagctctgtgcgtaaatcatcatcaacagcgtgtaaagaaattgcaagttggattcctagattgagagcccctaattttttgatttttggtgcgattccgctagtagagatagtttgacgacgcggtgagatatttaagccatcaagctcggataatattcggatacattttgcggtattttctaaattatctaaaggttcccccatacccatataaacaatattaatagccttgtttggtggaatgttttggtcttttttgatagcaaaaacttgataaaccatttctcctgcttctaggttgcggataaatcctcctttagcagtgagacaaaagctacagcccactttgcaaccaatttgtgaggaaaggcaaagcgtaaatttatcctctttcattcttattagcaccgattcatagctatgattatcataggttttaaagaggtatttgatactcccatctttactttcttccttttttaataaggctgtagatgtgcttgtatagttttgtgctagaaactctcttaagtctttgggtagattaaccatattttcaaagtggctttcataatgcacatagagccagtggtaaatttgtttggctctaaatgcgggaaaatgctctttgagggattttgcaaattcttctaaagtgtagttaaaaatatagagtttatccattttgtctgtctttaacataggattctatttttttcatggctattttatggttggctagaaattcttgatgcgattctttatgaatgtgattagtagagcaaaatattccaagagcgggtaaattaaaatactttgctacctgtaagatactaaaaaactccatattttcataagcaattccaaattttagtagattttttgttagctgattatctgtgctaatgtagttgctagagttgatgattttatgggggttgattgtgatagtgtttcatgtgaaacactttctagggtaatgcagttgtctaaaggtgtgtaggattgttgttgtaaaaaggataactcgatgttactagcacttttagattcaaaaacctctaaaaggcttttagaatcatcataacaaccacaagttccaatgaaaataatttcattaggtttatccttataaatagaataagttagctgaatgctactttgtattaatcctatgccaatgggttttgcaaatgagaaagtctctatatctcccgcacaataaaacataatctttccttaattgggtttttgaatctctttataataaagaggagattcttcttttttaatagttttttgggaggggatttgcaacacttcaaaaaatcttgatttttctaaataagcaatttcaataatatctccaactttcacattgcgacttgctttaacagggattccagctatttttataactttattgtctatcatatcttgagcgatggtgcgtcgttttgttatatttactgcattgaggaatttgtcaatccgcatctatctccttgtttttgtataattgtagccaaaagaatattaatttatcgttcgtgatataattatgaaaacttttaaggagtgaaaatgaagcaatcggttaataaagtagttcttgcttatagtggggggcttgatacgagtgtgattttaaaatggcttggggataattatcattgtgaggtggtaacctttactgctgatattggacaaggtgaagaagtagaacccgcaagagcaaaggcagagaagctaggaatcaagagcgaaaatatctttattgaagatttgagagaagagtttattagggattttgtattccctatgtttcgggcaaatactatttatgagggtgaatatctcttagggacaagcattgcgcgtccattgatagctaagagattggtagaaatcgctacaaaagtaggagcggatgctattgcacacggagcgacaggtaagggaaatgaccaagtgcgttttgaggttggggcttatgctttgaagccagatattaagattatcgctccttggagagaatgggatttaaatagtcgtgagaaattacttgcttatgcggaatctgcagggattcctatagaaaaaaaacaaaatcaatccccctattcaatggacgcaaatttattgcatattagttatgaggggcaaatcttagaagatcctaatgtcgcacctaatgaagatatgtggcgttggagcgtctcaccaaaagatgcacccgataccccaactattattactattggctttaaaaatggagatggagtggctattgatggagaggctttaagtccagcaaatttttgggctaaacttaatgaattaggcgggaataatggtatagggaggttagatttagtcgaaaatcgctatgtaggtatgaagtctaggggttgttatgagacgccgggggggactatttaccttaaagcacatcgtgctatggaatccctttgtcttgatagagaagaagcgcatttgaaagatgaaataatgccaaaatatgcgagtttgatttataatggatattggtttagcccagagagagaggctttacaagccttaattgataaaacacaacaaaaggtagagggggaagtgcgattagagctttataaggggaatgtaactattcttggcaggaaatctaagcgatcgctttttaatgcggcttatagcacctttgaagaggattctgtgtataaccaaaaggatgcggcaggatttataaagcttaatgctttgcggtttataatagcgggcaaagcaagggaataaattcacttttattgatttttgtagtgggttattgatatttagggtaataggtttaatagaaaaattaagagttattattaatggtatttattgtattattgatgaatttaatctaaaaggggtttacaggtgaaaattttaagttttgatataggcgttacaagcattggttgggcttatgtagagggagaaaaattaaaagattgtggggtgagaatcttcactaaagcggagaatccagaaaatggtgattcacttgctgctccgcgtagagaagcacgaggggttagacgaagattagcacggagaaaagttaggcttaatgtgattaaaagattgctttgtaaagagtttgggctaaatttaagcgattattttgcaaatgatggggaattaccaaaggcatatgagacaaccaaagataccaaaagcccctatgaattgcgctctcttgctttggagcaaaagttagagcctaaagacttagcgcgggtgattttacacattgccaaacatcgtggctatgggaacaaacacgcaaaacgcgatttagaagcagaggagaaagcaaaaaaggcagcagaaaaagtcccacaagaaaaagaatctaccacaacaaatggagattctaaaaaagagcaagagaaagtgctaaaggcgttgtatcaaaatgaaacattacttaaaaattatcaaatcaattatcaaaccaatgatgaaactaataataaaactatctttttggttggtaaatacctctataaagagtttcaggacaaagggcaaagaatccgtaatacaaccaacaattatcagcacacaatgcgacaagaatggttaaaagatgagctagagtttatttttgcaaagcaaagagaatttggattcccctttagtgagaagctttataaggttgctaccgaaaacaataagacaaaagagctagattttgcctctgcaattatggaaacagccttttaccaaagagatttaaagagttttgaagataaagtcggcaaatgtgtattttatgaaaatgaaaatcgcgcacccaaagattccttaagtgttatggaatttgttgctctcacacgcattatcaacaccttaaaaaaccttgaggaaaaaagtaagaatcttggtattggtgaaacctatggcaaagataagattcaagagattctaaaaatcgtgcttgataaaggcgagatgagttataaagaattgcgaaaaatccttaaacttaatgagtcaattttatttgctaaagatcctaaactagattataccaaaggagtgcaagaagcggaaaaggcaaagtttattgagctaaagaatcttaaagcttttaaaaaagcaatgggtggagagactgaacaaaaagctaacaagaaaacgaaaaaaacaatagaggtgagtcttgaatcttttgatagaaaagagctagatttgattgctactcatattgccctcattaaaagcaaagaaaacttagctgaaagattacgaaactatcccgcattaagcaaggagcaagtagaagccctaagtaatttgaattttgcaaaacatattgatttaagcctgaaggcacttgataagatcctacccttgatgcgtgaggggttgcgctatgatgaggcggtgaaaaaggcaggattgcaagagcatagaaagcataagcaaaagggcgagtttttaatcccactaaaagagtatgaaccctatttagcaaatcctgttgtggcaagggcattaagtgagtatcggaaggtgctaaacgcacttttaaaaaaatatggaaaagtgcataagattcatttagaatttacgcgtgaagcaaaactaagtgcaaaagagaggcaaaaatatgaaaaggaacaaagagaacattttgaagcaaaccaaaatgcaatcaaacaatgtgagaaattagacttgcgtcttaatggtgcaaatattcttaaaatgaagctttggatagagcaaggggaatattgtgcgtatagtgtcaagaaaattacaacggaggatttaaaggattctaacaagctacaaattgaccatatttatccttactcacgcagttttgatgatagctatatgaataaggtgcttgttttttcaaaagaaaatcaaaataagcttaataaaacaccctttgaagcctttggaagtgataaagagaaatgggataggattctaagccttagcgcaaaactccctaaacaaaaacagagaagaatcagcaatacaaactttaaggataaagagggcggatttcttgcaaggaatatcgttgatacaggctatattgcaagattagcaagtcaatggacgaatcattgcctaaaatttgaagatttaagggaaaatgaagtaaccatcacaggagaaaagggtagcagtgtgcatatagaggtggtaagcggaagcttgactgcaaccttgcggcattattggggcttgggcgataaggatagaaacaatcacctccaccacgcagtggatgcaatcatcttagcttatgtaaatgatacaatgattcaagcatttgcaaattttaggaaaaatcaagaacaaaataaagcaaaattctatgctaagcaaattgcagaatcggaatacaaagctaaaaaagcattttttgagccttgtgagaattttagagataaggtgctaaaaaaacttgattctatttttgtctccaaacctcctagaaaaagggctagaggggcgttacacaaggagacattctattcttttgaggacgaaaaacttttaaaaagttatggcgggaaacagggtgtgcaaagggcgattgatcttgggaaaatccgccgaataggcacaaaaattgtgagtaatggtgcaatggtgcgtgtagatatttttaaacacaaagaaggcaaattctatgctgtgccaatctacacaatggactttgcattcggagaatggcccaataaagcagtagccacaggtaaagatgaagacggcgtaattaaagattggatagaaatggattctgactatgatttttgctttagtctttttaaagacgatttaattaaggtgaagaaaaagaaaatgaaagaggcggagttttgttattttaaaagatttaaaacttctggtgcttcaatagaaattgtcaagcacgataatagggcagacaatttaaatggcaatcaagaaaaaatatttaaagtgaagcttgaaaataatcaaaaaatattagataagagtttaatatcaatccaaaaccttgaaatctttgaaaaatggcaagtctctcctttgggaaaagtgcaaaaggcagtgcctgaatctcgccaagggattaagctcaaaagcagtcttaaacgaaaaggctaagattctataaggagggcgagaaatgtttgattcagcctttcgcaccttatttttaagcacacctgcttacttaagcctacaagacaaacatctttgcatagcccaaaaggacaaagaaaatgtaaagattccgcttgtggatattttgtgcgtgatgttagaatctcatcaaatcacgcttactaatgcactgctaaatgcgtttgctctgcataaaatcgttgtttttacctgcgatgaatcccacctaccaagtgggctatttatgccatttttagggcattttagaagttttagcgtgttgcaatcccaaattaacttgagcaaacaaagaaaggcgattttgtggcagcaaatagtgaaggcaaaaattaataatcaagcctttttgctaaaaatgcaaaacaaaaaagaaagtgaggaattagaatctttagcaaaaagtgtgaatttaggagattcaagcaataacgaagctaaagccgcagcaatttatttcaaggctctttttggcaaaaacttctcccgcaaggtgcaaatctttgaaaatggcaaaatgggaacgataaatgctgcactaaatttcgcttatgcaattatgcgaggagtgattacaagaagcctttgtgtaagcggactaaatcctgcactaggattcaatcataaaaatcagtttaatgcttttaatctagcagatgatttgatagaaccttatagaatctttgcggattctgttgtcgtgcagatggttgaagttggggaattagaggagagcttaagtttgcaaaatcgcgtaaagctggtaagtattttgcagagtgcggttatgatagaaaataagctttatccacttactcgcgcgggtgtggtgagtgcgcaaagtgtagtgaaatgccttgagagagaaaatcttaagcttagactgccgctattttgcgaggaaaagagtgatggaagaaaaatttatgagagtgttagtgatgtttgatatgccaacttgtagcaagaaagagcgtaaagattatgcgagattccgtaagagtcttatcaaagatggatttatgatgttgcaatatagcgtgtatatgagaatctgcaaaggtgtagcaagtgccaataattatttggataaggtaggtttgattgtgcctcccaaagggcatattagggcattaatccttactgaaaaacaatttgataatatgcggttattgctaggcggtagaagtgaaaacgaaaaagcaaatgcaccaagacaacttacgcttttttgaaggttggttttgacactaaaagatttgcaattaaagaatgttttagagaaaataaatcaactttttaagtaggagataatctttgctaaaaaataaaacgggtgagcttagggattaactaggctaacacccttgtgttagcttaaccctgcaggaagctcacttcccttattttagccgcttgttaaattccttaggattatatcttagattttcttaaaaatcactcatttaggatattttacacccttaaagtctttcaaataccgcaaaatacgataatttggaaagtgtattttaccataaaagaatttaacaagcagctaaaacaacagtaatgcccgggattttagtcccccaattttaccataaaagaatttaacaagcagctaaaacttgcagcgttttttaacccacgattgccttattttaccataaaagaatttaacaagcagctaaaactaaaaaaacaatcgtttattctggcttttaattttaccataaaagaatttaacaagcagctaaaactgtctttgaatgatagttataacaatatggattttaccataaaagaatttaacaagcagctaaaacataaacattttagacattctaaaataatgtattttaccataaaagaatttaacaagcagctaaaacaaacactcgcaaacaaaaatacaaatagaaattttaccataaaagaatttaacaagcagctaaaacagaatatctagcctcaaaaaacacatctaattttaccataaaagaatttaacaagcagctaaaactctaaagaaaagggtatagatattcaacttattttaccataaaagaatttaacaagcagctaaaacttagaagcttttgaataatataagcttaagattttaccataaaagaatttaacaagcagctaaaacatattttaccatcatttgtactaacctttaattttaccataaaagaatttaacaagcagctaaaactttgtttgtcctttattcaaacaagttaaaattttaccataaaagaatttaacaagcagctaaaaccttttacgagaactcatctccacacgtagaattttaccataaaagaatttaacaagcagctaaaactctacattgttgatggtgttatggactaaattttaccataaaagaatttaacaagcagctaaaacccaacggggataacgcctaataacttagcaattttaccataaaagaatttaacaagcagctaaaacaaatattctagtagtgagacaactataaatattttaccataaaagaatttaataagcgactaaaattgtttgatatattaggttggtagttggtatatttttccttggaattgcaattatagtaaaatgaataaattgtagttaaatttaaaaatatttacctaatgtttaagtgaaatatttataataaaaatttcttgaaaaaatcaaaatatataaggagaaaacaatgaatagaaggcaatttttgcagtttaatgcccttactttagcaagtgcttctttaggttatgcagcaagcgggatgtcagaacataatatgaaaaatatgatgaatatgcctatgacacacaatatgggtgctatgaatatgggtgatattgatacttcttttatccaatttgctccagataataccaggcttttaaatcgaaaagtctttctaagtggagaaaatttagctcccttaaaacttttggaaaatgaaagcaaagagaaaaatttttttcgtgcaagtataataattgcagaaagtgaaaaagaattcgttaaaggtaagaaaacgctttgctttacttataatggcttggttccaggacctaagatagaagtgtatgaaggcgatacggttgaaattctcgtaaaaaacaaacttaaagaagctacaaccattcattggcatgggcttcctgtgtctcctgaacaagacgggaacccgcacgatcctattttaccaaatagagaaagaatatatcgttttaagttacctgaaaattcagcaggcacttattggtatcatccgcacccacattatttaacctcaaaacaagttgctagaggtttggcaggagtttttgtcgttaaagcaaaaaaagatgttttatcgcatttaaaagaacaggatttaatgataagtgatttgcgtcttgatgaaaaagctcaaatccctgaaaatactctttctgattgggtggatggacgagagggagaatttgtgttaattaatgggcagtttcaacctcaaataatttgtaacgaaattcaacgaatccgcatttataattgttgtgctgcacgttatcttaatttgcgtattcaaggagcagaatttatccttgttgggacagatggaggacttttagaacaagcccaaacgcttaaggagatttatttaaatcctgcttcacgtgtagaagtgcttataaaacctacacaaaaaggcaaatttaaacttgaaagtctctattacaataggaataaaatgcttactaaagaaagccaaaatagtcttgtgcttgcggatatttctttacaatacactcttaacgaatttcctcaaactttgagaaaattcgagccacttaaacccccaaaggcctttaaagaaattataatgagtgaagcaaatatggtagcaatgcaaggcttaaacgataacaatgaaaaagaaattaaaacagctttggtttcaatgtttcaacttaatggaaaaagctttgatattaaacgcactgatttgtattctaagcttaatgaagtggaggagtgggttattattaatgattctgatatggaccacccctttcacatacatggcacacaatttgaacttataagttcaaagctcaatgggatagtaacaaaagcaccatttcgaagtttaagggatacaatcaatgtgcgtcctaatgaagaagtgcggctaagaatggtgcagaacttcaaaggcatacggatgtatcattgccatatcttagagcacgaagatttaggaatgatgggaagcttagaggtgcaatgaggttttataaagattgcctggtctttgtttgattttttcttgtaagctttttattaaagtaagcagaagtattcttgcaaacagagaaaataaacaaaattctttaagtttggatgaaagtaaaaatgtttatattgtagttttggtggaatgtttgtagttagtataaagctttaagttgtgatgtttgtgaaatgatggtttaatcctttggattagaaattataataggggtataaagacataaagcgcaaaaggctgcaaacataaaaatccccgaaaaatacttatcataacttctctaatgtatcatcttttaaccatttaagagaaaatagaaaaaaatcgcaataaaagcgatactaatataaagaaaccattgtttgcaaaatattaagattcttgtctcgaaaaattggtgatattatcctcactttcttaggagattattcttttaacttttgaaagtctttgctattgtctaaaagcagtggattaactaaaggggttataagtgtaacattatctaataccaacattaatgataaattttttatttttaggagaagttttgcgatagagcttatacttaagtttttgtatttttttatttaatctggcaactaaatctgaatttttagattttaaaagtagatctaaagttgtgatatttctataatgaatttttaaaaggaactagaatgaagcaagaaaataccttacaattgcattcaagtttcttttgatagaatcatattaatataaaggagtaatgatgcactattttatttatccaagcgggggggggggcagaataatataaatactcactcctacgagtttttagacgataaagaatcatccacttccctaaaatccaatgcactcaaaatcatacaagcaataaacgagaatcacgcacagcttctactctcatcacctaattattttgacatattgttacaaaacgctcttgaatgtggcattacagaatgttttaatggcatagagttaatagcaaatcgcataaatacacacttcaaaacaaagtttgcaggagaaaaacgactcattgcgataatgttaaaatggttatgaattagagcaaaaacacttaggggacatactagagaggctaaaaatgtgtggctttaaaattatctatataattgctttttcaagtcgttggtttaacggacttaaagccaaattagatgaaagtggagaggattatattgttgctgaatttgagtttttagaagctttagatttttttccatttttgattgaacaagccgatgcgattaaggtaaatagtgcagttaagagtttaaagatttttacaagtatggagcagttacataatgctctgcttttgcctagaagctactgcgaagcacagaatctctcctttaattgggcttcttatatcaatatccattttaatagtatttatgataaagtgctagagcgacagaagttttatgatatattcccaaatccctccccgcgttttatcaaagggggttatccaagtattgataagcagagcaaaatgcaagtgaagcatgatattgtgagggatacgatagtttttatatcctccacgccttatactgatctattgcagggattccacaatcttattaatatgcttttggatgaggggttccgtgtgctttttaagccagacccatcacattgcgaatgtaagcatttagaggatgattttgtgagagaacttatagggagggagaattttgtatattacgagtatgaaccgcgattaaacgaagaagagtttagtcgagccattgtatttgtaagcacactttcttccaccgcctattcctttccagttatttgtaggcgtccaactattttactctatccaccgagtgaatatgaaaaggagcttttgcgcacccaacaaacacaaccttaagatgttctaatgtagctatatagaaagatttgaatacaaaacttagttactaaagttagaaagaatctacaaaagctatcaagcagtgaaatgccactagaatatgcgtaatttagatgattaatgttataatacactttttggaggcgtgaaaatgggaaatattattgctgaaggcttatcgctttctttgttgcaagaaaatggattgccccactttcatatatttgatattcgttcaacccaagcctttttgagcgcacaattacaaggttcattccacgcaaaagatgagggagaaatcatagaatctttagagcatttagcggggggggggggtaaaaatacctctatcaagcctctcctcatcgtctgctttagctctaaaaaatctaaaaccctagcccaaaatatcattcaaaaccaaaattttatctcactctatcccttaaataccatttactatttagaatgcgggataatggaagcctttgaaaatggctttgagcctatctcaagcccacaaaatcctaaaaataaattttcactcattcaatctaccttagaggaactacaaactaaatttcttgcctcaaagcgcacttgggttgttgcttttagcggtggtaaggattctacttgtgcgttgcaacttgtctatgaaatgctcgtctctttgcaaccacatcaaaggagacagacttatgccattgcttcaaatacgcttgtagaagccccacatattgatagatttttaaaagaagtaatccattctatcaactcccacgcaaagaaaaacaatatcccctttgaaatcctgcaagttagcccaagcttgaaagatgatttttgggtcaatctcattggcaaaggttaccctagcccgacaaggacttttcggtggtgcactgataggttgaaaatcactccaactaaagcagaagttgctaaaatcacacaaaaatatggctcggctcttttgatactaggttcaagaaaggcagaatcaagcaatcgtaaaaaatccatagaaaagagaatcctaaacgaagagggttattcccaacatcacgacttccccgatacgcttactttttcacccattgcagagtggaacaccgatgaagtatgggcgtatcttagcacacataagcctttgtgggacaaagaccatagcgaattatttttgctctatgccaaagcaagtggtgaggagtgtcagtttatcacagatttaagtcaaagcagttgtggtggctcaagatttggttgctgggtatgcacggtggtaagtgaggataaatcaatgcagggttttatagaatctggagaggagaatctaaaacccctcaatgaatttagaaattacattaaagatttaagggaggattgcaatgcaagggcagattataaacgcgatggcagagcggtgtataaggttggaggacttggtccatttttaagccatattcgtgtggagattctaaaaagacttttgcaaacagagcaagaatttatacaaaatggcggcagtaggctcatcacagattcacaaatttatgcgatacaagagcagtggaacaaggaatttgattttgaaaataaagcaatacaacttgcacaggaggtaggacgaatgaaagatgaaaaattaaaacaaagcagggttttgcataaggagattttggcagaagtggcagacaggctggattctaaagagctagagaatctcattagcacttgtatagacatttataataccacaggtttaaggggtaaaaataatgcttcaagcaaaataaagaaagaaatagaaaagcttgtagaagataaaacaagcaagcaaagaaaggaggcataaatgtttatatcaaaaatcaccatttccaatctttttgcttactatggaaaagtggagatagagtttaaaaaggttgagggaaagaatctctattgcatttatggcaataatggctttggcaaaacaagctttatccgttgcgcgaaattgctttttttgggtgctggtgtgaaagaagcagagattccaaatgttatccaaagatttgcaccgcatattaaatcgactagacaattacttagaggcgattcaaaaacttgggctggaatcttaaacaaagcagcgacaaaagagggattagaggatttttttatctcttttgagggcactttgggagataaaagctttgtcctcactcgtgcttttacaaatgtttatggtgaaattgaggaaaaattaatattaaatcttgataaagaaattttgaatgacgaagaagcacaagagagaattggcacaattttacctccaaatttaacagaatttttcttttttgatggcgaggaattgggagaattgagtaataatttgcgcaaagagtttcaaggaaaaattgaggaaatattgcaaattaagccattagatacgctcattaaacaaattcacaattataaagatgagctaatgacaagagaaataacgagcaaagagcaacaacacgcacttgaggacaaaatacaagatagacaaaaatgtgagttagacttgagccacaacagagaaaaacttaaaagcattgagcattttattgaggaaaagtctagcctaataacacaaacacaaaaaaggattgaaaaactaagtgcagattctagcaaagaacaagcagagcttattggcgaaaaaaatgagttggataaagaacttgttgctttaaaagagagattaaaggaaagcataaaaagtgtgatttttgtaagtaacgaagcacttttgcaagatttaagagcgcaaatacaaaaattacaatcaaacaattctgcaagtgatattgaaacacttaaaaggcttttacctgaatttaaagcatttatgaatgaagagcttgaaaacagcgagttgtttaaagcacttgatataaaaagcatagaagagattatagataaatttccaaataagctagaaagcaagggatttgcccattcttttattacgcataatatgcttatgccattaagagaatctttagcaagacttgaaaatgtgggtttaacacaagatataaaagagataaaaagcgcaaaaaataaactcgcacaagtaaaaaattacatagatgaattaagcagtgatgatagcacaagagaaaaacaaaaagcactcaaagaggaagtaagcgcattagagagtgaaaaatcccaaaaagaggaggaaaaagaaaggttaaaagatgatttaagaaaattagaatcaacaaaagaacagcttgataaagagattgattctttaaagcaaaatatcaatacagagcgcattgatagtaagttaaggattttggaatctttaaaaactagcttaattcaatatagagaaaagttgaatgataagctaagagatgagctgcattcacttattttggaaaattatcaaaaacttttacccaatgataatatcaaggaattaagcattcgtgaggattttgaaataacactcaaagatgaaaatggagaacttattattgtagaaaatcaaagcagtgggcaaaagcagattctagcgattgcgattttttgggctttaagcaaattatcaaactctaatctacccattatcattgatacaccactaagcaggatagatagggaaaatagggcaagaattatacaaaattattatacgagcaatgcacaggtgattattctgcccc

SEQ ID NO: 3758 - DNA, 23231 bp, synthetic construct
  source 1..23231: mol_type = other DNA
  misc_feature 1..23231: note = Synthetic
ttgtttagcgcaaaacttgccacgccatcagcgtattttaaagccaactttccgccaacttcaaagctgtttgcctcagcgtcaagggcaaaactttgctgtgtgatgtcggcttgaaatttgcccttgctaagctcgacatttgcgtcttttagccgcaaaaagtcaagatctgcggtgaccattttttgcttgatggcgacattactggtgatgagggcgagaaattttaaattcacgctaaaagtgccgtcttcgtaaagcagcgaaaactcatcctcgccgattttaatcacaggaaggtcgatgatctcaaacaaaggcagcgtttttcccgcccacgagagaagctcgccgctttcgtcaaaggagtttgactgagaatgtttgaaaagtcgtaattctgcgagttttaaaatgagttttttatctaacttgatatataattgcgagaatgcaaagttttgattttcaaaatgaggaatttttatgccgatactaagggctacgactgccgcactgaaaaatagtaaaaaagttaagataatcgccgagacgattttaagtatttttgccatttttgtcatctttatcatttcgcttcttgccagcctcgcaaaagaggttgaagtccctcacttcatcaaccttccaaaaggcagcgcaaaaagcattatagcgtttttagataatcaaaactttaatgtaaccaaatttgacccttttattttgaggtttttaggacacgctcaaagcggactgattgaaatcaagtccaaaaacggcgtcttaacaaggcttgactttttacacgccatcaccaaagcaaaagccgccacaacaaacatcacgctcatccctggcgagacgagtgagatctttttgcggcaggtggctcagaagttaaatttgaatttgacaattttgcgtgaggaattttttagtcgtgcaaacgagggcgagttggcgcctcagacttacaatgtcgcgcttgggtttagcgaggcggagttggtggagtttttgcttaaccgctcaaacgccattcgcgctgagttgaaaaactcagttgatgacgcggcgtggcaaagggcgctagttgtcgcttcgatcgtgcaaaaagaggcggcggacgagagcgaatttgggatcgtctcaggcgtggtttataaccgcttggcgaagaatatgccgcttcaaatggacgggactttaaactacggcaactactcgcacgagagagtgacgccgcaaaggatcgcacaagacaacagcgagtttaacacctacaaacgcgttggactgccgccgctgccagtttgcaacccgtcaaacgaggcgatttacgccgcgttaaacccgacaaagtctaactacctctactttgttagagacctccgcacgggcaagcattcattcagtgcgacctacaactctcacaaagaaaatatcaaccaaaacaaccgctacaaacggcagaaatcaaatttgaaggaggcaaaatgacgcgagttttgcttggcgtttgcggcggcgtgagcttttacaaaagttttgagattttgcgggcgttgcaaaagcgtggctttgaggttagcgtggctttaagcaaaggtgctagcgagtttgtcacgccgcttgcttacgaaggattgggcgcgcgggttttgacgcagcaaaacgcctcgtggagcggtgggctaaaccacatcgaatttagcaaagccgacttgctgcttttagccccagcgactgcaaacacgcttgcaaaagtggcttgtggagtggcggatgatgtgtttttgcaaacgctgcttgcttacggtggtggcggcggaatgagagttgtagctcctgcgatgaactggcggatgtggcaaaacgcggcgacgcaaagaaatgtagagtttttaaagcaaagcggttgggagtttgtaaatcctgtttgcaaaacgcttgcgtgcggcgagacgggcgagggcggtttagctgaggtggaggtgatagtcgcgagtgcggtgcgggcgttgcgtcaaaagaggctttggcgagggcggaaggttgtcgtcacgggcggggcgacttgtgagaagattgacgatgtcagaggggtgacaaacttttcgagcggcaagtttgcaaaggcgatcgcagacgcgtttttctacgctggtgcggaggtgacgctgttgcattcagcagtgcaaaaagcggggcagaagtggagttttgagggggaggttttgccgtatgagtgcgtgaaatttcaaagctcagcctcgcttttagacctgcttaacaagcaagatttaacgccgcgagatttactggtgatgaacgcggcggtgagcgactttttacctgcactgactcaaaacggcaaggtcaaaaagcagaattttgcgttgaatttggagctaaaagagaatgtggatttgctaaaaagtcttgcgtcaaagtgcaaaaaagttggctttaaacttgaaatgtgccaagaggaagtggcggttgcaaacgcgcgtcaaagccttgaaaaacgcggtttagacgcggtttgtttgaatattttacaagcagatgaaagcggaagcatcttttttggcagtgacaaaactcaaattcggtttttgcaaaaaagcggttgcctcctttcgtcatttgcagacaaaagcgaggttgcaggcgagctagtcggtttttgtgaagggttgtttgaggcgtaaaggagttggatgaagctagttttgcttttgaatatgggcggggcgagaaacaacggtgagattttcacttttttgaaaaatatgtttagtgacgaggcgattttgccgattaagagcggctttttgcgaaaatgtcttgcttatttgatcgcctctttgcgttactttccagcaaagaaaaattacgcgcaaatcggcggtgcaagcccgcttgacgcacacacagcggcacttgtcgcaaagctaaacgagcggtatggtagcggcgagctagtttttgactacgcctacaactacacgccgccgtttgcttacgacaagttgaaacactacacaaacgccgaagagatcgtcctttttccgctctacccgcacgcttcgctgacgacaaacaagtcgagcctaaaaagtgcgctagacgctgttaaaaaacttgaaatcaaagcaaaaatcacgcaaatcgagcctttttttgctaaaaccgaatttaatgagatgattttagcgtcaattttcaacgccgcaaaaggagcaaacccagctgagataaacctcattttctcagctcactcgctgcctaagaagatgattgaaaagggcgatttgtatgaaaaaaatgtggttgagcattttgaaattttgcgcacaaaactcaaacttttcaagtcagtcacgctcgcttaccagtcgcgtcttggaccagttgagtggctaggaccaaacatcgccgaagttttagcaagcatcacacctgagcaaaccgactcttttgaagcgggcggtgggctttttggcgacttgtatgcaaacgaggcgagcagctcaaaaagcccgtttgtgggcgagggtggaagttttgagttgaagcggtttttgcatcttgcgtggctcaaagccgactcggcaaacacgaccaagacgagccaagacacgccaaaactcagcggaaaaaaggtgttaatttacccgattagcttttgcatcgacaacagcgaaacggactttgaactcgccatccaatacgccaacgaggcgaaaaatttcgacttttacaaggttgtgaaggtgcaaaattcaagtgacgagttcgcaaaattcatcttcgacatcgtctttgagcggcagttttgcggcaattttggcattaaaaaatgagttgctaaaaccaaatttgattttagcaatttgcaaggctagatgatgctaagccagtggcggatgtttggcagctcggctgagagtgttgtcggcggcgtgtgtccgctgtaaagtgtgagctcgccttgccaaccaaacgcactttgaaactctaaaacgcgcgtcaaactctgcttcatcttctctcggtcgctgtaaggaaagtcaaatctgccgatcgagtctttgaagatgaaatctccgctaaaaaccacgccgttttctgcttcgatcatcgaacagcccggcgtatgtcctgcaaaatgatgaaaggcaaacttctgtccgcaaacctcgacaacctcgccagcttcgactaaaacatcactcttaaaactctctttgaggtagccaaaagggtcgttttcacacataaactcatcctcttttgggcagtaaattttcgctccgctttctcgcctaatttttgcggcgtcaaagttgtggtcaaagtgtgcgtgggtgaggaggatggcttgtaggttttgcgtattttgcgcgacccactcgcttgcaccgtctcctgggtcgatgacgacttcaacgccgccgaattttaaaatataacattttgttacacaaaaaccaaaaacttcgcttaaaatttgcattttaaagccccttttaatgaaaaatagttaaaatcgcgtgttaattttagcaaaattgcctaaaacggagcaaaaatgtgcggcgaaaaattcaaatttgattttgacacgcttgaaaagtcgctagttagcgggctaaaacaatatcttaaaacctcaggggcgagcggttttgtcgttggcgtcagcggtgggctagactccgcagttgtggcgacactttgcgcaaaagcaggcagttgttcggggttgatgatgccgactttgagctcaaacccagccaacatccaagacgcaaaagccttgctaaaacgacttgcgatcccttataaaattatcaacatttcaccgatcatctccgcctttgaagccgccagccaagcagccgtttgcgtgggcgagctgggcgcagaagttggcaaaaaacgtatcagtttaggcaacctcgcagcgagggtgaggatgagtctgctttacgactttgcttttaagcacaatttgcttgtcgcaggcactagcaacaaaagcgagcggatgctaggttatgggacgatttggggggatttggcttgcggagtaaatccaatcggtgagatttacaaaagcgatctttttgcttttgccgagtttttaggagttgaagaaaacatcattaaaaagccgccgagcgcagacttgtgggaagggcagagtgacgagggggatttgggttattcttactcactgcttgacgcggcgctaaaagagttgcaaacttcaagcccaagcaaaaagcttgacgaagggcttgtttcgtttgtcgcacaaagagttaaaaacagcgagtttaagcggcgaatgccgttgattttaccagttagttagcagcctaaaaggagtcaaatgcaccaaattcccatcttccgtcccagcgtttcacacctagaagaagagtatgtcaaagccgcactaaacagtaaaagcgttgatttgatcgagcgttttgaagagaagttaaaggattattttggcgtgaaatacgccatcacaaccaacaacggcacggcggctaagcacctgcttttgtgtgcgatggatttaaaacgcggagatagggttgtttgctcggttaatagcgaaatcggcgtgccaacggtcattcgccattttgacgctgagccgattttttgcgacatcgacaggcgggattacaacatcgacccaaacaagcttgacgagacgctaaaaacccactcgcacaagaagttgaaggcggtttttttaaaccacatcggcggacaagttagcgacatcgaggcgatccaagaggtcgcaaacgcgcacggcgtggtggtttttgacgacgccattagcgttgtcggcgcaaagcacaagggcaaatttgtcggcacgcacaaccttgcaggctgcattcagatcaacccgcagcttaacaactcgcctgcctcaacgggggtgattttgacaaatgacgagaagatcgccacgcgcgcaaagctcatccgcagccacgcgattgtcaatgaggggttgaagctaagcgggaatttggattatgtttatgatgttgtcgaggcgggttgtaaatacgaccttaacacgcttccagcggcgtttaatctagcgcagtttgagcgtttggagagttttatcacgcgtagaaaggcgatcgccgcgaggtattttgaaagtctgcaaaatctgccaaacatcaagctcatcgagccgatccgcgagcatatctacaccgcgtttatcatcgaaatctcaaaaaaccgcgacatttttgccaaaaagctcaaagcacttggcgtctcgactatgttaaactacattccgatgcatcttttgacctactacaagaataaatatcactacaaagtgaatgactttccagttgtgctttcagcctaccagcactaccttagtttgccgatttttgaggatatgagtgacgctgaggtgaaacaggtgattgacgcggtgaagaaggtagccaatgattgaggtgtggcagcttgcgtttaggcacgaggacgcggcgttggaggagtgtgattttagccttgacgagctgcaaaactcagccgaaaaaccgcaaaatttcaagtcaaatccgccaacacagcagctcagctttgggcaaaatcctcacgaaattttaaccgccacgcacaaaagcgtcatcaaattcagccactgcatcggtcacggcgttggcacgctggattttagccgcaaaatcgccgcttttagcgaggcggagtgggatggttttttagaccaagccagcgagtgggttagggcgaaatttggcaatgttaatcgctattttgaaatcgaagtctccgtccaacaagcacaaaccgccgccacgcaaatgccgccaagtccgctaagagagatcttacaagagttaaaagagggttatttgactatacgaaagtcgtctttttgctaaattaaaaatgctaaaatcaaatttgattttgacaaattagtggttgaagtcaagtttgctgaggagaattgcaagtaagaaaccttttcccagatggctgcggcacacgctaaattcaagtgttctgctgtgttcccaccctgaaacgttgcttaaaaacagcattgcacaggtctaagaaaaggcagcataattttactaaaagttgcttaaaactgctttaaacccagcttgtgcgaagctgcgaaaaccaaatttggttttgacgatttaatttttggcaaataaaaggtaaatttaagttttagtaaagctttttttgagaaaataaactctttgtaatcaaattcggttttgacatttttgaaggattaggatgagttttgtaaccgacttgctgcttaaagcaaccgcccaaacgctttatatgacctttgtttcgacctttttagcctcgctttttgggcttgttttggcggtggttttgctgctgacaaaaaatggcgggttgatgccaaatcgcgtgattttcacgacacttgacgcggtggtgaattgtcttcgtagctttcctttcattatcctcatcatcgtcctttttccattcacgcgttggctcattggcacaagcatcggcacaaccgccgccatcgtcccgctcgtcatcggcgctgcgccgtttgtcgcccgcctcatcgaaaacgcgatgaatgaagtcagcggcgacatagtcgaagcggcacaaagctttggggcgagcaaaagccagattatcttcaaagtcatcctcccagaagccctcccgtcaatcatcaacgccatcaccctcacactcatcgtcatcgtaggcttcacggcgatggcaggcacggtcggcggaggcggacttggggatgtggcgatgcgttacggctaccaacgcttccgccccgacatcctgctctacacggtcatcatcctcatcgtccttgtccagctcatccaaatgtgcggcgactttttgtatcgcctcaccaaaaagtagtcaaattcggttttgacaacgcggttttactttatattaaaaaaaatatgctaaactcgcgcatatttcacaaaaaaggatgcaaaatgagtctttacaacagagaagcctcgcaaactcgcagtgttgctagcgagagttcgcaaattgtgtttatcaaaaaagtttatcaactcctcagcgcctcgctcatcgccgcgacaatcggcgcttacatcggcacggatgtcgtcaaagagtttagttttgggctggtgattttagaattagcagcgctttttggtttgatgtttgcgcgaaacaagccaacacttgctttggttttgctttttgccttcactttcatcagcggtctaacgcttggaccacttcttaaccgctacatcggcgctgggatgggcgggctgatcacgcaggcgtttttgatgacggcggtggcgtttggcggcttgaccgcgtttgcctttaacacaaaacgcgacttttcggcgatggggaagatgctttttatcgcactcatcatcctcgtagtcgcaagcctaagcaacctctttttccaaagctcgatgctctcgcttgtcgtctcaggcgttggtgcgttgctttttagtgcttacattctttacgacacgcagatgatcatccgtggcggttacgacagcgttgttttagcagccgttagcctttacctcgacatcctaaacctctttgtctcgctgctaaacctgcttggttttgccaacaaagagtagcgttttgaagtaacttttcaaagctacttcaagtgcgacttctcgccgcctttgcctttgcgagggcggctttcttgcaaaaaccgaatttgacccattttttcaaactttaataaacttttagctaaactcgtaggaatacttttaacaaggagtttttatgagtggttacaaaatcgctatcgttggtgcaactggtgcagttggtgaggaaattttgaatgttttggctgagctcgaatttgaagttgagagcattttgccgctagttagtgctagaagcgcaggtagcgttgtggagtttggcggacgcgagtttaaggcagttgagctgactgaaactagctttgaagaaaacgagatcgacatcgcatttttcagcgcgggcggttcggtttcggcgaaatttgctccacttgcagcggagagcggcgcagtcgtcatcgacaacacgagccattttagaatggacccgcaagtgccgcttgtcgtcccagagtgtaacccgcaggatgttgctttgtggcgtgagagagggatcatcgccaacccaaactgctcgactattcaaatggtgcaagtgctaaaaccacttgacgcaaaatttggcatcgagcgtgtggatgtcgccacttaccaagcgacaagtggcgcgggcaaaaaggggatggaggagcttgtcgagcagctgcaaaagttctttgagttcaagcttgatgagtgcgagccaaaggcatttaaacatagaattgcgatgaatctcatcccgcatatcgatgtttttttggacaacggctacacgaaagaggagatgaaaatggtgcgagagacggctaaaattttgcaccacgagtttccagtgagtgccacttgcgtgcgtgtgccagtccttcgcagccatagcgaggcgatcacgatcaaattctcgcgtccagtcaccgccgaggaaacgcgtgaggtgctaagtagcgcgccgagcgtggttgtggtggatgagccaagccaagacctctacccgatgccgctaatttcaactgacacaaacgaaacctttgtcggacgcattcgcaatgatgtttttgacccgacaatcgtgcatctcttttgttgtgccgaccaaattcgcgtaggtgcggcgacaaacgcagttcgcatcgccaagctttggactcagctgtaatcaaatttggttttgacaatttgcctcgtgcgcataacacaaagaagcgaaaatgaaagttttagggtttgacatcggtgtagcaagcataggctgggctttggtagaggatagcgtgctgaaagattgcggagtgaggattttcacaaaggctgaaaatccaaaaaacggctcttcgctagccttgccacgccgtgaggcacgctcagttcgcaggagactagctcgcagaaaggcaaggctaaatgagcttaaaaggctcgtcgcggctgaatttggcttgaatttagaggattttttagcaaatgctggcgagttaccaagggcttatggcacaagcagtgagacaaaaagcccttacgagcttcgctttgaggcgttaaatcgcaagttagagccgttagagtttgcgcgggtgattttacacatagcaaaacacagaggctatggcaacaagcacgccaaagactcaaatgatgatgacagcggtcaggtaaaaaaggcgataagccaaaatgctgatataatgagccaaaagggttataaaagcgtgggcgagtatctttacaaggaattttaccaacaaaagcgtgatttgagcgaaaaatcgccaaagaatgcttttgcaacgcaagaatttcaaaatgtccgcaacaaaaaggacaattacgcgcggtgcgtggctcaaagcgagctaaaaagagagttggagcttatttttgaaacacaaaagcgccttggctggaaatttagcgagcaaaaatatcaaatttttgatgaaaatcgcaagataaaagaggcggattttgaacgcgcggttatggaagttgcctttttgcaacgcccgcttaaaagttttgcggacaaggttggaaaatgcaccttttttgaaaacgaaccacgcgccccaaaggacagcctcagtgctatggagtttgtcgcccttactcgcatcattaacacgcttgcaaacatcagcaagaaaacgggcgagatttacagcacagacaaggtgggcaaagttttagaggctgtgcttgaaaagggcgagcttacttacaaaaatttgcgtaaaatcattagcctagatgataaaattcagtttccaaaagactcaaagcttgattatgccaaaggcgatgaagctgaaaaggctaaatttatcgaatttaaaaatcttaaagagttcaaaaagaaattgggcggcagttttgagggatttagtagagacgagcttgacaagattgctaataaaatcgcactcattaaaagcaaagatgagttaaaggctgagcttgcgagctttaagggcttaaacgaggcgcaaaaagaggctttaagtgagcttagttttgataaatttatcgatttgagttttaaggctttggggaagattttgccgtttatgcgtggcgaaaatggagagtgcaaacgctacgatgaggcgtggcgggcagctggcttgcaagaggcggcaaaacaaacgcaaaagggagatatattgcctccgcttaaagactacgaaaaagacttggcaaatcccgttgtcgcaagggctttgagcgaataccgcaaggtgttaaacgccttgcttgaaaagcacggcaaggtgcataaaattcaccttgaatttacgcgtgaagcaggagtaagcagcaaagagcgaggtgagcttatcgctgagcaaaacaaacgctttaaggcaaacgaagaggcgcgcaaaaggtgcgctgaatttggcttaaatccaagcggcaaaaacatccttaaactcaaactttggcaagagcaaaatgaattttgcgtgtatagtggcgagaaaattacgcgtgagcatttgcgtgatgagagtgcgcttgaaattgaccacatttacccttactcgcgtagctttgatgatagccaaaacaacaaagtgctagtctttaaaagcgcaaatcaaaacaaacgcaaccaaacaccctttgaggcttttggaggtgatagcgaaaaatggagtaggattatgagtagcattgctaaattgccaaaaccaaagagaaatcgtatcgcaaataaaaatttcgcggataaagagagcggatttatcgcgcgaaacattgttgatactagctatatcgccacgcttacggctagctacacggacgcatttatcgagtttttgcccttagctgagagtgaggacaccacgcttgggcgcggcgaaaagggcagcaaaaaacacataagcgtagtaagtggctctttgacggctacgattaggcattattgggggcttgatagcttgttaaatggcgaaagtgaggtaaaagacagaagcaatcatcttcatcacgccctagatgcaataatcattgcctatacaaatgacaaaatcatcaaggcatttagcgactttaaaaagacacaagagcaaaacacagcccgcctcatcgccaaagagataagctcggctgagtataaaacctcacgccgtttctttgccccagaaaattttgcaaacaatgaagcctttcgtcaaagcataaagggtaagatttttggtgagttgggcgaaaatggcgagttaagtggtgggatttttgtcagcaaaccgccgagaaaaagagcgcgtggggctttgcacgcagcgacttttaaaagcttaaataacagcgaattgcttaaaacttacggtggcgaagagggtgtaaaaagggcgataaatttaggcaaaattcgccaaatcggtagcaaagtcgctgaaaatggcacaggcgcaatggtgcgaacggacattttccgccacaagagtagtggcaagttctatggcgtgccgatttacactatggactatgcgcttgggaaattgccaaataaagctgtggtaagcggtaaagacaaggcgggcgtcattaaagagtggcttgaaatggatgaaaaatatgaattttgttttagcctttttaaagatgacttgcttttggtgcaaaagaaagagatgagtaaggcagagttgtgttattttgcggggtttgatagctctggtgggcgaattcaaattgaaaaacacgacaatctttttatcaatttaaaccctgatgaagccgtgttattcaacgaagtagaaaaacaacaaggcagaataggtattcaaaatttagaaatctttgaaaaatggcaagtttctccgctgggcgaggtaaaaaaggcggaatttaaaaaacgagaaaatatttcgcttaaatccacgcccaaaatcgccaaacactcaatgccaaattcaaatttggagacacaatgagctttgatgaagcctttaaaagcgtgatgataagcaaggaagctaaactcacgctcaaacaaaagcacctttgcgtgagtcaagcgggcaacgaggctttgctctacctcaaagaccttgctttcatcgttttagagagcgagcaaatcacgctcacttcggcacttttaagcgcactagcaaagcacaatgtcgtgcttttaagctgtgatgaaagccacttgccaaatggcgtttttatgccctttttaacgcactttcaagccgcgctcaccgccaaagagcaacttggggcaaagcctcaaacaaaggctattttgtggcaaaggattgtcaaaaacaaaatccgcaatcaagcctttgttttgcgtgaggctggctttgaaaaagaagcgggcgagcttgaaaatttagctaaaaatgtgcgcttaaatgatggctcatatatggaaagccgtgccgctgcgctttattttaaaacgctttttggctcaaattttagccgtgatgagctttgctttgaaaattcagctctaaactatggctacgccgttgtgcgcgctgctgtggtgcgtgccgtgtgcgtgagcgggcttgtaagctgggagggggtaaagcacgctaatgcttttaatcaatttaacctagccgatgatttaatcgagccttttcgcgcctttgtagatagctgtgttttggggctttgtgctgaatttaagggcgatgagtttttgcaaaaagagcataaaagagcgcttgttgaaaacttgcaaaaagcggtgtttgtaaatgagcgcaaactgcctttaatccgcgctgtaaatcatttcgtgcaaagttttaaaagcgccttgcttaatggcacagagcttgcaaatgtcagctttgcttgaagataaatttatgcgcgttttgctgctttttgacctgccgacaacaagcaaaaaagagcaaaaaaatgcggcgaaattccgcaacgaactcataaaacttggcttttttatgatgcaatttagcgtgtatatgcgaatttgcaagggcttggtttcggcaaatgctgtgatttcgcgtgtgcgtggcattttgccgccgcttggcaatgtgcgcgcgctcatcatcactgaaaagcagtttgacaatatgcaaattctgcttggaagtgcgggctttaacgaaagtgtgaatgatgataaaaatctcgtgctgtttgcgtttgatgagaaaatttgcgactaccgatattcttacaaagacgaggctttaacgggcgaggagatcgtcttaaacgaggaaattgagcttacagagttgagcgcgttgcgagttgcagagcagggcgagccacgcgaggaggaggcggcagacgcggcggcagagtccaagcctcgcgagggggataaagaggcgcagagttttgcgtcaaatggcaaacgcggcaaaaaacgcaaagacaaaaccccaacgctttttgagttttaaagcactttgccgccgcaaaagcgcagtggaaacatttttttacaattttcattctagtttttagttcgaatccaaaactggaaagttaaaatttcaagtaacgaatttgtcaaactcaaatttgattttagcagttttgaatttttggagactttgctattttgctttcttaaaggcggacttgcggggcttgaattgcgaagtcgctcccgcaaatccgcctttaaaaatcccccaatcccccgaccacacgctttcaatgttgcgtaaaaaactgatagttttttacgattaatctaaatatttaggcgttttgaatttcaaatttggttttgacattttagacttttggctttgcgagtgacggcaacaaattttcaaagcgttgttttgaaaatttagtcgtatttgttagcataaaagtgtaggtggagacatttttttacaattttcatcctagtttttagttcaaatccaaaactagaaagttaaaaaaaattacgaaaaccgaatttgagttcaaaaatcactaaatttcaaattcggttttgacatttgcggtttttcagccgactcttcacacaagtgcgagttttaaaacctcttcgatcctgctaacgccgatgacttcaagcccttttttcacctcctcaggcagctcgcctaagtctctttcgtaatttttctgcgggatgagtgcgcgttttacgcctgcgttgtaagcagcgatcagcttctctttcaaaccgccgatggcaaggacgcgcccgcttagagtgatctcgcctgtcatcgcaacatcgcctcgcaccgcccgcccacttaaaatcgacacaaacgccgttgtcatcgccgttccagcactcggaccgtctttttgcatcgccccttctgggatgtgcaggcaaaggtcgaaagcgttgtaaaacggcggttttacagccgcttcgcccgctgtttctcgctccgcaaccgcctcgccgcctgccgcttcgcctgcaactgccttaacctcgcttggcttgacgactccttggtcaaaaagcagttttgcaaggcttagtgagattttacaactctcttccatcaccttgccgatctgcccagttagttgcaacgccccttttccgcgaagtttgatcgcctcgattttcaaaatcaacccgcccgcactcgtccagccaagcccattcacaacgccgaccgcgctttcgcaaaccttcgcctcgctgtcaaaaactcgcttttcaagcatcacctcgacatttttaggcgtgatcttcactttcaaatttggttttgacaactccgcctcgcttgacgcgccgttttgcgccgccgtctttgcgtctgcctctgccacagttgccgccgctgagtctttaagccgctcaaccgcactttttcggcagattttggcgatctgtttgcgaagccatcgcacgccactttcgcgcgtgtaagagtcgatgactagctcaatagctgctttcgtaaaactaagctcgcctttctcaaagccgtgttttgcgctctcgcttgggattaggtagcctttggcgatctgaaatttttcctgcggcgtgtaagagtcaagctcgatgacctccattcggtcgcgaagtgcgtgtggaatggcgcttgcgtcatttgccgttgcgatgaaaatcacctgacttaggtcgatgtcgaagttgaggtagtagtcgcggaatttgaagttctgctcggggtcgagaatttcaagcatcgccgccgcagggtcgccgcgcatattcttactcagcttgtcgatttcgtctaaaaccacaaccggattcatctcctttgcctcaacaagcgcattcacaatccgcccgggcatcgacccaacataagtccttctgtgccctctaagctcgtttgtgtcgtcaagcccgccaagagcgatgcgcgcaagctttcgcccaagtgccgttgcgaccgagtttgcaaggctggttttgccaacgccgggcgcgccaactaagcacaaaatcgcccctttttgctcctttttttcgcgtttttgcaaaaattcttgcacggcaaaatactccacaatcctctcttttgccttgaaaattccgtaatgctccttgtctaaaatctcccgcactttttcaaagttgtatctgttttgcgttttactctcaaacggaatttcaaaaaccgcgtcaagccaagttgagatgacatttgcttccatactctcttggttgctccgcccaagccgtgttagctgtttttgcacctctttttgcccagtctggctcataaacggctttttggcttgaaatttttctttgtattctttgatctcatcctcaaccgccacgctctcaccaagctctttacggatctcttttaactgctcttttaagaagtagtttttgttgtttttgaccattttggcatttacgcgctcttcaatgtgtttttgcagtttcttactttcgatcaaatccttcaaaagtttggcaacctcaaagagccgaatgtttaaattcgcctcgcaaaaaagctcgtaagtcagctgtttgtctagctgtaaaatgcttaaaattagatcacaaattcgctctgcgtcactgcttttttcgatcgacttgacgatctcttttgggatgtttttgttaagtgcggcaaagctgcgtaactcttgtttgatgaactcaattagcccgtcaaactcagcctcatcatcaacaaagctctccaccgcctcgacaaccacctcgccagcctcgccacgccttaaaattttcgccttttgtttgccttgaaatagcactttttgcacgccgtcttcaagcgaagttgtgcggatgatgttgccaacgactccgtattcgtaaattttgtctagctcgactcgctcgccctcagctccctcttttgccatagccacaaacagaggcttgttgttttctttggcgtaggtgagggctttgatgtttgactcgtcgctcgttaaaagcgagatgatcataaacggaaagacaaatttctcatcctcaacgaaaaatcccgcctcaaaactgctttgtaaaatctcttttgtctgcataaatctttaaccttaaatgtcctaatcttactcaaatggtcgtgcgtaccacgccgtttttggcggtgtgatgttttgtttcaaaaagccagaagcgttgattttagcttgataaaccgccgccgcgtccttctttccaagccgtttgtaaagctcttgaatgtggttgtttaagtaaaactcgccaagtgcgaatttagttagcatactctcaacaagcggtgtgtattgcgagtttggaaactgcgctaaaaactgctttgcgcgcgtttggcattgtgctaaaagctgttggttgcggttaggtttgtcaaagacttcaaagtaggcttttaggcggagaaattcggcgtattcgatgtttttttgtgtgccaaagcgtttgatgtattcgtcaaaatacccgcttgctttgatgtattcgccttcgtaaatgtgtgcggttgcaagcagtagtaaagtcctctccaaaagcggcgaagagatgtgttcgctagcaaacgccacaaagtgcgtttgggctgagtcgaggtctttgttttggatgtcgtaaagcacgatttcataccacctttgcggcggcaagttgtagtattcgtcgtcttttgtcgcacaaccgctgatgatgcctgcgatgaggattgctaggctaaatttggttaatgttttcatcaaaatcctttaaataaattaaagcaacgcagcaggtcgcatcgccttgtaaatttcgtcaaaactgaaacgatagtcgcaaaaatgcataaacgcaaaaaccgcctgaaatagcagcatctccaaaccatccttacttttgacgccctttgccgcagccgtttgtaaaaacggcgtcacacgcccataaactgcgtcaaaagcaaacttggcatttgcaaaaatttcgctcatcacctcgtcttcaaacggcaacgaggcgtttaaaagcccagaaggcgtggtgttgatgacaagctcgattttgctaaaatcaaatttggttttagcaatgttgcttacgcgctttgagccttcgtcgctggtcaaattcgctttttgcaaatttgtcaaattcgaatttggcacaaaaaaggctaggttttcaaactcgctgcttttgtcgcttcggtttaaaactgcgcactccacgccgctttcacttagcccaacgctgacggcttttgctgtcccgcccgcacccaaaatcaacgcttttttcacctcgccaaattcttcgatgctctttaaaaagccgctaacatcagtgttaaagccaaaaagctgcccctcttttagcacgattgtattaagcgctccaatcctctttgcacgctcttctaagacgctgcaacgagtgagaaggtgctgtttgaatgggattgtgacatttgccccgcttagtttcaaggcaaaaaatttctccaataactcgtctgctgtggcgtttttgtcaaactcgactcgcccgtaaaacgcctccacaccgagcgtttgcgccgcgaggttgtgcagacgaggggagagcgagtgtgccacgggcgagccaaaaagcgctaacttcatctcccaacctcgtatctaaacgcgtcaggcgccgccttttggcgaatttcgtaaaggtcgtttcttagcgactccatcccaaggatggtatcacttctgtaaggaccgaccaaaaatttcacgacaatcgcgcgcccaaccttaactttgtgcggttttggcgtaaagccaagccttgtgacttgcgttaaaatcgggtctttgacattcacgcggtcgctacttaaaatctgaatgtaagttccagctctcacttgtggcgttaaaggctcgtttgcagcccgcgtttgcgcggctttttcgcctttttgtgtcgtttgttttggctgagtggttgcgcggctagcttgcgttgcgtttttggcttgtaaattcgcagttttcgtagcgtttggctttgttaaagcagtttgcgttttgcctagctcctcgcttttagcggcagctttgttcgtgttttgtgtttgcgctttttgcgtctgcaagctaaatggcacaacctcaggaggaagcaagtttgcgtttgtctctaacgccaccgcgtttgaagtgttttgagtttggctcgcgtttgaagtcaaattcggttttgacatttttgcgtccagctgcgtctccgcctttgcctcgtttgttgcgtctggcgccaaaacattctcgccactcgtatcgccatttgctacgccactcgcctcgcccgttcgcgccgcatccacgcccgccgcaccgggtgcttcatcctcgtctgaaaacctctccaaaacctcgttaaaactctcttttgccgagaggttaccaaacttcgagccagcctcgttagtcgcaaggcggactctctctctaagctggcttaggctttggtgaaagtcaaaatttttcgcaacattcactaactgagatttttggttaagctcgatcggcgtgtgcttttttgcaaaaagcgacaaaagcaggattagcacgatcgccaaaatcccaacgctaaccaaataacgcgtgaatttgagtttgtcgctgtatttgtcaaacacaatgttgtcgatatagttattttccttcatcaaagcccttgtttatcaaaaagttgccgagttatagatgatgaagttgctagcgaggtttttcaactcttctttcacctttgcttgcaactgcgtgttgtggatgtcgtctaaaacatctgcgatcttctcgccgatcaccctaaactccgcctcgcccattccgcgtgcggttaaagctgggctaccaacgcgaatgccgcttgtgacaaacggacttcgcttctcgcccggaacggtgtttttattaaccgtgatgcctgcgtttccaagtgcagtgtccgcctcttttccgctaaattcgcggtttaagaagctaactaagatcaagtggttgtctgtcccgccgcttacaagctcaaaaccgcgtgaaagcagcacttcgccgagagctgagatgtttttcttaactgcttgtgcgtaggttttccactctggcgagaggttgaacttaaagccgactgcttttgccgcgatgacatgcattaaaggaccaccttgaatgcccgggaagatcgctgaattaacctttttggcaatctcttcgtcatttgtcaaaatcaacccgccgcgtggtccgcgaagggttttgtgcgtagttgagctgacgatgtggcagtgagggaacggactttggtgctctcctgcgacaacaagcccagcgatgtgcgcgacatccgcaaaaagcagcgcgccaacgctgtcggcgatctgcctgaatttggcaaagtcgatctcgcgtgggtaagcactcgcgccacagacgatcaattttggtttgacgatgtttgcgatgtcggctacgcggtcgtagttgatcctgccgtcaagctcaacgccgtaaaaaaagctctcgtagatcttgcctgagctgctgacttttgcgccgtgagtgaggtgtccgccgtggcttaggtccattccaagaattttgtcgcccgggtttaaaagtgcggcatacacgccttggtttgcttgcgagccgctgtttggctggacatttgcaaactcgcaaccaaagagctttttagcgcgctcaatggcaagcgtttcgatctcatccacaaattcacaaccgccgtaatatctcttcgcagggtagccctcggcgtatttgtttgtcaaaaccgaacccatcacctccataacctctggcagcgtgaaattctcgctcgcgatcatctccaaatgctcgcattgcctcttccactcactttgcaaaagcgagtaaatctcgccgtcataatcctttaaagccatttgtcatcctttcgtaaaaaattagcatattttagcaagttacctttaaaatcaaatttgattttcattcttcatcgctggaaataaaatcgcatcacgaatcgaatgcttatccaaaagcaacatcacaagacggtccaccccaagcccccaaccagcagtcggcggcatcgcataaccaagtgctacgcagtagtcctcgtccatctcgtgcgcttcgtcatctcctgcgttttttgcttgaatttgcgcgttaaaccgctcgtattgatcaatcggatcgttaagctcgttaaatgcgtttgcaaactcgcgccccgcgatgaaaagctcgaacctctcggcaatgttagcatctgcctcgtttcttcgcgcaagtggcgaaatttcaactggaaagtcgatgataaaggttggattaacaagctttttttcaacataattatcaaacagctccgaccacaaatgcccgacatccaaattcgaatttgcctcaaagccgtcagctttaaggcgcgctaaaatcgcctctttgtcacgcaaaatctcacgctcaatcccgccgatctccaccagcgcgtcttcatacttcacgcgcgcaaacggctttgaaaagtcgatctcctctccgtcataactaatcttcttttcaagcccaagcgtctccaaaagagtcgcaaaaagctcctcggttagatccatcaaatcgtggtagttgtgccacgcccagtagcactcaacgctggtgaattcggggttgtgtgtcaagtccatcccctcgttgcgaaaatttcgcccgatttcaaacacggcgtttagcccgccaacgacaagccttttgaggtaaagctcaggtgctattcgcaaaaacctctccacacctaatgcattgtggtaggtgacaaacggctttgcgtttgcgccgccggcgattggatgcaaaatcggcgtctcaacctccaaaaacccctttgcttcaaagaatttgcggatttggctgatgatgatgctgcggtttttaaagtcgtttcgcacatcttcgttcattatcatatccaaatacctctgcctgtaacgcgcttcgatgtctgttaagccgtgaaatttctcaggcagcggcgagagggattttgacgctagcgtgacgctacttgcgtggagcgaaaactcgcccgttttggtgatgaacgcgtaacctttgaccttgacgatgtcgccgacttctaggttttttttgaaaatagcatacgcctcttcgccgatcgagttaagcgagtagtagatttgaaggcgtccgctttcgtcttcgatgttggcaaaggtgctttttcccgccacgcgttttaacttcaagcgcccgcacaactcgacctcttcataagcgcgtttttcttcctcttcgctgtttgcgactgcggcgaatttctctttaaactcggcgatcgtcatctcgcgtttaatgtcgtgcgggtaggggtttatgccgttttctctaagggtttgaagtttagagattctgatttgttcttgttcagttgtgaaaatcacattcatc

SEQ ID NO: 3759 - DNA, 23207 bp, synthetic construct
  source 1..23207: mol_type = other DNA
  misc_feature 1..23207: note = Synthetic
tccacttagcgacccatttgccgcgttgcaaatcgcacttgcaagcttgagtattgacatcaccctgctcacaggcgcacttcttgtgcttggtttctatgcaatgcttgggcgcgttttttgtgcatgggtttgccccgtcaatctcatcaccgattttaccgcatggctgcgcgcaaaactcggtgtgcaaagccgattcttaaacctcaacaaaaacttgcgctttgctctgcttgcgctgttcttgttgctctcatttttgctcgccatgcccgcgttcgaggcggtgagctttgttggtatcatccaacgtggaatcctctttggcggagtctcatggctgtttgtggcgtttgtgattctttgcattgacatttggggtgcgccacatgcgacatgctcacatatctgcccacttggcgcgttctatgcgcttgttggtaaatgggcgctgctcaaagtccgctataatcgcgacaaatgcacaaaatgtatgcgttgcgtgcaaatttgccccgaaaaacaagtcctgtggatggtgggcaagcaatccgaacaagtaggtgctggcgaatgcttgcgctgcgcgcgctgtatcgatgtgtgcaacgatgatgcactcaattttaatcttttaaccttaggagagaaaaaatgaaaacaaaacttttgatgttgggcgcactcgccctctttgttggctgtggagaactaacgactagcaatgcgaatacagacaattcagtcggtatggcaagcttacgtagcgtggatttgctgaatgaaaatggcgttgttttgagcacatctcactacatcgaaacatcgcctggcgaatcggtcaaaatcgaacgctcgtttgaaaacgctccgccgctcatctcgcatagcattgacgggcttgtgccgattacagcagacaacaatcaatgcacagtctgccacgacaaagcactcgcaaaagatgtcggcgcaacagccattccgccttcacactatgtcgagtttcgcacccacaaaagcacaggcgatatggtcagcagcgagcgattcaactgcacgcaatgccatgtcccccaaagcgatgcaaaaatcgtgattggcaacagcttccgccccagctttagcaatgacgcgcttaaaagtagctcgaatcttctcgatgtgctgaacgaaggcgtgcgatgaatatttcaagcgtgctgctcaccacaaagctagagacggctgattctctatgcgaatgcatagccgcaacaccccattgcagtgttgagctgcgcgaaaaaacatcgcttggtgaaaagattatcgcactcattgatgcccccaaccttgaaagcggcgtgggggcttaccaaacactcgagaagctgcccaatgttacaagcattgcaatggttttcgcgtatgatgattccactggggatttgagcacaatcaatccaaacatcgcccaaaacacactcaacaaggaacaaaaagccgaagagattacctattttggagcgattacgcaaaagctctagcctctgcccgttgggttattttttaagaaatcctagtatataatcgcgactctttgttcttatgaggagaaagcacaatgcgtagtattattttagttcttgtttttggtgcattgggattcctattctatgaatcaagctcctttttgggcgcatgctcggggattgctatctttctctatggtgtcatgtgcctcaaaaatggattcaatgcgtttagcacctttattgaaagggtgctcaaaaaatgggcaaacactatcaccaaaagccttatttttggtgctatttcgacaatgattatgcaaagcagcggacttgtttctgtgcttgcaatcagctttcttgccgcgggcttcatcacgctcgcacagggaattggcattatctttggtgcaaatgtgggaacgaccgttgttgcgtgggtcatcgcaggtgctggagtgaagtttgatatttcatctatcacaatgcccctgcttgtatttggtgtgattttgcaactacaaaactcgagcaactgcaaggctcttggctcgattctttgcggcgttggatttttctttttgggaatccatttcctcaaagacggattcaatgagctcaaagacacagtagacatcgcacaatatgggcagattggcggaatcggcggcgtactcttgtttgtgctcattggaatgattctcactgtggtgatgcaaagcagcaatgcaagcttgcttgtcgctatcacgattcttgcggcagggcaaatgagctatgagaacacattgggctttgcgattggctcaaacatcggtagcaccgtgatggcaatcatcggttctttgggcgtgaatgtcgcgggcaaacgacttgctgcagcacatctgctgtttaatagcgtaacggctcttgttgctgtggtctttttgcatcaattcatggttgctgtgcaattcttgtgcaacttggttggaatcgcaagcgatgattatatcttgcaagtctcgatgtttcacacgctttttaatattgtcggaatcgcgcttatgatgccctttatacatcaaatggtcgcattcttggagcgcatcatcatcgacaaaaaggcgaaagaatatgcgcccaaattcatcaacgagacgattgtgcaattccctgattcggctatcgaagcgttgcgcaacgagatggagcatctgtatgacaactgcttccgcattctcacttatgcgctgggatttaacccacagcagattcaatcccaagtgccatttgatgagattatcgcacaaaagaagctatacagcgagcaagtcaatatcgaagaactctacaagcagagtgtgaaaagcttgtttgacgcgatgttcgactttgcaaccaatgcccaaacctatatcaatgaacatgagcagatgaacgaggtgcatcatatcaaaatcgcggcgcggcgtgctgtggagtcgattcatcagcttaaaatgctctacaaaaacctcaaagatgccacaacctcaaccaaccccgcgcttgtcgatatttataatggaatccgaatcgacctcggcgagcttttgcgcagtatcgaatatcttgaccaaagcacaggcgaggatattgtgctcgttttgcggagtatcgcgaaatcatcagcaatgctcgatgaggcagatgataatgcgattgctaaggttgagagccttatccaagagaaaaaaatcgccgcaacaagcgcatcatcgattctgaatgatatcgatacgaccaataagattggcaaggacctgctcggaatgaccaaacatctctatacagcctacaaagaggaagaaaccaccgcctaaacccagactcaagagacggcacggggcacaccccgctgcgctcttgttctcttgcatttttcttttttctctcccccacctcaagaagtggaacactctttgcttctatctctgtaacatctaaactcatgcaaaggatgctattatgaatggttatgtaattaacacaaacgtggcttcactcaactcccatgcagtcggaatacagaacggaagagttcttgcgactgcactcgaacgattgagttcagggattcggattaacaaggcggcagatgacgcttcaggtatggcaattgcggactcgctgcgctctcaagcttcctcactcgggcaagcaatacggaacgcaaacgatgcaactggtatgattcagattgcagacaaggcgatggacgaacaaatcaagattcttgatagcgtcaaaacaaaagctgtgcaagcagctcaagatggacaaacaacacaaacaaggctcgcattacagcaagatattttgcgattgctcgaggaattggacaacatcgcaaacacaacgagctacaatgggcaagaaatgctttcgggaatgtttgtcaacaaagaattccaaatcggtgcgtattctaacacaaccgtgaaggcaaccattggaccaaccaacagctcaaaaattgggcatgtgcgctacgagacaggctcaatgacagcggcttcgatgctcgcttcagctggcgcaaacaacctgcaacttgtgaaactcaatgcacgacaagtcgatggcgtgaatgatgtcttgctcgaaaccgtgcgaatcagcacgagcgcaggaacaggaataggtgcacttgccgaagtcatcaacaaaaattccaactcgctcggattccgcgcaagctataacgtcgaaggacgcggcaacatagaaatgatgagcggaacaattgataatcttgttatcaatggcgtaacgattggaaggattaacgacatccagcaagcagaccgcgatgggcgcttgattaaggcgattaacgataaaaaagaggcgacaggcgttacggcgagtatcgatgcgcaaggacgactcacgctcacaagcggtgatggacgcgcaatctctgtacatgccgagctcgtcagcgggacatcagcagcacaaagtatgaacgacttctttggtggcggcaacctcgcaggtgtgagtggaacaagccatgccatcattgggcgattgacgctcacacaacacggcgcacgcgatattttgattagcggaattggctattcatttgtcgggatccattcctcacaaggggttgccgaacagaccgtgaatctccgaatgctacgcaacaatattgacgcagacatggcttcagcgattggcgcaaacggcaatgttgcgattgcgagcacaaacaaattcggacttggtgcgggtgtaacgagcctcaaaggcgcaatggcagtgatggacatggcagaatcggctcaaaaacatcttgaccagattcgtgccgaccttggtgctgtgcaacaacagcttatcgcaacggtgaataatatcactatcacgcaagtgaatgtcaaggctgctgaatcaacgattcgcgataccgactttgccgaagaatccagcacctttaccaaaacaaacattcttgcacaatcagggaactttgcgcttgcacaagcaaaccaaatccaacaaaatgtgctaagacttctccaataatcctttgcattcacccccctagcgggggagaagcaaacaaaaggcgacaccaatggcaaagaaaacatctgcacgggcaaccaaaaagaatgcgccaatatctgcgcttaaccaaccaacacaagcgacttcagacacacctgcaacagagcaaagcatttttgacaaaaatatcgccgctctccttacgctcgaccctattacggcgattcaacttaagaatgtcaagccaaatgaaaaatttgaacttttcgttacatcagacccagcgaatatgaatattattgataaagaaaatttcaaacccatttttaccacaagccctgtcgaagaaacattgaaaaaaatccaagagctcgatagcgtgcagttctatcctcatctctatttctttggtgtcggaaatgctattctctatcgtatgcttttgaatcaaaatcaaaaactccaacatttggtgattgtcgaaccagaacccgagattctcttcaatgttctccatttcttcgatttttctgaagaaatcaagacgcgccgaatcgaatttcatctcgccgaaaatgtgagcaagattgtggctgaatatatctttggctacaaagattccacactctattgcaaactctatgactttcggctctttaatagtttctatgcagattattctgaagaatatctccgaatcaataaactattcacagaagtcatcgagtctattgtcattagcttggggaatgatagcaacgattctgtgattggcttgctccatcaatgcctcaacatgccccaaatgctcgctgcgccaagctatcaaagctttgtaaaatgtgcacggaatacgcgcacggcaatcatcgtctcgactggtccaagcctccacaagcagctcccaaccctcaagaaaatcgcgccatactgcacactctattgcattgacgcatcatttccgattctgacaaaagcggggattaagcctgatgttgtgctcacacttgaacgcgtcaaagaaagcgcgaaattctacaccgacacgcccaaagaggcgcaagagggcgtgatttttgccatcacctcaatcgcacatgaggacacgctcaatgcaattaccgaagggcaaaaaatcctacccatgcgcccattcccctacaccttctattttgatgtgccaaaatatggctacacagggattggaatgagcgcagcgaatatggcgtttgaaaccattcggcatgtggggtatgaaaacatcgtctttatcgggcaagatctcgcatttgcgcccgatggcagcagccatgccaagggcgccgtgtatggcgagaaagaaatctctatggacattgacaagaagaacaagaaagagagcattgacatcgaagcctatggcggaaatggaacagttaaaacgacatatatttggaggttgtttctcaaatatcttgagattgagatttttaaaacaccaaaaaacatcaagattttcaattgcacagaaggtggagcgcgaatccaagggacagaggagattccatttgaagaaatctataatggtattgacaaaagccaaaccaagcagcccattttgcttgaggaaacctcgcaaaaagactacgaaaaaatcttgcgcaacgtgaagcgcaaagtcgagaaggttttattgcatggctacaagcaaaaagagaaaatcgaaaaggttttcttggaaatttgtgccctcacagaggagctcgagaagctgaatgccgaaaagcagctcgagaaagtgaatttcaaaaaaatcgaccgacttgttgaaaaaatcaatgccgtcaaagacggattcattagtaatccacacacgcgaatctttgacaacatcgttcagagttacattatgcaccaagaaatggagctgaccaagattaccacgcttgttgtgcgcacagacgaagaggcaaaggcgcggcaggtggattggatttataagcacaaatattggttctttagtcttgcaggcggaatccacaccgtgctcgccgtgctcaaaaaggcttgcggacaatggatggagattcccgagaaatacagagacgaagaggaagatatgaaggtatccacaaaagacccactccaagttaagattgaagggcttgatatcgaaggaatcctaaagatttaacatgttcgattttatcaacacactcaacacattcctctatacctattggcttgtctttgcgctgatgctctgcggaatctacctcacattgcgaacgcgctgtatccagctgcgctttctcaaagatgtgtttggcattctgcaagaacgaagccgcaaggaacacatctcgccctttggtgcgctcatgatttccacagcctctcgagttgggattgggaacatcatcggcgtgtcgattgcgattgcaacagggggcgttggcgcactcttttggatgtggcttacggcaatcatcgggggcgcaagcgcatttgtcgaatcgactttggcacaagtctataaacgcaaagatggcgaacatggttctaagggtggtccagcatattatatcgaaactgcattgggctcaaaggtgcttggtgttgtctttgcagtctcgataatcctctgctttgcgtatggcttcaacggcttgcaagcctacacactcacatcatctttcgagatttttgtcggaaacgagagttttcataatgggcatttcacgctctatgtcggcattctcctaagcctcttggttgctccctttttctttggtggcggcaaaagctctgcggcactttcttcatttcttgtgcccattatggcattgggctatctcatcgttgcactcattgttgtcgtgctcaacatcgaaaagctcccgatgatttttagcaatatcttgcaagaagccttcaattttacagcaatctttagtggatttgccagcagcgctattgtgattggaatcaaacgtggactcttctcaaacgaagcgggtatgggctctgcaccaaatgcagcggcagcagctcacacgagccacccagccaaacaaggcatggtacaaacactctctgtctttatcgacacgcttattatctgttcggcgagcgcttttatggttctttgttcaaatattgaagaaacgcaaacactcaagggcatgattcttatgcaaacagtcatgcagaatcattttgggacatttggactcttttttgtgagtgttgcgattgtgctatttgcattcacatcattgattggcaactatttctatgccgaggcaaattttaaatacattacaaataatcgattggcgctgcaaatctttcgttttgtctcgacattttgggtgcttattggcgcgcaattgcatctatcgctcgcatgggacttggcagacctctttatggggcttatggcaagcgtgaacatcatcgccatcttatttcttagcaatattgccattcgcgttctcaaagactatgaaagacagcgcaaagaaaacattgacccagtctttaaggcttctcatgttggaatccataatactgaattttggaaataatgagtgcggctaaatttggcatcataatttcacgtcattgcagcgattagcactcctctctaatctgcttttgaatctctgttgctacacatatcgcgttatgcgcacacacctcgttggggatattttctttttcgcctctgcaaaacgcaacaaaatcaatcaattgcaacaacaacgcctcgtgcgggcgcacattaatcgtttcggttttggacacaatcgaaacattgttgaggtattggtcggtaatggtctgcttgtgtacaaagacttctttgctcaatagattgcaatccacaaacatatcatcgcatgtgacgctaatttgcctcttgcgtttttcggttacgcggctggcgacaatattggaaaatacgccattttggtgtgtcaaaatagcacgcgcatagtcaatgctatcttcgctcatataaccatacgcgctgattttcttgggcattccattcaatgtgagcgcgaggtcgatgtcatgaatcatcaaatcaatcacgacatcgacatctttaatgcgcttgctcaccttgttggtgcgcacaaagtcgatgttgatgaccttgttggtattctcaatcgcttggcgcaaaactgccacggcagggttgtagcgctcgataaagccaacttggatatttgcgctatgttctttcataagcgcaagtgccttttgcgtgcttggcaaatcctctgtgagtggcttctcgacaaacagattgcgcacagaatctgatagtgaagcaatgtagtcaagatgtgttgttgttggcgtagcaatcacagcgccatcgagattctctagctcgccttgatagtctgcaagatagcgcacattgtgactcgcagcgatttgccgcgcgaggttttcgttggtgtcgaaaacaaagacaatctcgacatctttgagcatgttgagaacacgcaaatgattttgccccatatagccaagaccaaaaagggcgagtttgatggagttaggttggttcataaatcccctttgtctcgattgttgggcgaatatataacagattctaaacttttatattttaaaaagggataaagtgatatgcttatgctttgagcataaggacagaatcagccgcacttacgcacatgattccgtatgtgttacgttgatttgcgatggtagatttttgcaaatcctttgcaacctcgcaatttgtcgcttttctttgccatagccacacattacatcggagcgacttagtcgtacgcattatttgatgtgtgcaattgaaatcacatctctattatcgtgttgcaacaaacccaagaggttggttttattgcgaatgtcttttgcctcaattctgaccaccataaacaatgaggggaaaaatgaaaattttgagttttgatataggcattacaagcattggttgggcttatgtagagggagaggagctaaaagattgtggggtgagaatcttcaccaaagcggagaatccaaaaaatggaaaatctttggcattgcctcgtagagaggcacggggagctaggcgtaggttagcgcggagaaagactaggcttaatgtggttaaaagattgctttgtaaagagtttgggctaaatgtaagtaattattttgcaaatgatggggaattaccaaaggcatatgagacaaccaaagagaccaaaagcccctatgaattgcgctctcttgctttggaacaaaagttagagcctaaagagttagcaagagcgattttgcacattgccaagcatcgtggctatgggaacaaacacgcaaaacgcgatttagaagcagaggagaaagcaaaaaaggcagcagaaaaagccccacaagaaaaagaatctaccacaacaaatggagattctaaaaaagagcaagagaaagtgctaaaagcgttgtatcaaaatgaaacattacttaaaaattatcaaaccaattatcaaaccaataataaaaccaatgatgaaactaataataaaactatctttttggttggtaaatacctctatgaagagtttcaggacaaagggcaaagaatccgtaatacaaccaacaattatcagcacacaatgcgacaagaatggttaaaagatgagctagagtttatttttaaaaagcaaaaagactttggggcaacttttagcgaaaattttgaatcccaaattttggaaacagccttttaccaaagggatttaaagagttttgaagataaagtcggcaaatgtgtgttttatgaaaatgaaaatcgcgcacccaaagattccttaagtgctatggagtttgttgctctcacacgcattatcaacaccctaaaaaaccttgagaaaaaaagtaagaatcttggcattggtgaaacctatggaaaagataagattcaagagattctaaaaaatgtgtttgataaaggcgagatgagttataaagaattgcgaaaaatccttaaacttaatgagtcaattttatttgctaaagatcctaaactagattatactaaaggagtgcaagaagcggaaaaggcgaatacagcaaagtttatcgagctaaaaaaccttaaagtattcaaaaaagcaatgggcaaagactttgacaaattttctcgtgaggagctagataaaattgctaccaatattgccctcattaaaagcaaagaaaatttggcaaaacagctaaaagattatccttcccttacagataaacaaaaagatgacctaagcaatttgagttttgcaaagcatattgatttaagctttaaggcactctacgagattctgcccttgatgcgtggagaaaaaacagatgagtgcttgcgttatgatgaggcttggaaaaaggcaggattgcaagagtatagaaaacataagcaaaagagcgagtttctaatcccgctaaaagaatatgaaccctatttagcaaatcccgttgtggcaagggcgttaagcgaatatcgcaaggtgctcaacacgcttttaagaaaatatggaaatgtgcataaaattcatttagaatttacacgtgaggcaggtaaaagctatgatgagcgcaaaaagattgaaaaagagcaaaaagagcattttgaagcaaaccaaagagcaatacagcaatgtgagattctagggctacccataaatggcacaaatattcttaaaatgaaactttggatagaacaaagggagcattgtgcatatagtaataaaaaaattactagagaacatttgctcgattccaatgccttgcaagttgatcatatttacccttactcacgcagttttgatgatagctatatgaataaagtgcttgtgtttgctaaggaaaatcagggcaagggcaataaaacaccttttgaagcctttggaaatgataaagagaagtgggataggattcttagccttagtgcaaaccttcctaaacaaaagcaacgtagaatcagcaataaggactttaaagataaagaacttggctttattgcacgcaacatcaatgatacaggctatattgcaaggttagcaagtcaatggacgaaagattgcctaaagtttgaaaatctaagtgaaaatgaagtaagcattgcaggagaaaagggcagcaagaatcatatagaggtgataagcggaaagttgacctcaaccttgcggcattattggggattgggcgacaaagatagaaacaatcacctccaccacgcagtcgatgcagtgattattgcttataccaatgcaaagacaattaaggcatttgcagattttaaaaagaatcaagagcaaaataaggcaaaattttatgctaaacaaatttccgaatcagaatacaaaacccaaagggcattttttgaaccttgcgcaaatttcaggcaaaaggtactagaaaaactagattctatctttgtctctaaacctcctagaaaaagggcgagaggagctttgcacgaggagactttttattctttggaagacaagaatttgcttaaaacttatggggggagaaaaggggtgcaaaaggcaatagctctagggaaaatccgccaagtaggcacaaagattgtgagtaatggaacaatggtgcgcgtggatatttttaaggataaaacaggcaaattctatggagtacccatttatacaatggattttgcgcttggaatcctgccaaataaagcggtaaccacaggtaaagataaagagggagtgattaaggattggatagaaatggattccaattatgaattttgcttttcactttttaaagatgatttaatcttgttgcagaaaaaagaaatggaaaaggcggaattatgctattataaaagattcaagacctctggagcctcaatagaaattattaagcacgataatagagcagacaatataactgaaaatcaaataaagatttttaaactaaaatttgataatgacaaaaagatactagatgaaagcttaattgcaatccaaaatcttaaaacctttgagaaataccaagtctcgccacttggcgaagtgcaaaaggcagagtttgaaccgcgtcaaaccatttctttaaaatctagcccaaaaaataggaagaaatagtgtttgattctgcctttagaacattattcttaagcacacccgcaaaacttcgtcttgtagacaaacacatgtgcattactcaagaagacaaagaagatgtcaagattccactctctgatattttatgtgtgattgcggaatcccaccaaatcacacttacaaatgcacttcttgacgcgtttgctttaaataaaattatcctttttacttgcgataaatcgcatttgccaagtggactttttatgccttttttggggcattataggacattgagtgttttgcaaacccaaatttctctcaataagcaaagaaaatcgattctgtggcagcaaatcatcaaaacaaagattcataatcaagctcaactattgcaaatgcaaaataaggacgaatattacaaattagaatctttagaaaaaagtgttcatttaggagattctagcaacaatgaatcaaaagcggcggcaatttatttcaaggctctttttggaaactcctttagtcgcaagattaaaatttttacagatggtacgataggaatcatcaatgctgcgcttaattatggctatgcaattgtgcgcggtatgattgtgcggagtctttgtgttagtggtctaaatcctgcgcttggattgtttcactgcaatcaattcaatcccttcaatcttgcagatgatttgatagagccctatcggacttttgtcgattctcttgtaatgcagatgctagagaatggagaacttcaagaaaatctcgagcttcaaaatcgtgtcaaattagcaaatattttaaatacaagtattttacttgatagcaagatgtatcccctaaatcgtgcaatcgtagcaagcgtacaaagcttggtgcatgcgctgggggaagaatctaaattaaaattacccatttttgaggaaaacaaatcaaatggaagagaaatttatgagagtgctcgtgatgtttgatttacccacatgcacaaaaaaagacaggaaaagcagcgcaaaatttcgcaagcagctcatcaaagcaggctttatgatgctgcaatttagtgtctacatcagaatcagaatctgcaaaggcaccgcaagtgccaatcatcatcttgatagattgaacttgattttgccacctagtgggcatattcgggcgctgatactcaccgaaaaacaattcgataatatgcgcctgcttcttggcacaaaaagcgacaatgaaaaagcaaatgcaccaaaacagctcacgcttttttaggctaaaatcatgagttgggcaaatttgtcaaaccatagttgcaagaattgagcacacagaaattgcattatgatttatcttgaatatctttgattctatcaagatatttcgcgcggaattttttgtttctttctcgtgctgctttttgcatatctgtcgtttcatcaaactcatcaacaatttcttcgccaagaagcgtttcaatcgcgtcttcgagcgttacaatcccggcgaattgtccatatcggtcttgcacgacaaacaagcgctcatctttggtgataaaaagattgagcaaattgagcacagagagattgacatgcacgacatacacagactgcgagagatcaaagatctttttgtcagacccactcttgacgccttcattgagaatatcccttgcgcggacaaaaccaacaattgtatcggtattgctgctatcgccatagataggaatacgtgaatgcgaatagattcctttgtgtgtgagcgcctcggcaacggtataatcagcaggcagggaaaacacaatgcttcttggtgtgagaatatcgatagtttggtaattcttgagcttgagcacattttcgatcatcatctcttcacgtgtggcaattgagccaccctttttgccaatctggcttgcagcaagaatctcatcgcggctaatgctactttgactcgatttgacaaaatgcgtgagcagccgcgcgacaagcaccaaagggaaagtgattttgagcaaataatggatacaaagcgttacagcaggagcaaggcttttccaatatgtcgccccgattgttttgggcaaaatctcggagaaataaatcagcacaatcgtgagcaaagtcgcaccaaatgcttgccactcgattccatagatatgcgcgacttcgattccaacgcctgttgcggcagctgtcgtggcgaaggtgttgagcacgagaatcgccccctcggcatcatcaacatttgccttgagatgtttgagatagccaccgatttttgggttgctcttttcatagctttcgacaaaagaatgggtgatagaaagaaacacagattccataatggaacacaaaaaagtaaaaataatggcaatgagacaatagagtgtgagcaacatggttttgtccttttagtgacgttggaggttgccaacgccaatgacggcattcataacatcttcaagtgcgacaatcccaatcagcttctttttgctattcaccacacagaagagatgctccttttggagaataaaattctcgagcaaatcaagcaaatacatgctgtcatcgacttgttcaaagtctgttgcgatattcttaatactctcctcgccacgtttttcgaggttagcttgcaataggtgctgccgatagacaagcatcggagcattgccttcgctgtctaggagcggaatgcgcgaatatttgtgcgtatccgacaaaagcagcgcctcatgaatgctcatcgtgtctttgagtgcaaacatctgctcttttgatgtcataatatcagcaatagaaagcgattgctgggcgatgatatgctctaaaatatcagattcgagctcgttaatcgagccacttttttctccgagctcaacaacagcgagaatctcatcgcgactcatgttgtctgaattgcctttgcggaacatatgtgtgataatccgcgaaacatagacaaacggaaaggtaatgaaatatagcacatagatgagatagctcgcgggtaaaacaaggcttttccaatatgtcgccccgattgttttgggcagaatctcggagatatagagaatgctaagcgtcataaacagcgccacagcgccctgccacgcctcgccaaagatttcgatggcttgcgcgccaacgcctgacgcacccacagtatttgcaaaagtattgaccaccaaaatcgcgccaatcgcgttgtcgatgtttgccttcaagtgccgcagaatcttgccactcttggggtgattttttgcataactttccataaacggcggcgtgatagacagcaacacagcctccaatacggagcaaatgaacgaaacgacaaccgcgaacagaaaataactaatcaacccaaccatagagccctacgtcacctcatttaaaattgctcaattgtaccacagcttgattaaatcataaattaagtggcaaatatcatgcgtaaatggcttccttgagcgtttttgtcttagcgatataactgcgattgcgcgaatccgattgtgcactcaccttatttgcttcgtccctcgaaccctgctcaagctggctgatttgctcatagagcttcatgatttttgcgagcttcgcggtgcgctgcatcgagaggctattgactgttttcatatcgatggacttcgcctcttgtgtttttgcagactttggcgcacctacctccccttgctcctttgatggcttgctcccactttcctgtgttgcttgcgcactctgtcgtggcgcggattctgctggttcgttcacaggctgtgctgcgacagaatctgtcgcttcgccctcgcctgccgtttcactagcaacatcgccaacagcctcgctcaccgccgcctcgacctcaacattcgcgctcgccacatctggcgcgcccgctgcaatcgcctccgcatcgcctcctgtggatgccaaagcggcttcaatcgctgccattccactgcccggcgcgctgcttccgccgcccgcgctcgtatccacgctgaaatccacgcttggcgcagcaccagagagcacacgtgtgatttgcacggaatcgtttagtacttccttctgcaagcgcgagatttggcttagaagctgtcgaatcttgtcctgataatcgctcgcaaccatttttgcattcccataagccgacttcacctctgctctctgtgtctcgttcaactgctgcaattccgcacgtgccatgtcttgttccgttgggggctcatccgcaaaggcaagaggattcttctccttctcacgttcctttgcgatttgctcaagcgttttttgcatttcctcgctaagttcgcgcaaacgttccattgtcgcattgagccatttgccacgttcctcgtccgtatcctcgcttttcagctcacgttctgcctgcgcaatcgcaaggttgatagtcgaatttttgaactgtgtctcggtctctttcttgctgaatgggtcgatgtttgccgaaatatcaacacccacaagaagtccgagctgcgcgcgcccaccattatttgcgcctatgccctccttgatgtgtgcgcccatatcgcgcgaaacaacagcttgaatctgctctgcattctgcctactatacatcgaactcaatcgattgccactccagcccatattcatgcggacagagaaagtattcatattatccgctcctttcaagtatttttctcaaaatcgacataatgtcagatttctagagtcaagaatagcgcaattgggaatattccaacggcagtaaaaaatcacgcacggcgagggaatggggatagaatccatgcgcactcccgagcgcaaagagtctatcgagtgcctccagctgtgtgtcatcaagcgaaatggaatgctcattggcatagaatcgaagatacgtttcaagctcggcgccacgaatgcgcaaaagcccgcgctcatggagcatgttgcttagaatctgtgggtggttgtgtgcaatcgccacgccttttgtgagcagctcctcgatttgcaacgcaagatggagcggaatcgagcgcaaaatcgccattccaccaagcggcaagggcagcgcaccgccgcttagattctcccaaatctcccatatttcacgttccacacaaagtttttcattaaaacaaagaatcgattcgtgaataagtacgcccgcgtcgacttcgccgcttaacacagcgttttcgatgtcgagaaaatttttatacacaatgcgcgcatcgggataggcgatttgaaagagcagtgcattggtcgtgtgtgcaccacttagcgccaccttgaagttttttctaagctgcatgcctttgcgtttgatgagtttgggtccataaccttgtccaaagctcacgcctgtgcgcaaaagagcatagttctgggcaatcaacggatagagcgcaaacgaaatcgcgctgatttcataacatgaacgcaatgcattctcattgagcgtctcgatgtcaagcgcgaaattctcaaagcatacatttgggcaatcgacccacccaaacgcaagcgcatagtacataaaaatatcatcggcatcgggggaatgcgccacgcgtacaaaatgtttatgattcatgcgtggattctagcgaaaaaagattaaagttgcaaaactgcaacggagctaatcacgcgagagtgtgaggattccgtgctccaaatctttatgacacgcaaaacaatttgcctttgatttgatatttggttgtgcaaagacatcatcggcgatgtgtgcatgtaactctatccaatagggattttttgtgattgcgatatttgtggaatctgtttgggatttgatgatattttgcgatacttttgtgtcgaaagattgtgcagaatatttttctaaaaatgtcaaaatctcggcattgagctcggaatcgatgcttgcatcatcaccaaaatgattctccaaatcgctcatcatgagtgcccatgattgtttgggcaacaaaaatggagggtagatggcatggcagctgccgcattcattagcaaagtttttgttgagaatcgcataatcgattcgttgcgcatggcttttattgagggcattgtcgccaagcatcaaaacagcgacagccgcaagcaacgcaatgctagcaccactaaagattctttgccagatgtttagcgtgatgctttcgttttgctctgttgttttgaatccagaaatcatcgcagcaatcgaatcgtttttatgcacgagccaatcgatgagcgcacccagaacatgcacgacaacaacaaacaagagggcgtttgcaaagagcttatgtgcaccatcaaggaatcgcacatggctatattgagcatacaaaaatgcaaagattccttggtttttagcgattcctgcctcgagcattccgcttattgccgtgcagattccaagaaagagcatgagcaagattgcccaactgctcgcggggttgtgccccacaaaacgcgtttttgccccaaagatagaatcaagatagctccaaatttcacgataggggaaatcgacaaagcgggaatgttttgtcccgacaaacccccagacaatacgtaacacaaccgctgtggcaaagagcatcccaaagaatatgtggattgctaggaaatcatccagacaataggcaagagtgaagccaataatgagcacaacatggataaagcgattaaaaaaactccaaatatagctctcaatcacgccatgcaccatagtttggaatcttgacataacgttttcgatatacgccatcatcagcgcttgtatggcatgctgcacatcgtgcgaggctacccacctctttttgagcgatgagatgtttatcaattttgcgatgttttttaatgtgatatggaatctcggtaatcgacaaatagagtacgccgggctgcattgagcttgtcagcttcgcgctgcggcgatacatcgccgcagccttttcgctcgagtttgcaaggacatattcggtaatggcaacgcggtcttgctcatcaatgctcgcatcgacaccataatgcttctcgagattctgcatgatatatgtccatgattgtgcaggcaaaagcccgggctgatagccaaaatgacagcttgcgcattcttttttatagagcgtattatcaacaggtgcaatctcgcgcctgctattcttggattcaaacatcgagaattgtaggtcattttgtgccacttcgataaaaacgggctcggcatatcccaagccaatggcaagaagcaaaagaaaacgtttcatattctactcctattttgtgaggatataatagagcacatcgcccttttctttcgcgctaccctcgcggagatagacatctttgaaattgcgcttgagccatttttgcacttgttttgggtcgcggagactttctgcattcgcacttggcgcaagaggtggcaaaactttgcctgtaaacacattgcgcccattttgctgcagattgctactatggcagctttcacatgaaagtttttgattgtctctgccaatgtttttggtagtgaagattctttgcccctcgcttgcactaaaatccacaaacccagaatcgtggctttttgcttcggtttttaagctttcaatataggcttgcatttcttgattgaatgttgcagcaccaagcgaacagatacagataatccatagatactttttcatggcatactcctaaaatgaataagaaatattacatcttaaatgtcaagaatatgtcaaacttttttaatcatgcatataaaaaatgaatcacatttgataatacctattttatagcattgattaaaatcatgacttcctagtttcattcttattcttataatcaatattaaagctatcttttggggttttgtttgtatcaaatgcagtcaaatacaatcattttgcaaatctcgcgccaaagcatgcctcctcactatgaaagtgcaaaagttgcaaatggtttgcgattccaagttctttaaattcactttcgctataacgtttcgcgttgcttgggctataccaatcataatttgtgataatcgatgtttcgagtccgagttgctcattatagaagcattttagaaagttccaataaataaaacgttgaatatcgattttgccacttttgattccaagcaatggaatggcagggacatcaatttctactttgagttcttgcaaacgtttgccaagctctgtgagctgctcgctcatctcgcggagttcattgtggcttaagtcgtgacattttgtgcggaaataatcatcgacaagttcacgcggcaatgcttttttggcatacacataacaggcaaattgccccccccccccgcacacctctggagaatctgtgagcacacgtgcgagctcggcaaatgttgtggcagggtcttgggtgtgcatgatgacggcgtggcagctaacatagtcaattactgcattcgcaaaaggcgtgtgcgcaatatcaccacgtaaaaaatagagattgggacgctgatagcgtctgcttgcttcttctgccgcttctgaaatatccattccgataatgagcgtttcaggcgcaaggcttgcaaaccaatcggaaagatagcccagcccacaacccgcgtcaaacacaacgcgctgttgttgcaaaaactctgcaagcgcctcaacgctaggaaagccatagagccgcagataccattctttttgaaagtcccacagccgctgctgctcgtcttcttctgctttgtttgcatagccaatccatttcttgctgaacacatctgccgtttgcgcctgattctttgcgacttcatgcaaatcgtccgcaaaatgttgtgcattaaacggaatatgtttggtaaaaagagtctgtatgtccatcgttatctcctaaggttgattgtgcaccattcattgaaattgagcaatgaccaaataaataatcggcgattcgccctgccctctaaatgctcgctaacaagacgatgtgttgtcgcatagtcaagataatcaaacaatggcgcatgtttgtcaaaaagctttgtgcgcacaaaggcgagcgattcgccctcaaaccagctactatcagggctcgaaaagccttttttaatcgcgtctgttacctcgtttggcaaaaagttctgcagcattctgcggaaaatgagcttgccatcatttgtttttttcaaaaccacacgtttgctgcccaaatcattctcattgatgcgttggtgtttgagattgcgaagcttgtaatgcagcggaatgctttgggcaaaatcgacaaggtcattatccaaaaatggtacacgcgtttcaagtgaatgtgccatcgagagtttatcctcgacaacaagcaatccatgcaaaaatgtctttgcttcaaaatatagagagttgttgatataatcttcttttgtttttgctggtgctgtgtgttgcaaaacattcctaaaaatatcacgcgtccaaacatgcgcgacatcttgagcaatgggtgcaaaaagatttttcagctcgctattgggtacaagacgttgccaaaagagataatatttatcgacataatcttcaaaatcacggcaatcaagcgcttggtaatagcgccatggatagccaccaaacagctcatcacccccacaaccgctcaaaaccacgcgcacaaacttgcttgcaagttttgcggcatagaaattgggataactctgtcccacacgcggttcttcgagatgataagcgaatgtgtgcaggcaacgttccatatcgccgcttttgagcaccatttcataatgttcggttttgaaaagatacgaaagccgctcgctcacggcgcgctcatcgaatccaagctcgattcctttcgcgcttgtgaggtcaaagccgaccgtgaatgtgttgagatagggcagcgattctgtggcaagtgcgcaaatgcttccgctatcgattccgccgctaagataaccaccaataggaacatcagacacaagttgtcgcgatatgctttgtcggaaa

SEQ ID NO: 3760 - DNA, 23174 bp, synthetic construct
  misc_feature 1..23174: note = Synthetic
  variation 14691..14700: note = note, n is a, c, g, or t
  source 1..23174: mol_type = other DNA
aacaatacaaaacagatagaaacccaagagaaccccttttaaatcgctgtattgtgtattttgcgcttgatagtgatttaagctttatgacaaccaaacttgaaggagaaaaaacctactttttgccttttaatcgtgggttaaataatggaagcggagaaatagggctaagtaatggtgcagggaatccgctaagtgagggcataaaaactgcttatatgtgggagaaaatttttaccaaagcaactttaataaatcttatttttaattttgtgcaaattattaagaaaaatgataaagaagtaattatcttccctagatttcaccaatttgatttaatagaaaagctacttttagacgcaaaagaaaatggcgtggggcaacgctatcttatagagcatagcgcaggaagtggcaaaagcaattctattgcatggcttgcgcataatcttgtaagtttgcatagattagaaaatggcaaaatgcaaaatatctttgatactatcattgtcgtaactgatagaaaagccctagatagtcaaataagagaaaatgtgcaatctttttcacaagataagaatctcgttgaagccataacgcaagggagcagacaactaagaaacgccctagaagaaggtaagaaaatcatcattacaacgattcaaaaattcccttatattttagatgaaatcacacagcttaaagctaaaacctttgcgattctcattgatgaggcacattctagccaaagtggaagcaatgcacaaaaactaggggaagttattagagataaagacgaatcccaaaacgaggaatcccaagaaaatacagaaactacaatagaagatgaaattacagaaattataaaaaataaaaagctccaacccaatgcttcctattttgcttttactgccacgcctaaaccaacaaccttagagctttttggcacagcttgtgaaatacaaaacactaagaaatttatcccctttcatctctacccaatgaaacaagctattgaagagggatttatccttgatgtgttgcaaggatacacgacttataaaagctattatagaatcctatcgcgcatagaagagaatccgctttatgacaagaaaaaggctaatgctaaactaaaagcctatgttgttagcaatgttgaaactattaagaaaaaatctagcattatgatagagcattttttcaataaaacttttagaaaaattaatggaaaagcaaaagcaatggtggttacaagttcaaggaaaaatgccataaattattactttgcttttagggaatatttaagggcaaattatccaaactttaaagctattgtggcattttctggggaagtggctttaaatggggaaacttatagcgaaagtgggttaaatggctttggggaaagtgttttaaaaaaggaatttaaaaaagatgagtataaattcttaattgtcgcagaaaagtatcaaaccggttttgatgagccacttttgcatacaatgtatgtagataaagctttaagcggcgtcaatgcagtgcaaactctctcacgactaaatagaacctgcccaaacaaagaagatacttgcgtgattgattttgtaaatacacatgaagatattgccaaagcttttgagcctttttatgagcaaacttatttaggtgaagcaaccgaagatgagcaaatctttacccttaaaacaaatctagcagaatatggaatctacactcaagatgaaatagattcctttgtcaaagcaattttaaacagagaaaaagaagatattatccaccctaagcttgatattatggtggggcgttttaatgggaagcaagaagatgaaagaaaagaattttacactaaggcaaaaacttatcttaaagcctattcttttcttgtgcaaattttgccctatgaagatatagagcttgaaaaactttatatcttattaaaaaagctagttactaagcttgctcctccaaatgctgatgattttgcaaaagatatattaaaaaatatagattttgatagctttcgtgtgcagcttgataaaagtcaaaatatcatccttaaagcaaatggcgagttaaaaccttcccaagcagatggttcaagcgcaactccacaaacagagctagaagagctttcaagtattgtaaaagaatttaatgaaaaatttggaatggattttgaagaaagagacaagatagttaaagatttgcacaatatcaaaaacactatggcaaaagatgagagaatcttaaattctttaaaaaattctgataggcaaaatttgcgcatagaatttgaaacaattttgcaggaaaaattccaagatattatagaagaaaatttcgcactttttcaacaatttaatgatgataacgcatttaaaaatagaatcacacaaacaatgtttgaaatggtttgctctaatacaaaatcacacaatcttctataatatttctactcacaaatacttctaggtatttatgcgtgcgattctaaaagctcaatagcgtgttttgaagatttttcaatatctccaaatgtattgatgatagattccacattttcttttgtcaaagtatggctaagtttatctaacgcagaatttgtatctgcaagcaaggcttgttttgtttgatttaacccttcaatatctaattgtccgattcttagtaatgttttttcattatctaaatacttagaaataggattaatggcattaaaatcgcaagtttcctttcttagattaaaacttagatataaatttgatttatacacaatgtgttctagcttagaaatactcaataacaagcgcgaagatagtttatcaaagacttcttgaagcgtgattgttgtttgctccatttttccaaatatctcactaaaatttgcaatattgctttgcgtagagtttgcataatcagaaatttgagaaaaattgtcttgaatctcggcaatttcttgttgcatattttgcactaccattgagattccattagttgccttgtgcgtcttttctgcaagctggcgcacttcatcagcaacaacagcaaaccctcttccgtgctctcctgctcttgctgcttcaatgcttgcatttaaggcaagtaaatttgtttggttagcaatatcggcaataatctcaacaacagaatgaatatcttttgatttttgagtaaagctctctatggtggctagattttcattaataatcaccattaatgtatcaatggattcgttaatacttgctacatctctttgagaatccttagcacttgttgtaatatttgtaacattgtcatttacaatatcaagctgctgcatatctccatctaaatctgatgaaatttttgttaaattttcattttggctacccaagctcaaatcaagaagagatttagcaagcgcattttgaatattttcttttgcattctcttcaatttttagtaatgctgcattaatattattaatattttgaataaaatcaccctttaagccttgtgcataagctagacgataatattttccttgttgagaagaatggactgcggtgctaatttctcgcataaaagcttctaaattatccgccacattatttagattatttgccattgtgcaaaggtctgcatcaccttcaatccataaaacacgcttttcaaatattcctttttgataaaaatttgtaacattcagcattttttgaataaactcttcacgctttttaaattttaagaatcccaaaatcaaagaagtcataattaaaacataaaagactaaatgcgcactaaagttttgtaaaagaatttcaacaacaaaaccaataacactaagtgcgattccaatcattaaaaaaattttcatctataaccccctacttttccttgtgattgaaggtcaataattaatttgtcccaagttgtattgttttgctctaaataatctaatacaaattttacacttgcatctaacccatgctctttttcaatgagcaataattgcttataaatttctatcattgcttcgattccagctttgctcgcacgacgacgcacagaataatacccaatcacttgtccattttcatcataagaaggagttacattcgtaaaaacccaatatgtttgacgctttttagaaagattgcacacaaatgcaaaaaattcttgctttgcctctattgtatcccacaaaagtttaaaagcagcgcgtggcataaaaggatgacgcacaatactatgaggtttgcctaaaaactctttttcactataaacaacatatttaataaaatcaagattcccataagttattttgccttttaaatctgttttggaagtaattaaagtatcatcatttaaaaaaacttcatttttaagaaggttcaagagagattccatattttttccttaagaaaaatataaaaataatgctaaaataataattattactaaaaatttataagaatcacataaagacagctgtaaaattttctaaatttaataatgattaaataaaataacttcaagtcaaaaccaaaaaacaaatttttcaagcctgaataatataaaaagaataaaaatgcaattagtaaattttaagttttgcttagatagaatgcacttaattaaggttgttttaaaaaactttaaagattaaagaatgaaagtcgcactcatacaattcacaccagaatcctaccaaagagaagaaaatttagataaatccttgaatctcgcctcaaaagctgtagaaaaaggtgcaaaaatcatcgttttacccgaactttttgatagcggatattgcgttgaggataaagattctaaatttgggcttgattttgcatttttccaaaaagccataaaaaacaaaagactaaaagaactttcttcaaaataccctacacttcatcgtttgtatgaatttgcaaaaacgcattctattcacatcattacttcaagtatcgaaaaagataaaaataagttttacgatagtgcttatattattaataaagaaggcttggtaggcaaataccgcaaaatttacctttggggtaatgaaaaaaagcgattccaaaggggcaaagattatcctatctttaaactcaaaatcgacaaagaaatcatcaaagtcggtttaggtatttgctatgaaataggctttggcgagggggcgagattcttatctttaaaaggagcgcagattcttatttatcccgcagcttttggcaaggcaagaaattatgtgtgggatttagcaagtagagcaagagccttagaaaatggcgtttttgtcttagcgaataatcgaagtgggtctgaagtctctaagcttaatggcgagactttagaatttgcagcaaattcaagaatcattaatccaaaaggagagattctcactcaagctttacaagatgaagaagtcattgtggcggatttaaatcttgcagaagttacatcgcaaagagaggctttgccttatttaaaagatttaaatgtaaagctcaatcaaaaagttctaaaagagcttttatcttaacacaaggagaataaaatggcaaaagaaattttagttgcttatggcgttgatattgatgcagttgcaggttggcttggaagctatggcggggaagattctcctgatgatatttcacgaggactttttgcgggtgaagtagggattcctagacttttaaatttatttaaaaaatacaatcttccagcgacttggtttgcacccggacattctattgagactttccctgagcaaatgaaaatgattgtagatgcagggcatgagattggtgcgcatggctattcccatgagaatcctatagcaatgacacctaagcaagaagaagatgtacttgtcaaaagtatagagctgattaaagatttaacaggtaaaaaaccaaatggttatgttgctccatggtgggagttttctaatgtaacaaatgagcttttgctaaagcatgaaattaaatacgaccactctttaatgcacaatgacttcacaccttattatgtgcgtgtgggcgatagctggacaaaaattgattatagagctcaagcaaaggattggatgaagcctttagtaagagggcatgaaacagatttagtagagattcctgcaaactggtatttagatgatttaccaccaatgatgtttatcaaaaaatctcctaatagctttggattcatttccccaagagatatagggcaaatgtggatagaccaatttgattgggtttatcgtgaaatggattatgcggtttttgcgatgacaatacaccctgatgtaagcgcaagaccacaagttttacttatgcatgaacgcattattgagcatatcaacagcaaagaaaatgtgcgttgggtaaatttcaatgaaattgcagacgacttccttaaaagatgtccaagaaaaaagtaaatattaaaaatcaaagggctattttagccctttagtaaggtttattatgtgtgttttatgcggagaaatgctaagcgttttgcattggagtgatgcgcactttaaagaagaaagctctgttattgtagcaggagagaatcaaagagagagaatgcgcttaaggcttaaaaaagtcgcaatcatcaatgatattttagagttttatgggctaaatctcaaagattggcaaggaagcaaatatctcctaagcaacaaaaaaggcggttttgtgattgttaatgaccttggagatttatggattaaagcaagtgagcttgaaggattctcacttgatgctattgatgaaaacctccttgattttctaaacacaaaaaatgccagctaaaattcctatccatatcatcacaggttttttaggaagcggtaaaactacttttttaaaagaactcttacaagataagaaaaatgcaaatattgctgttgtagtcaatgagcttggagaaatttctcttgatgatatgcttatccaaactgaatttgtcaaagaaaaaacaattatgcttaatgctggctgtatgtgctgcaacaaaagagaggatttaagcataaagtttaaagaactccttaataaatatgagcaaaaaaaccaaaaattagagagaatcctaatagaaaccacaggcattgcaaatcccgcacctattatttttacctttttaagtgatatatttttatcaaatcattttgaagtttttaatatcatcacttgcattgacgctcttagcggactttcacatattcaaaataaccaagaagcgtataatcaaatcattagcgcagattgtattttactcacaaaaacagatttaaaccacgatataagccccttaaaaacaaaaatagattccattcatcaaggcatagattttattgacaaaaaggattttagttttgaaaatctcacaaatataaaaagccaaaatttgactgcgattcctaatgaaacttctcatacaagcgagattgactcactctgcctttcttttgatgaaagcttagattggagtatttttagcatttggcttagcatgcttttgcaccgctatggagagcagattctaagggtaaaggggcttttagatgtgggagaagattatcttgtaaatctcaatggtgtgggacatcttatctacccaaccactcatactaaaacacgaggaaaaggctcaaagctagtaattatcgcaaaaaatctagacctcaaacgcattgctaaatctttagaatcttttttgaatctttctgcaagatacacgcaatattaattagaatttctttttattaacatcatcaagaatatcttgagcgactttatctactctctcgctaatctcaaaacttgcattagcgattccaacattttcttgtgtaacagcgtccaaatgagaaacagcttcattgatttgggtaactcctgcagtttgctctttaatagattctcccatatcattaacactttgcactaagagattcgtatttgcttcaatctctcctagagatttttgcgtgcgctctgctagttttctaacttcatcagcaacaactgcaaagcctcttccatgctctcctgctcttgctgcttcaatagctgcatttaatgctaaaaggtttgtttggtcggcaatatctctaatgattccaatgacatttttaatatcttcactttgtcgcactacatcttctgttttgctgctcacattttgcatagaagcagtaatctcttctaccgcttgtgcagttttgtctaagctagctgcttgagaatttgttaaatttgtgagatttgatactgcctcagcaagagattttgactccatagagagagattgtgcaaattcagaacttgcgcgaagcatttttctaatttcttctcctagagtatttgttaccacctctactcttccatgcgcatcttttacttctgtggtgaagtcaagcttggtataagaatcaaagacgcgtgaaatttcgtttgtatctgaacctattttagattgtaaatcatctaaaagatggttgagcacattttttaattcattaagctttggactatgaggagtttctgtaattcttgcagtaaaatccccagattctattgtttttgcagtttggacagattgttcgactgctttagaatcttgctctaatcctttttgtgttttttctacattaaaattaatagcagctgccatttgcccaaattcgtctttggttttaattgcaataggttttggagctgttttaacttcaaaattaaggaagctaaaaaatgcttttaagccttgtgtgatagttgctaaaggatgcaacataatattaaccactatataaagaatcgcacttgcaatcagagcaaataagattcctaagcctatttgcacatatcctgctttgataattggtgcttcaatctctttgatagtttctaaactacacaaagtaaaatcggcaaattctggatgcgaaacagatttgcattgtgcgattttctcaaccccattttctagaattgtaaaaggttcaaaatctcctgttttatggctcattgcatcaatttcatcaaagaatttatcttttttcaaaatatatgatttttcagtagcaataaatggaatattttgagagtcaagcgcgaaaagatttatatcattttgctctttaagggcatcaaaatactgctgtaagttttcaaggaaaatatctataccaaccacccctataagttttccatttttcacaataggataactataagtaaagtttggtttccctgtgatagaatcgctataaatctcggtttggtaaaatccattctttttaactgcttctataaaccaaccgcgttgatttgcttgataaccagtattgtcataatccccaccgcggaaacgataaatttgtcctgcttcatctgttaaatggttgctttcaatcattgttccatttgccaaacctaaataagtcgcatatattccagcagtatctttatgtagtttaagaaaatcccctatatgttgagcaataagctctcttgaagcaagctggctatctggcaaagaattaatcttatccaccaaagcaagaacagcttttttcatctgctcattgttgatgccaataaccatctcaacaactcttaactcctttgcttggttttctgttgcagttttcattgattcttgcttgttaagtgttatagaaacggtgcttaacaaaaccatagcaattatagaaataatgcttacaagcagtgcgactttaatctttacactcatgattttcctccctaaaaataatcaacgctattaagatgacacagaaataaacttagaattatatctaaatattgctgcttaagtaaatgtattttttagggtctgcaaaatttattcacctaaatctctatccttgttttgaagccaaaaacacaatgaagttaatattttatgatagaatatttcattactgcattaaattattgagggaaaaaatatcatgtcagataaaagcaaaattctaggatttgatattgggattacaagcattggttgggcttatgttgagggtgaagaactcattgattgtggggtgagaatcttcactaaagcagaaaatcctaaaacaaaagaatctttggcgttacctagaagagaagcacgaggggttaggcggagattagcacgaagaaaaggcaggcttaatgcgattaaacagctgatatgcaaagaatttgggttaaattatcaagattatatagcacaagatggggaactacctaaggcttatgcaggaaagcttataaatccttatgaactaaggtctaaagcattaagagagaagctagaaaaagaagaattagcaagggtgattttgcatattgctaaacatcgtgggtatggaaataaacacgccaaagaaactgatgatgcagaatcgggaaaaattaaaaaagctatttcaaataatgaaaaaatattaaatgaaaagggttaccaaagtgcaggagaatatctttatcaagaattttttcaaaaagaaagattgcaagaagagaaaaaaggtaacaatactacaaaagaatttaaaaatgtgcgtaataaggcaggagattatgaacactgcatcgcacaaacccaaatgcaaaatgagcttagattaatttttgaaaaacaaagagaatttgggttaaattttagtgaagaatttaaaaagaaggtattagaaaccgccttttttcaaagacctttaaaagattttagcgacaaaataggtgattgcacctttatagaaggagcgaaacgcgcccccaaagattctctaagcgcgatagagtttgttgctttaggtcgcattattaatacattaaaaaatttacaaaacactagcggtgaagtttatagtagagataaaattaatgaaattttacaaatcgtgctagataaaggcgagataagctataaaaagctaagagagattttagatatagaatctagtgttcgttttaaagattctaaacttgattatacaaaagagcttaaagaagctgaaaaaactaaactttttgaatcaaaaaacttgcaaaaatttaaaaaggctttgggtagctttgagggaatttctcgcgaaattttagattctattgcaaaagaaattatgataactaaggacaaagaaaaacttgcaaaagaattgaaaaaattcccgcttgatgaaacacaaatacagaatctaagcaatctttcattctctcaaacaattaatctaagccttgaagcattgagtcaaattttaccttttatgcgtggagaaagagaagacaagtgcttgcgttatgatgaggcagtggaaaaagcgggattaaaagaagtagcaaaaaataaatctaaagatgattttctccctcctcttgaaaattatgagccttatcttgccaatcctgttgtcgcaagggcattaagtgagtatcgcaaggtgttaaatgcacttttaagaaaatatggcaagatgcacaagattcatatagaatttacgcgtgaagttggtaaaagtaaggaagagcgaaataaaattgaaaaagagcaaaaagaaaattttgctaaaaatcaagaggcacaaaagcaatgtgagattctaggattaccaattaatggtgcaaatattcttaaaatgaagctttggagagagcagcaagaatcttgtgtgtatagtggaaaagagattgcaatagatgatttaaaaaatcctgctattttacaagttgatcatatttatccttattcacgaagtttcgatgatagctataataataaagtgcttgtttttagcaaagaaaaccaaaataagctcaacaaaacaccttttgaagcttttggcgaaaataaagacaaatgggaaaaaatcttaagtcttgcaagtaagcttccaaagccaaaacggcagagaatctataatatgcagtttaaagataaagagcaaggattccttacgcgaaatatcaatgatacgggctatatcgcaagacttgttagccaatggacaaaaaattgtctaagttttgagaagttaagcgaagatgaagtaagcattgcaggagaaaaaggaagtaaagtgcatgtggaagtcataagcgggagtttaaccgctatgcttagacattattggggattaggagataaaaatcgtgataatcacctccaccacgcagttgatgcgataattatcgcttatagtaatgaaaaagttattaaggcattttcagattataaaaaacacagagaacaaaataaggcaaagttttatgcgaaagaaattgcagaatctgaatataaaaaacaaaaagtattctttgagccaacgaatcattttaggcaaaaggttttggaaaaaatagattctatctttgtttctaaacctccacgtaaaagagcaaggggagctttgcatgaagaaacattttactcctttgaaagattatgcaatgataaagaatatgctaaaaaagaaaaaatggattatggtgggaaagcgggtatccaaaaggcaatagcattaggaaaaatccgccaagttggcacaaaaattgtgagtaatggaacaatggtgcgtgtggatatttttcaacacaaaagcaatggtaaattctatggtgtgccaatttatacaatggactttgccttaggagtgctgcctaataaagcagtagtaagtggtaaagataaacaaggagtgattaaagattggcttgaaatggattctaactatgaattttgctttagtctttttaaagatgatttgattttagtgcagaaaaaggaaatggaaaaggcggagttgtgttattacacagattttaattctaacacagcaggaataaagtttgaaaaacacaataatttgtatgtaaatttaaacgaaaatgaacgcaagctatttaccagcaaagaagttgttaaggggggcaagaaaaatgtatggaaagataaaacacccaaagaaatagagcaactagaaaaaaatagaaaaattataggtggatttgtaacaatagaagatttaaaaacttttgaaaaataccaagtctcacccttaggtgaagtgcaaaaggcagattttgcaccgcgtcaagctatcaccctaaaatctagcccaaaacatagaattaataaataagatgtttgattctgcttttcgcacactttttctaagcacgcccgcaaagcttagtttgcttgataatcatctgtgtattgcacaagataaaaaggataaggtgaagattccactatctgatattttgtgccttattttagaatctccacaaatcacgctcacaaatgccttgcttaatgcactagctcttcataaaatcatcttttatacttgcgataatgcgcatttgcctagtggaatatttatgccatttttggggcattatagaagtttaagtgtcttgcaaactcaaattgcacttaaaaagcaaagaaaagctgtgctgtggcagcaaatcataaaggcaaaaatcactaatcaagcggctttattgcaaatgtgtggcaagaatcaatggcagaatttggagtatttagctaaaagtgtaaatctagcagatagcgcaaataacgaagcaaaagcagcggcaatttattttaaagcactttttggggcagattttagtcgcaaaatacaaatttttgaagatagcaaaataggaacgataaatgctacactcaattatggttatgcgattgttagaggaatgatagttagaagcctttgtgcaagtgggctaaatccggcacttgggatttttcatgctaatcaatttaatgcttttaatctcgctgatgatatgatagaaccttatagaatctttgtagattctatggttgtgcaaatgtgtgagtgtggagagttagaagaggaatttaaacttgagcatcgtcttaacctagcaaatattttaaatatagcagtgaagacagaggataaactctatccacttagtcgcgcaatcatcgtcagtgtgcaaagcttagtgcggtgtatagaggaagaatctaaactcaaacttccgctattttgcaaggataaatcaaatggaagagaaatttatgagagtgctagtgatgtttgatatgcctacaataaataaagaagataggaaaaattatacaagatttcgcaaacggctcattaaagcaggctttatgatgttgcaatatagtgtttatatgcgaatctgcaaaggcatagcaagtgcaaataatcatttagataaagtgggtttgatgataccacctaaagggcatattagagggttaatcttgacagaaaagcagtttgataatatgcgattattgcttggaaagccaagtaaaaatgaaaaggtaaataaaccaagacaactcacacttttttagattctaaattttgttatgataaaaaatttgcaagaaatttgttgttaaattatcttatcaaggttattgtattttgtagaaaaggaaattataaaatcggttttaagggattgtaaccctgcagagaccgaaaactccttattttagccacttattaaattctttgattggaattataaattcattttccttaaatacctatttaggatatttaagcctttttaaaacctctcaaaattcgtaaatacaccattttaatgaggtgtnnnnnnnnnntttggcgcgctcttcatctcctttaaaacgcacgagtgaaaattcactttctgcaagtccgggttcaatatcactaactcttacatttgtgcctgctaaatctgcgcgcaatcccaaagcaaattgtcttacaaaagcttttgttgctccataaacattgccaccaggataaggatattttcctgcaatagaacctaaggtaataatatgcccgcttttgcgctctaccatttgcggcaatataagatgtgttagaaagctaagggcggagatattcactgcaatcattctttcccaatcgtcaaaatcgcagatttgagcgggttctatacctaaagcaagtcctgcattattgactaacacatcaatggattgaaattcttttggcaaagaagcaagagaattttttagggcaactttatcgcaaatatcacaaggcaaaatttcacattgtggaatctctctttgtagggattctaacctctctttacgccttgcaagtgcgataactttatgtccattctctccaaacttttttgcaatagctcttccaaaaccacttgatgcgcctgttattaaaactatcataacttacctttctgttttgattttacaatttaaaattttttgataatgcattgttaattccttttctttttggatttcttcttttgcgattttatcaatttctatttttgcatttttgcaatctttaagtttgaaatatccccacgcaagggagtctatataatagtggttatcagggtctaagaggagagcttttttgacatattctataccttcttgaacgcgcagggaatcgttaaaatcatggtcaatcattaaatagcctaaataattccaatacaacgcatcatcagtcttttgcgctgcttcttttaaatctttttctatggattgtagataggattttgtgcgcgttttggtgctctcataagaaagcattgctttataggctaggaagttaaaatcttgtgtgttttgatagataatttctgcttgttggatactcttttttacatctttttgtaagcgatacacttcaaagagtaatgtatctcgcatatcaatatttgggtgttttaataaaaaagattctactaaatctaaatgtttatttttggcataaatttctaagacaaagcgcgcgtaatcttgcgtgcctaattcttcaaaaagaagtgtataaatgcgcgcagcgtcaagatagagtttggattctaggtagattgctgcaagtttatccccgattgcttttgtgattccttgtgttttgatatgtgtttcataaagagaaagtgcggtttgtaaatcttttaaaaacagaaggtgagttgctgcgagtttatcgagtaaaatagggtttgggtctaaattataagcagattggagatattttacagcatttttataatcttggcgcaaaaaatatacagaagaaataagttcatagctttcagcatttttgtggtagcttaaaagtgttttagcttcttttagggctaaatcaaattgccttgagtttgttaggattccaataagcacgctacgcaccacttcatcttttggatatttttctaaaaatacatacgcttgtttttgtgcttcttctaggttattttgtgcgactaagattcctagaatctcttttgaatagctggggtttggattaattgtattagcattgctaaaagcttcttttgcgctttcataatcttgtgcatcaagggcagcataaccttgtgcgataaaaatatcttcaagattttccacttctttaaaagaggggctttgagagagcattaagttgtttttgaaacaacccacaaatccaataaatagagcaaatccactaataaaaatgataagacttttattttttaaccacaccgatacattcctttaataattcttcaatattatctttataacaatcccaaaaaggaaaagtaatacattgttttgggcgttttggataaatttgacagattccgtctttaaaaaatatgcaagaatagattttattaccttgcgcaatttctaataaagagtagcgatagcctacttttttgacatagttttgacaaaaagtatcaaaatctatgcttaaaaactctgcaatttcttgtatctctttaggagagacaaaaatatatccactctctcctgtgcaacatttgccaccgcattcttgacatttgttagaatcaaagtagaatccaaaattagaattctctaacatttaatactccatgtatttgcatgcttataaattgcttggacttcttgcgtgaaatgttctccattgtgcgtaaaaagtggtggcagaatctcgcataggcttttagaattttttttagcacggcataataccaaagttgcgcttttttctacctttggatacacaaaaccacagagattggtggaatcttaaaagtgtgcaatgtattaaataggctagaaattgcctttgcatcataacaaaaaataaattctccttgtggttttagcaaggaattgacttttttgacaaaatcaataaaaggaagattttctgcataacgcgcgctagaaatttctgcattttctgactttataactccattgtgataaaaaggcggattgcttaaaatcacatcaaaagcaacttgtttggaatctaaagtcttaaaatcaaaatgtaaaaaatcttcacaaataagattagcttggagattattaatgcgtaaattatgtgcgcataattccgctatttttggatttttttcaatcattgttaagtggattggcaaatctctagcacagagcattcctaagattccacagcccgaaccaacttctagtgtgatgtgatgtttttttaaaaaaggcattgcaaagttatgcaaaaacaaagtatcgctattgtagcaatatccattttttggttggtagatttgcataggattcctaatggattgcaagagaaaaaattgtttttttctgcaagtctttaatctctaattctatggaatcttgtgtggtgttgtagtttagctccattccctcacgcataatattttgctcaaaaccattttggattttgcgcttattttctccgctaaaaatttcttgtccttttaaaattgcattaaaatcaagttctctaaacgcatcatttccaaaaaatttccgcataacagaatccttagcatagcattgtgtgtttagacaaattttatctttataacaatccatttttaaaagcacaattcctgcattaaaaatttctaatgttgtatggtttggataggattttacaaaacctaagtcataaaatttaaaagcgttagtggagaagaaaattgtttttggtgtagaatcttgtagggcattgggtgtcttagagcacccaaataccgataaaaatatcaggctacaaatgcttaattttagaattgttcgccggttaatacgcgataccatcgttttccatcaagtttaagttccatactaacttggcaaagcccgtctttataaacagtttctatgatttcagcattgcgaattactgctaatacttttgttttaacagtagaattctttagcatcatatcacgcactgtatcttgtgcatttacgcggataccatacattttttcaccgatttggcggtaagcatctacgatagctgcgcgtttagcaagtgctaatgcttgcgctggagataccgtagattcaggtgcaacccccataccaattgcgctaatttcaataatgcttgatggtgtaataatcggagcatttggaattacaatatcatctcccccaacttccattccttgtaaattagaaggagaatttgaatttcttccaatagaagaattttgaacagagttttggaatcctgcattccctattgggcttacagatgcactacttgttgttgaatttacttgagcagcaaataaactacttcctaaaagcattcctgctaaaactaatgaaattgatgtttttcttgccatttcaatcctttttgacataagatactttgtgttaagcaattggtgttccacttttttcaaaaagtgtttcgcgtaaggattctaacattttatccattcctataagataaagttcgcaacttttttcccaaagatcttgcatattattatgtggggtatgtatagaacaagacgcaattgcatagagaaaatggcatagagttcctccaaaaagtatgctaataaaaggattgctaagagattctatggcaattacttcataaactttatccaaagctacaaataaatcttgttttgaaaaaactttcattttgaaagtatcgtgtattttgtttttaaaagctagaatttcaaaaatgtatttttgtgtttcttttgtgtagaatccttctttttttgggtctctaaaaagagatttaatttgttttagtgctgtttttttgttgattgttttaagctcaaaatcttcatggtgtataggttgtgcgccattaatccttgcgccatcacttaaatttaaaatatgaaaaggtttaagtgcgctaaatgcttcttctaaagtcgtttttgatagagaaaaaagcgcatctgaataaatatcatcgctaaaatttccagccacaggataggcgtcttctgggatttctgcatcttcatctccataataggaatttttagcatgcttactagaaccttttttgtaaccacaatctaatccgcataaaatcacatcacttcctaaatatgctgctaatgccgctccagcatttccaacaagtggtgcagtaaattgcactctaaaacgtggaacatttaaatttgcagcactactaccatcacgttcaaagagataaagttcttttgcaacttcttttgcgcttttatcaagcacgcttgcagcaattaaaggaatatcatctaaaggagcagattttaaaacatcgcccaaataatcatggcgttcgatttctatttgaaaatcaggtttgattccatagtttagcagaggttttaaagcggttccacagctaaaaataatcattttatttttattctttttgataaatggaagcaagaagtcaagacttggtccatttgccactacgcaaattggagcattaacgcgctttggctcgatgagcattttgcggataggaaaagaaagtttatttttgattccgcgcatctcatcttcaaaagttccccatccacgcataatttgagaatgcatttcataaacaacatcgcgcgcatttagtgtaattggagtttgataaagcataagttcaaatcgaataagagaggtggtgattttttttcttagaaaaaagttttggatatattcttttttcatgatgctttctaaaaaaatatatcctgcttggtcttgagttttgctaaaaagtagggaaaaatcgacaaaaaagcatgcgattctaaataaatctaaggattcttcaaaaataaaaaaattatggattgttgcataattttcaataagaatctgcaagaaaatccccccacctaatccaaataggtttaaacttggcagaaaatcactaggcaagtgattatcaacaattccaccatttttgagtgtgtaatttaaaatttcatcaataaagatgttgctataaggatattcatctcctacaaaagaggcttttcctccaaaaatgtgattccatttttcattaatgggaggattataagcgcagttttcatgcacatctagcattgtagatttcccatcaacgaccgcatacataaaagtattttgtttgaaatttaagatattaacaccttcttgccctatataaagctgatattctttagctggagtttgtagcacttcaaaaagattaggataatttgctgcttgaaaaaaggctaagttactttggaatctcgcattacagaatgcttctaattcttttggagagctattttttagagtttctacaatattttgtttgaaatttgtgtgcatttttatccttgaaatttataaatgagaaattttagcagaaatttttaaaaccttttagcaaaaaagacaaatcctttaagtttgtaaggtttataatttactttttatttcacacaaaaggttactaatgcaagattacaagatttttacaggaagtgctcataaggagttttctcaacatgtctctaaagttttagatgtagagttatctaaagcggaagttacgcgttttagcgatggggagattagtatccgtttgtgtgaaagtgtgcgcggaaaagaagtgtttgtgattcaaccaacttgcgcacctgtaaatgaccatttaatggaattattaataatgatagatgcgttaaaacgcagttctgcaaagagtattaatattattatgccttattttggctatgcaaggcaggatagaaaggcagcaccacgtgtgccaattacagcaaaacttgtcgcggatttactccaacgtgctggaatcacgcgtttaatcactatggatttacatgctgggcaaattcaaggattctttgatgttcctgtggataatttgtatgggtcaatcgtctttaaagattatataatggagaaaaatcttaaaaatccgattgttgcaagtccagatattggaggtgtagcgcgcgctagatattttgcaaaacttttggggcttgatattgtaattattgataaaagacgtgaaaaggcaaatgaaagcgaagtgatgaatgtcattggaagtgtagaaggtaaagatgtgattttaattgatgatatgattgatacagctggaacaatggtaaaggctgcggctgcttttaaacaaaaaggtgcgacaagtgttattgcgttaggaacacacgcggtatttagtggtcctgcgtatgaaagaatctcaaatgatgcgattgatgaagtgattgtaacagatacgattccattgcaacaaagctgtgaaaagattaaaattttaagtgttgcaccattatttgcagaagtgattaaaaggataaacaatgatgaaagcgttaattctctttttgtttagagtcagtcttgttgctgggcttggaatcctatctttaaatgcgcaagagcaaaataagattattcaagcagtgttggagacaacttcaggcaagattactttagatttatttccagaagttgctccaaaagcggttgaaaattttataacacacattaataacggatattataatggagttatttttcatcgtgtcattcgtaaatttatgattcaagggggagacccaacaggcacaggaagaggcggggaatccatatggggggaggattttgaagatgagattgcaaagggatatgcctttgatagagcagggattttagcaatggcaaatgcaggtgctaatacaaatggaagtcaattttttatcacgacaacacgcactccacatttaaatggaaagcatacaatttttggtgaaattagcaaagaacatcaacaagaaagttttacaacattgcgcaagatagaatatacgcagacagattatgcagataaacctattagagagcaaaagattttaaaagcatatattgttgcaaattagctttaagattttggtcggaatgcttggataacagaaggatttgtttctaaatatgctgctccgattaaatcaagacaataaggaacagcgggaaaaacagaatctaagcattcgcggatagattttggtttgcccggaaggttgatgattaggcttttgtggtagattccagcagtttgtcgtgatagaatcgctgttgggacatattttaagctagtttggcgcataagttctccaaagccaggaagcattttttcgcatacagcttctgtggcttcgggtgttacatcacgcagtgcgggaccagttcccccagttgttacgattaaatcgcaagattcttcatctgcaagttcaataagcttctttttaatcagttctaattcatcagcaattacgcaatagctatgcgtaaaaggagtaataagatattcttgtagagtttctaaaatcgcttttccagaaatatcttcatagattccagcacttgcgcggtctgaaatggttaagattcctatttttgcttgcatattattcctttatgttagtgtcaatccattttaggatttctaagggattatttaaatctaaaatttctaattgatagggttttagggattctttaggaatgctagaatcaatagcgattgcttggataaagggtaaaaagcgcgtatcaaaagaatctctagcgacacaaattcttggcaatggcaattcttttaagccttctacaaaaagataatcataggtgctaaattgcgcttttagggattccaaacttaaagcataatggaatcgcaaagttgtttgtgtgcttcctagaatcgctacatcagctccactattaaa

SEQ ID NO: 3761 - DNA, 23153 bp, synthetic construct
  misc_feature 1..23153: note = Synthetic
  source 1..23153: mol_type = other DNA
atttctttttctctttctgggcggtaaattggggtattgccctgcattttgattttgcctatttgtttgacaatttccatgcgtttttctaaaagttctaaaattttatcatcaattttgttgatttcttcgcgaaattgttgcagtttcatcaaaaatctcccattaaatctttttctaatgcaattaaatcttcaaaagtttctctttttctaatgagttttattttgccttgtgagatagctacttcagcacatcttggacgcgtattataattgcttgacatactaaatccataagcaccgctgcttaagatagccaaaatatcaccttctttaagtggaggaagctctatgtttttgcctaagtaatctccactctcacaaattggacctacgatatctgcaggacttttttcaccttgtgattgggttaggggaataatttggtggtaggcattataaagactagggcgtattaagtcattcatggcaccatcaacgatgacaaaacgcttattttgagaaattttttcataaaggactttgactaaaaaaacaccggcattcccgataataaatctaccgggctcacagatgatagtcaaatctaagcctctaagacattctaagatgctttgtgcataatcatagggattgatagtggtttcatcactataagtaatgcctaatcctcccccaatatcaaaaaatttaatatcaatttttaaagccaaaaggctatgcacaagtttagcaattttttgtgctgattcataaatgggttggagtttggtaagctgacttccaatgtgaaaatggattcctattggttctaaaaattcagatttatgggcgtgtaaatacaggctttttgcttcttggatttcaataccaaacttattttcttttaagccagtagaaatgtaagggtgtgtttgtgggtcaatatctggattaacgcgtatagagattcttgcctttgtatttaagctttttgcgatagattcgactttaaaaagctctgctttgctttcgatattgataaagagaatcccaagtttgatagcttctttgatttcttcttcttgtttgcctacgccactataaatgattttataaggcgggattcctgctaaaattgcacgcttaatttctcccaaagagacacaatctgcaccgctttctaaagaagcaagttttttgacaacgcttaagttggaattagcctttagcgcgtaacaaataagtgtttttctgccactaaatgcacttttgaattgatggtaatattcttcaattttgtcaaaatcgtaagcaaaaataggggtttggtattctttggctatctgcaataggatatttttatcaaagtttccttgaagggttggaatattgggtgtcaagatatttttcataatactcacttttggtagaaatttttaggaattgtaataaaaaaaatcttaaattaggacatttttgctcttttgctaatggataataccatacctactaaaatgcttgaggcaagtatagagcttcctccatagcttagaaatgggacggcaattcctttaatgggaattaagccagaaatcccaaaggcattgattaaaaatgaaaagcccaaaataattcccgctccagaacaaaaaagataatacattgtattttggcagcggttggcaatttttaggattctaaaaatcattgccataaacaaaaggcttatgcaaaataaaccaataaatcctatttcttcggtaattcccgctagaatcacatctgtatgcacttcgcttaaaaatccaagtttgattaaaccattccctaaaccttccccaaagattccgccatttgaaatagcattaagggaatgttggatttgataaggttcagggagattttcaatgcgtaaagaattggcaatagattgtggaaaaaaggaaagtatcatatcttgtgttccagcccaccatgctttaatgcgtgttattcggtgcgcactcgtgataataacagaaataaacaaaacaaaagcaatagctaaaagatttacaaaaagcttaaaagaagagccagcaaaaatcatcattaatgctaaagtggctccaagtaagacaatttgtcccaaatcgttttgtaaaatggcaattaaataaactgcaattaaaaatacaaaagcatagggcaaaaaggtaatgaattcttcttttagggatttagtttcaattagagagaatttgcgagagaaactccaagccaaaaatacaataaaacctattttgaaaaattccacaggtgctaatgagaaaaagggtaatcgaatccagcgtttcgcacctccagcacttgttgcgagactttctggtaagaaatgcataataaacataatcacaattccaccaaaaaatagaaaaaatccaagtttcaaaataaaatcatcggggttgcatcttgagattccccacatgagtaaaatacctaatattccggcaatgagctgccttaacataaaatgaaattcattgtaatcataatagagaatagcaaaagaagaaagagaataagaaaagataatgctaattgtaatgaggctagcacttaataaaaataaaggtttatcgaccattgagaatttttccgataatatcgactttattagaactcattaggtgaatttttgcttgaatcttgcatagattttcaaaaagcctttgactcttttctaatcctatttctaactcagtgttgttgtgggaggctttttccatagtttctagccaagattgcgggataaaaactcccggaagtttattgtgtaaaaaaagagcggttttgtaagaagtgataggaaaaaagccaaaaatcaaagtgcagtttgtagaagattcttgattgattttatcgcaccattgtaataattcttgtgcaatgtccaaatcataaataggctgcgtgataatcgcagaagcaccattttgaatcttttcttgcatttttttataaagattttcttttttattagagtaggaatttaaaacactaaaagcataaaaaggtttaaaatcgccttgtatggggtgattgttgatatcttttgcttgatttaattgttgaataattttgagcaataaaagactatttccttcaaaaacgccttttgcttgtggttgattgccatgccttattggatcgcctgtgagcgccaaaataagtcgtaaatcaagactattcattccaataagttcgctttgaatggcaagagtgtttctatcacgcatagagattgtagtgatacttgggagattaaaagtattttgtagtttaaggcttgctaaaattgaattgtgtttgagtttggcaaggggtgaatcggtgcagataaaagcgtgaatttttgaaacaagattttcttgctgtaatgcatcaaaaaaagtatctaaagaaaagctaggcggtgcagaaaattcatatgtgaaacatttttcattgctttttaggatttgtataaaattttcaattttattcatcttgtgtgattttcgcccttatttttgcttataattatagcatattcatatttttttggtattaaattttgctataatcttaggagtttttagagattattttaggtaggtagatatgtttgggattggtaacaagcctagtgttttaggtgggacaatgattattgcagggacagcaattggagctggtatgcttgctttgccaacaatttcagctggtatgtggatttggtggtcattggcacttatggtgcttacttggctgatgatgttgttttcttcacaagcaattttggaagtaaatcttaattataagcccggtgcgagtttccatacccttgtgcgtgataatttgggtaaattttggaatcttgtgaatggattgagtgtagcttttgtgctgtatattttgctttatgcttatgttagcggcggtggctctatggtggtgcataccttcaatgctgtttttggctatgagccgccaaagattctatcaggattgctatttgctttgtttttgagtggttgtgtttggtggagcacttatttggtggatagattttcagtgattatgattgggggaatggtcataacttttgtttttgctatgagtggaatgctaggggagataaagagtgcttttatttttgatgtgcaaaatgatgggagtagttatggaatctttgtgtttgtggcactttcgacttatcttacttccttttgttttcatgcttctgtcccaagtttggtaaaatattttggtaaagatcccttgtcaattaataaatgccttgtgtatgggacattgattgcgctttttgcgtatattgtatggattgttgcttgtgatggcaatattatgcgtagtgattttaaatctgttattgcagcaggtggtaatgtgagcgacttgatagaggcagcaagtagtaatttaaatggttcttttttattaagaatgttggacgcatttgcttttttggcagtagctacttcatttttgggagctggacttggattgtttgattatatggcagatttatgtggttttgatgatagcaggcttggacgcaccaaaacaatgcttgtaacttttgcaccacctattgtagcgggaatgatttaccctgatggatttttattggctattgggtgggctggacttgctgctacaatatggtctgttattattcctgcattgttgcttagggctgctcgtcaaagaaatgataaacaagtgcaaaattatcgagtatggggaggtaattttacaatttatgggcttttagtctttggttgtgtagtgggaatatgccatattttatttgtatttgaacttttgccgatgtatcaataatgctaaaagaaatattacagatttttcaatatattcaaaaattccataaggataattttgaggctttgaaaattacattggagtttttgctagtaggtagagacaaaaatcatctcaaagagattttggctaaagataaagagcaaatagatgagagaatacaatctcatcttttgaactatgggctaaaagcgactagaattgaagccaaaatgaatcgcaaaaagattttaagagctttattggaaattgaagtttcaattgaagaagttgagagatttattcaagccattacactccataaaacaattttgaaactttatgattatgctacgcctatggaggttaataggcttgttgctttgcttttggatttgaaaaatggggagagtgtatataatccttgttgcggtcttgggagctggctttttagtctaaagggtagaaattttcaatattatggggaggatattcatagcaaattaattgatattgctaggatattggctgtttttatggggtttaaaaatgttcatttagaagtggctgatatttttaaagattctgcttttggtaaattagaagcaaataaagctttttgttattttcccatagaggcaaatttgaatctttggggatttagagatgaagcactagaaccttttattaagagtttttcagaagtaccttttttggcttataccctaaagcactttcatcaaaaagctgtttttattgttcgttctttattgttgtataaggcttgtggagagcgtttgcggaagtatcttataaaacaaaaattgctagaggcaattatagaatttcctagaaatatttttcctcatcagatggaagatttttctttgcttattttgtccaaacaagaaaacaaaaaagtcctttttattaatgcgcagaatctttttgtcaaagaaggcaaatataataaattaattgatatagaaatgatttgtgatttgtattttagtaagcaaaatacagatatttctaggcttgtggcatatgaaaatatctatttagaaaactttaaaacctcttattatatcaaagggcaaaatgataaaaaaacattgaatcttacggagtttgtggaatgtatttatagaggacagagggttgaggtgaaaaaagatgaggttttgattgattgctataatgcgggaattaaagattttttggaatatggtttgagtgaagaatttgatgaattttctccaaaatccaatcaaaaacgaattgaacaattaaaaatcaagccctatgatattttgctctccatgcgtggaatctctccaaaagttgcaattataggggaggggataggggataaaaatattttgcctaatgcagggattttggtgttacgccccaaaaataaagagattgcaaaatctttgtatgtgtattttctctccaaagagggatttttggcattgagcaagatttatcaggacaatcaagaaagaataggggagagagaaattgcgaattttttgcttccccaaaattttttggagtatcaagaaaaatttaataaattattgttagaaggggagcagattagaaaacataggcagatgattagggagttattgggattttgaggaagctaaatatagcatcagtttgtgcaacttgactaaatgttggaaagcaagatagccaaaggctaaataaagctaaattagctacttttagcctatgcttctcttgctaatccatattcatgcaaccatattcatttcccattttgcaagctttacggaaatattcttgggcttttttatagtccctttttacacctacaccacttcggtaggagtagcctacctccaaacatgcagaagccctaccagcctcacaagcttctttttcgtaattaaaatattcaacttttcgtgcccattcagcttcagcttgagacttagcattgccatcgtataaataaatattagattgttgggctattgctagtcctgataaacataaaattaaaaatacactttttttcattgttttttccttattcaagattttctttgtagctataatatagctttttttctttgacttctagcaagttttcttttgtatcttcattgataaatttgatgagaaaggctttttcttcttgtgttaagttacaagaaaaggcacaattatgaagaatctgctctccattaattatctgcgtttcttgggtaatgattttaacccttggatcgttattagagaatttaatctcataatgattgggtgtgctaaagtaaaatcctttctcccttccttctttcacaatctttttcttcattttattcctttgttttaaaatgaccttgttattatgcccccccccccccctgaatatttgcttaatttcaacaaatactaaagaaatggaaaaatatgaataaaaatgatggtttatagaaagtgatttttgaattttgggttagaaaaggtttaactaaagattttggctaataaaagtaattttaaaataagaatcttaaaaaaagtttataaaatacagaaatcccacaaagagcccaaaagactctttatggattaaagaagcataccagcaattaaagtcccgatataagcgacaatgtaggcaacaaaagttgtcatcaagaaaagatatacgatatatttaaaccctccagcttctttgccaaatacgacagtggcagcaagacaaggattgtaaatcataataaacaaaatatagccgatagctactttcaaaggaatggtgtttttgatagtttccattaatgccgagcttgtttcatcgacttcaccaccaagtgaatataaaactcccattgtggatatgacgacttccttagcagcaagtccgctaactaatgccacactcattttccagtcaaaaccaagtggagcgaaaagtggctctatgaattgtccggttttgccaaggtagctattttctattaattgctcttgaagttcaaattctaagctttctttggcttcttgtgtggtggcggattctattttttgtgcataagattcttgtaaatctttttggagtggaaaagtgcttgcaaaccaaatgagaattgttgcagccaagataaaagtccctgcttttttgagatacatttttgcttttgtatagatagaaaaccatacaagattccaatttggaatacgatattttggcatttccattacaaagggttcatcagcacctctaaaaacgcttatgcgtaaaatttttgccataataagtcccaaaatagcacccaatatataaataccaaaaagccaatttcctgcttgttctgcaggaaaaaacgcaccaacaaaaagcacatatacaggcaatctagcaccacaactcataaaattaataataaaaagtgttaataatctatctttgcgacttcttagggttcttgtcgccataaatgcaggcacagagcaaccaaatcctgtaacaagcggaataaagcttttgccatgtaagccaaatttgtgaaaaaagccatcaagcaagaatgccacgcgagacatatagccggtagtttctaaaagtgcaataccaaaaaacaaaataataatattaggcaaaaacaaaataactgcacctacaccaccgatgattccatctgctaagagcgaggcaatgagctcattagagacattggctttgattccatccccgataaaagcaaaaaactcttcaatataccccattggaatatcgccgagcgtaaaagtaagctgaaagagaagccacataaggaataaaaagatagggattcctgcgtatttgttgataaggattttatctatggtttgtgtgtggtttcttttttcgttttcataacgcaatgtttcggtggttagaccatttacaaaggcatttaaatcttctaagaaaatatcttcactagattttgtattatagatgatatagaggttgtttagggattcttgcaaaatgggtgagagttccatccaaatgggcttttcgtgcaagaaactaaatagcttttcatcttgcttaagtagcaaaatagcaatattgcggtaagggaggttgagggattgtagatttctgtcatttttggatttcaagaaatcttcaagttttagtatttctgtttcgatttcattgctataaattcgtttgtttggaagtagattttgtttgtgtgtttgtataactaaatctagtaattcattgaggttttgtttggtttttgctgaaatttgaatacaaggaatgccaatgagatttttgagttctttttggttgatatgcaccccttcattttcggcttcatcactcatattgagagctaagattatttttttgggtaattccaaaagttgcgcactaagaagtagattgcgttctaaattagtagaatccgccacattgataataatatcatactcatcactttcaatgaagttttttgtgattttttcttcttctgaatatccatacaaagaataagtccccggaagatctatgatttgaaattcgtaacctttataaattgtttttgcttgtgccttttctatggtcactcctgtgaagtttcctactttcatattggagtggcaaagtgcattgacaagcaaacttttgccgacatttggctgtcccacaagtgcaattttgataattttttccattattgtttctccacttcaattgcttttgcttcttctgttcttaagattatgcaacttctatctaattctacgaggattgtagaacctcccaaagaagtttctagttttttaatcggcttggattttgcaattccaaagctaaaaaatctatcttttaattgtttatccacttttaaactcttgatgattgcagattctccatcttttaagtcattaatggtcataaaaatccttttatgaattattttatctagtattgtaagattagtatgcttgaaataatattaaaatttattatcatttataaaataatgattctatgatactttttggatatttaggcaatattctttgtatttttaagtataataaatcaaaaataaaaaaggattatttaaattatgaagattctaggctttgatattgggattgcctcaattggctgggcgtttgtagaaaatggggaattaaaagattgtggggtgcggatatttaccaaagcagaaaatcccaaaacaggagattctcttgccatgccacgcagggaagcacgaagtgtgcgacggcgacttgcgcggcgtaagggtaggttagagacgctaaagcggcttttagcaaaagaatgggatttgtgctatgaggattatatcgccgctgatggtgagctacccaaagcttttatgggcaaaaatcttaccaatccctatgtgctacgatatgaagcattgcagaggcttctaggcaaagaggagcttgtgcgtgtggttttgcacatcgctaaacatcgtggctatgggaataagaatgccaaaatcacaaagagtgaggagagtaaaagagagcagggtaagattctaagtgcattagctacaaatgcgagcgcaatcgcacgctatcgcacggtaggcgagtatttttataaagaattttacgaagtgattaagaaaccacaaggtctaaacacaaatgagcattgcacacaacccaaagtgcgagtgttaaagcccatacgcaataaaggtggagaatatacaaattgcattttacaagaggatttgcaaagggaattgcggtgcatttttgagcatcaaaagggctttggattccccatcacacaagagtttcaagacaagattctaaaaatcgccttttaccagcgctctttaaaggatttttcgcaccttgtgggaaaatgtacattttatcctgatgaatttcgtgcgccaaaatgctctcttagtgccgtggagtttatcacacttagcaaaaccatcaatgtgctaacctatataagtaaagaaagtggggaagtgtatagcaaagggcaatatgagcaaatgttagattctgtgtttaaggctgtgtgtgaaaaggggagcttgagctttgcgcaattacgcaagattttgcatattgatgagagaatccgctttaaagaagtagattatatggctagaaaatccaaaaacacaagtggagattctacacacaaacaaaagacctcaaattctgaaactaaaaaattcatagagcataagaatctcaaaaaattctgtgagattctaagtgagatagcaggtgatagggcattggcagattctatcgcacgagatatgacgcttgtcaaagatgaagagaagctagcacaaaagctgcgtggatatggcaaatttagccaagagcaaatcatgcaattaagtgcgttagactttagtcatcatatcaatctaagccttaaggcattaagtgagattttgccatttatgcgagagggaatgcggtatgatgaggcgtgcaaattagcagggctaaaggcgcggcacaatgacaaaaagagcaagtttttgccacccttttgtgagagtatctatgctgatgagctaacaaatccggtggtgcatagggcgatagcggagtatcgtaagattcttaatgctttgattgcaaaatatggaagtgtgcataagattcacattgagcttacgcgagatgtgggaaaaaacttccaagagagagaaaaatacaaaaaagagatagagagcaactataaagcaagggtgcaggctatgcaagagtgcgagaagctgggattgacactaagtgaggggaatatcctgaaattgcggctttttatggagcagaatggaatatgtgtatatagcgggaggaaaatcactttagcaaatctcaaggagcaaggggcgttagaaatcgaccatattttgccttattcgcgaagtagtgatgatagctatatgaataaagtgctggtttttacaaatgagaatcaaaacaagggcaataaaacaccctatgaggcatttgggggagattctcaaaaatggggagagatagaatctctagcccttaggagtggctatccaaagaaaaaggcaaagcggattttggacaaaggctttggagatagagaggctggatttaaaagtcgtaatatcgtggattctggctatatcgcgcgtttgattgctaactatactaaagagtatttgaaatttttgccgctagattctcatgaaaacacagcacttattgcaggagagaaagacagtaagattcatgtggaagcagtgaaaggtatgctaactgcgactatgcggcatttttggggattgggtagcaaaaaccgctatgagcatacccaccacgctatcgatgcgattatcatcgcttatatcaatgcggcgatgatacagagattctcacaatttagacaaaaccaagaaagcttaaaggcaagattctatgctaaagagttagcaaaagaggagtttaagacacaaagggcgttttttgagccttttagcggctttagggagcaggtgctagcaaaagtggggcaaatctttgtctcacgcccaccaaggaagcgcgcaagaggggcattgcatgaggaaacattttattcaatagatgataaaaaattatccgagacttatggtggtaaggaaggggtgcagagggcattgagcttaggcaaaatacgacagattgggacaaaaatcgtggcaaatggacctatggtgcgtgtggatatttttaagcacaaaaaaaacgggagattctatgctgtgcctatttatacaatggattttgcccttggaatcttgcctaataaggcggtagtgagtggaaaagatacaaaaagcaaagtgattaaagattggctagagatggattcttgctatgagttttgtttttcgctctttaaagatgatttgatagaggtgcagaaaaaagatatggaaaagccagaattggcgtattttgtgtctttagatgcatcagatgggaggattaaggttagacatcattgcaatgatattacgaagattaatgagaatcaaaagaagctttttagcgaaaccatagaaaaagaggtggtgggtaggggaagcattcaaaatctcaaagtctttaaaaaatacaaggtttcgccgctaggggagataaaagaggcaaaatatgagccaaggcagcctatcgccctcaagacttctcctaagaaacatcggaaacaaaataatgcacaatgaaagataataaggatatacaatgggctatgatgaggcatttaaaaatgtcatcatatcaagtagagcaaaacttagcctgcaagataatcatttggtaatagcaggaaatgatgaggtggcaaaactctatatcaaggatttgcattgtgtggtgctagaaagccctcaaatcacgattacccaagcacttttgagtgcattagcagaatctaaagtgctggtgcttacctgtgataggacacatgctatcaatggagttttcacaccatttttggggcattttgccaatgcacaagtggcaagagagcaaatcgctgtgagtgtggaatctaaggctagactttggcagcaaatcgtgcaaaataaaatacataatcaagcctctgtgctgcaatcttgtggctatatcacagaagcagcggagttggcgagaatgtgtgaaaaagtagaggcagatgatgctagtaatgttgaggcgaaggcggcagcattgtattttaagacgctttttgggatagggttttcacgcaaagccaaacacaagattcacaatgccttgcttgattatggctatgctatcgtgcggagctgtgtaatccgtagtgtgtgtatgagtgggctactcacttggagcgggataaagcatagcaatcagtttaatcaattcaatctctgtgatgatattatcgaggtgtttcgtccttttgtggatagatgtgtgcttgggcttttggaatctagggggctagattctcttgatgaggatttggagtgtatgagtaagcaggataaaaaggctttgattgagaatctgcaaagtgaggcaaaggtgggagagcagagtttcccactaagtcgagcgattaatcattatgtgcagcggtttaaaaatgctttgttgtatgggcaaccattggtggtggtttgtatggagtagggtatggtggaggataagtttatgcgggtgctggtgatgtttgacttgcctactaagactaagaaagataggcagacaggcacgaagtttcgtaataatcttattaagcttggcttttttatgatgcaatttagcgtgtatatgcgaatctgtaagggtagtgcatctgcaaaagccgctatcaataatgtgaggaagtttgtcccgccaagggggagtatccgctgtcttattatcacagagaagcagtttgattctatggagattttgctaggtggggtgggattcaatgagatgatgaatgagccaagaaatctcgtgctttttgggtttgatgagaaaaagggagagtatgtgtatgtggataatgataaagatagcgatgaagagaagttgttgcaaacaaaatcaaagaaaacaagaaatatacaaggaagtttatttgagttttgaagatagaatggtgtgctacttaggataatatgtgtagaatagtaacaatatagggaatataaaaaacaataaaatgtgaaaagtattatgtaatataaagtaaaaaagtcttggcaaaaagggatttttggaggtttttaatctcacaccctgcacctttactcctagtattgccaagaaatactaggtaggtttattttagtccctttttaaatcttcttttgctattgtagcataaaatcccaattttttggtctattttagcatagaaagatttaaaaagggactaaaaccaacgaataaagtttttcaagccaattctgattttagcatagaaagatttaaaaagggactaaaaccaggaagttttaacacaagaactttttgcaattttagcatagaaagatttaaaaagggactaaaacaagaggaagaatttttagctggacttagagattttagcatagaaagatttaaaaagggactaaaactttttcattacaaatcctttctttgaattaattttagcatagaaagatttaaaaagggactaaaacacaattggacgaacgattcatatcaattctattttagcatagaaagatttaaaaagggactaaaacaataaacctcctattttgaaataatcatacgattttagcatagaaagatttaaaaagggactaaaacttatactcaaggcattgagcgtgaatttttattttagcatagaaagatttaaaaagggactaaaacaatctttgataacgctccaaatttgaatgaattttagcatagaaagatttaaaaagggactaaaacgtaaaacttcctgacttatctactacattaattttagcatagaaagatttaaaaagggactaaaaccaagaagttttaacgcaagagctttttgcaattttagcatagaaagatttaaaaagggactaaaacgtaactcccccttcttttactgttataacgattttagcatagaaagatttaaaaagggactaaaaccttgtcttatatccgctcgctgacacaaaaattttagcatagaaagatttaaaaagggactaaaactcggatagataccaggaatatcgctatcaattttagcatagaaagatttaaaaagggactaaaacagtgaccgatatcaggaatatcgctatcatattttagcatagaaagatttaaaaagggactaaaacagattccgcattggtttaaaaaactttattattttagcatagaaagatttaaaaagggactaaaactggacatcaacaattcccattttccaggaaattttagcatagaaagatttaaaaagggactaaaaccataaacgctatcttggtcgctttctcaaaattttagcatagaaagatttaaaaagggactaaaacatttctagagatgattatgagaaaatgttaattttagcatagaaagatctaaaaagggactaaaacgaagaattagatgatgctaaaaagttatttattttagcatagaaagatttaaaaagggactaaaacttctagtgttgaaaatattgatgatgaaacattttagcatagaaagatttaaaagaaccgaagcttcaaaccattactttattgtttttgatataatttaggttttttaaaatattttaaatgatgtagtttttgattactataagataggtttgctatatttatattttggatttgtgcgataagctaatgtgtggtgaaaaattaagagttttagattgtcttatcttttggggtttttcgtaatttagactaaaaaatcaaggataacacactacaagattcaaacaaatattttaagaattgaagggaaaatcatggtatatactactttttaccaaagtcctattggcacgatacttttagcaagtaaagataataagcttataggttcttggatagaagggcagaaatattatttaggaaatcttagggaatctacacaagaaaaagacgatgaacctatcttattgcaaactaaaatatggttagacaggtattttaatggagaacagcctcatacttttgaattagacttggcacctaatggaagtgtgtttgctacaaatgtgtggaatatactacgtcaaattccttatggagaagttatcacatatggagatatagcaaaaaaagtagcacaaatagcacacaaagatacaatgtcagcccaagctgttggtggggcagtggggcataatcctatttctattattatcccttgtcatagggttgtaggcacaaatgggagtatgacgggttatgcaggaggaatagagaaaaaaatacagttattgcaacacgaaggcgtgaatcttaaatccttgcaaatcaaaagataaactattttacatagtttttgagaatttataaatgtttggcgagtaaaatcagactttgggctaatttaaaataataattttaagatatttgggtattattttagagataaaatttgcaaataaaaagataaatttatgcaataaggcattgtgtaggattgcaagatatataaagctttagttttgatagaaaaaggctgtattgattttgtaaatgcggaagattttgtggtgcaggatttaagaagtaaaggataaaagaaatttagaggggatttgaaggttgaaagaaattgctttggaaaatgtttgagtttcttggtgtatttgcaagaaagattgaaatctaaaaatatattcaagagggcttaaaaggaggaaaaatggaagttgtgagtataaatatacctattgctgtgatgtttattgcttattctgcattaatgctatttattggtttttatttttataggcaaaataaaagcactgaggattatttccttggtggtcgctctatgggtcctgtggtttctgccttaagtgctggagcttcggatatgagtgggtggctacttatgggtttgcccggggcgttgtatgtgagtgggtttgtggatagttatattgctataggattgacaattggggcgagtttgaattggatttttgtcgctaagaggcttagaatctacacaagcgtggtgtcaaattcgctaactattccagattattttgagacgcgatttagtgatgataaacatattttgcgtgtggtttgtgccgcagttattctcattttctttaccttttatgtttcatctgggcttgtgagtggggcgaaactttttgaggaagtttttggcataaggtatgattatgcccttactactgggacttttatcattgtggcttacacctttttgggtggatataaggcggtttgttggacggatatgattcaaggcttgttgatgatattggcacttgtggtggtgccaattgtgatgtttttgcagcttgggagttttaaggaggtggcttcttatattgcacattctgatgaatctagcaaaaaaatcgttcaaattcaaaatgatattccaaatattttaaaaaatatcaaaagcgtagaatctcaaacaaagatacaagtgctaattgaaagccttaatgaaacacaagatagaactattagctctgctaaacttgatgaaaagctcaaaacagattcgcagattcaagcattttttaacaatgatttaagtacagtaatattttcaagggatttggcaaaaaggcttagtgaggctttggggactaatgactttgttgggcttgaaaatcttcttgctgcttggcaacacattccttttgtggcaaaggatcgtttaagttggcttagtggtgtttcacttgtggggattatctcggcacttgcgtgggggcttggatattttgggtagcctcatattttgatgtgttttatgtccattcgctccactaaagacattccaacagtacaccgcttaaactcgccaaagaaaagctaggagataaatatgtcttgcaagggaatttagagccttgtagaatctatgatgaagattctatgcttaggggtgctaaagagattttggacttgatggagggggaaagacatatttttaatttagggcatggaatgcttcctgatttgccacgagaaaattctatcaaacttgtagagtttatccacaactaccgcaaataaataatctaaatggcgttttagaatagctctaaaatagccattatggcttctttaactgctttatttaaaataaaattgtttttgattgttgttaccattttgcaatattaaaaagagttttagtaaaaaaatatttatcttcagcaaagtttttattattttttcattataatgccttaagttttaagtttttaaaggagtttttataatggataaaacaattcaacaatctttgatgttagcagaggatttacaaaataaaatccaagcccatatctcacaaagtgaaaaagaatttcacgcaaaaatgcaaaaattgcttaacaatcccaaaaacaaagtgatgttaattgagctgttagaccgctcgtttcgctgcaaggatagggcagcttcttttgagcttatcgaacacactttaaagaaatttggtattgcagatttcttctctgcatttgagaaatttttgcttttttgctttttaaatctcggtagatttgccccaaaacttagtgtgccattttttgtttctcaccttagaaaagatacaagtgctatggtgctagatgctaatgagggctttttaaaacctcatatagaaaaaagaaaatcagaagataatatcacactcaatgtaaatctcatcggcgaggaggttttgggcgaggcagagagtgcttataggataaaaaaatacgaagaggctttgaaatcagattatatcacttatatttctatcaaaatcaccactattttttcacagataaatatcatagattttgaatactctaaagatgaagttgtcaaaagactagattatctctatgccatagcccaagaggaggagaaaaggcagggagtggagaagttcatcaacttagatatggaggaatttagagatttagaactcacagtagatgcctttatggagagtgtatcaaaatttgacataaaagcaggaatcgtgcttcaagcctatatcccagattcttatgaataccttaaaaaactctttgccttctccaaacaaagggtgctagagggcaaaaagcctattaagattcgctttgttaagggtgcgaatatggagagtgaggagactatcgcaagccaaagaggctgggagcttcctactttttataaaaaaatagacaccgattcaaattataataaaatgcttgattttatcttgcaagaggataattataaatacataaacatcgggattgcaagccataatatctttgaaatcgcctatgcttacacaagaattaaaaatgccaatgcgcttgagagctttacctttgaaatgcttgagggtatgagtttgcaatgctcctatgaactctccaaaatccacaatcttatcctctatgccccagtgtgtgatgaagcacatttcaacaacgccatagcctatcttgtccgaagacttgatgaaaacacaagcgaagataattttatgcgttatttctttaatctaaaagttggcgataagaattgggaagcccaaaaagagcttttcttgaagtctttagaaggtatccaaagcctagataactccacacatagaatccaagatagaaataaagagccaaaggcgcaaagtgcttatgaaactaagaaatttgtcaatgaaagcgatacagactttatcctaccacaaaacagagagtgggcaaagaaaatcaaagcaaaatacgagaatctaagcggctatgatgtgtatcctgtggcacaagagattataaaaaatgagaatcttcaatttgtagaagtcaaagacaaaatacaaggtcgtatgataggaaaagcctatctagccggagaaaaagaaatcaaacacgctttagaagtagccaaaaactctaaattcaaagaaaaaagctttgaggaaatccacaagattctagccaaagccgcacaactaatgcgtgagagaagaggggatttgatagggattgcagcactagaagtgggcaagactttcttagagattgaccctgaagtgagcgaggggattgactttacagagttttatccacattccttacaagtgctaagagagcaaaatcctaagacttctttcacacccaaaggcataggcgtaaccatagctccttggaatttccctgtggggatttcggtaggcacgattgtcgctccgcttgctgctggaaatgtcgtaatttacaaaccctcctcgctttctatattaacaggctatatgatttgtgagattctctgggaagcaggaatcccaaaagacaccctaatcttcctcccctccaaaggcagcgatgtctctaaatacctcttaagcgatgaggcggtgaaattctctatcttaacaggtggagaggaaacagcttataaaatgctagaatctaaccccaccttgcttttaagtgcagagacagggggcaaaaatgcgaccattgtttctaagtttgctgatagggatagtgcgattaaaaacattatccactctgccttttcaaactcaggacaaaaatgctctgccacttcactgcttgtgctagaagaagaagtgtatgaggatatggagtttaaaaagacgcttgttgatgcggctaagtctatggcagttggctctccttttagttttaaaaacaaaattgcagccctttgtgatgagatagaccccaaggtgcaaaaggcacttgatgagcttgagccttatgaagagtgggctttaaaacctcaatttatcgatggcaacacccatctaatgacaccgggtatcaaatatggcacaaagaaaggtgattttacccatatgactgagctttttgcgccaattttaagtgtgatgaaagcaaaagacttaaaagaagccattgaaatcgttaattccacaggctatggcttgacagctgggtttgagagccttgatgagagagagtgggagtatttccacacccacatagaagcaggaaatatctatattaataaacccacaaccggtgctatcgtgcttcgtcagccctttggcggggtgaaaaagtccgccattggctttggcagaaaagtggggatttttaactacatcacacaatttttagacataagccaagagagtgcggatgcaaatgcttctaaaaatggcttttctgtggcattatctaagatttctttagaagacaaaaaagagcaaaaagaactagaaaatgccataaaaatggcagaatcctatgcctatcattatgaaaatgaattttcccttgcaaaagactatgtgcatatccgcggagaggagaatttattttcctacaccaagattaaaaacctagcctttagggtttgcaaagaagatagtttgcaagatattttgggcgtgattttggctgcaaacacagcaggagtggagctactaataagctatgaggaagcaaaccttgaaaaaatcaaagaaatctgccaaaagacaaatttaaaagctagattcttgcaagaaagccaagaatccttcctccaaaaaatcccaagctatgagagaatccgctaccacgcaaaagccgcaatgcaagatagaatctacaaagaagccgctaaagaagcaaagattatcatcagagacaagccgcttttaaatggtcgctttgagcttttattttaccataatgaaaagtctttgagtatctcataccatcgttatgggaatcttggcattcgtgctttgaaaaatcaatattaggagagaattatggaagttgtaaatattaatacccccattgcgataaccttcatcgcttattctgtgttaatgctatttatcggtttttatttttataaacaaaacaaaagcaccgaggattatttcctaggtggtcgctctatgggtccggtggtttcagcactctctgctggggcttcggatatgagcgggtggcttttgatgggcttgcccggggctttgtatgtgagtgggtttgtggatagttatatcgccatagggctaaccattggggcgagtttgaattggatttttgtctctaaaagacttagaatctacacaagtgtggtggcaaactcccttaccattccagattattttgagacgcgatttagtgatgataaacatattttaagagtggtttgtgcgattgttattttgattttctttaccttttatgtttcatcagggcttgtaagtggagcaaaactctttgaagagacctttgggattaggtatgattatgcccttactactgggactttgattatcgtggcttatacattctttggtgggtataaggcggtgtgctggacagatatgattcaaggcttgttgatgattttagcacttgtaaccgtgccaattgtaatgtttttacacattggtgggatagatgaagtctcaaaatatatcaaatcttcagaccaatcaagcaaaaaaatcgtagagattcaaaatgagattcctaatattttgtcaaatatcacaagt

SEQ ID NO: 3762 - DNA, 23150 bp, synthetic construct
  misc_feature 1..23150: note = Synthetic
  source 1..23150: mol_type = other DNA
ttttctctttctgggcggtaaattggggtattgccctgcattttgattttgcctatttgtttgacaatttccatgcgtttttctaaaagttctaaaattttatcatcaattttgttgatttcttcgcgaaattgttgcagtttcatcaaaaatctcccattaaatctttttctaatgcaattaaatcttcgaaagtctctctttttctaatgagttttattttgccttgtgagatagctacttcagcacatcttggacgcgtattataattacttgacatactaaatccataagcaccgctgcttaagatagccaaaatatcaccttctttaagtggaggaagctctatgtttttgcctaagtaatctccactctcacaaattggacctacgatatctgcaggacttttttcaccttgtgattgggttagaggaataatttggtggtaggcattataaagactagggcgtattaagtcattcatggcaccatcaacgatgacaaaacgcttattttgagaaattttttcataaaggactttgattaaaaaaacaccggtatttccgataataaatctaccgggctcacagataatagtcaaatctaagcctctaagacattctaagatgctttgtgcataatcataaggattgatagtggtttcatcactataagtaatgcctaatcctcccccaatatcaaaaaatttaatatcaatttttaaagccaaaaggctatgcacaagtttggcaattttttgtgctgattcataaatgggttggagtttggtaagctgacttccaatgtgaaaatggattcctattggctctaaaaattcagatttatgggcgtgcaaataaaggctttttgcttcttggatttcaatgccaaacttattttcttttaagccagtagaaatgtaagggtgtgtttgtgggtcaatatctggattaacgcgtatagagattcttgcttttgtatttaagctttttgcaatagattcgactttaaaaagctccgctttgctttcgatattgataaagagaatcccaagcttgatagcttctttgatttcttcttcttgtttgcctacgccactataaatgattttataaggtgggattcctgctaaaattgcacgcttaatttctcccaaagagacacaatctgcaccgctttctaaagaagcaagttttttgacaacgcttaagttggaattagcctttagcgcgtaacaaatgagtgtttttctgccgctaaatgcacttttgaattgatgataatattcttcaattttgtcaaaatcgtaagcaaaaataggggtttggtattctttggctatctgcaataggatatttttatcaaagtttccttgaagggttggaatattgggtgttaagatatttttcataatactcacttttggtagaaatttttaggaattgtaataaaaaaaatcttaaattaggacatttttgctcttttgctaatggataataccatacctactaaaatgcttgaggcaagtatagagctccctccatagcttagaaatgggacggcaattcctttaataggaattaagccagaaatcccaaaggcattgattaaaaatgaaaagcccaaaataattcccgctccagaacaaaaaagataatacattgtattttggcagcggttggcaatttttaggattctaaaaatcattgccataaacaaaaggcttatgcaaaataaaccaataaatcctatttcttcggtaattcccgctagaatcacatctgtatgcacttcgcttaaaaatccgagtttgattaaaccattccctaaaccttccccaaagattccgccatttgaaatagcattaagggaatgttggatttgataaggttcagggagattttctatgcgtaaagaattagcaatagattgtggaaaaaaggaaagtatcatatcttgtgttccagcccaccatgctttaatgcgtgttattcggtgcgcacttgtgataataacagaaataaacaaaacaaaagcaatagctaaaagatttacaaaaagcttaaaagaagagccagcaaaaatcatcattaatgccaaagtggctccaagtaagacaatttgtcccaaatcgttttgtaaaatggcaattaaataaactgcaattaaaaatacaaaagcatagggcaaaaaggtaatgaattcttcttttagggatttagtttctattagagagaatttgcgagagaaactccaagccaaaaatacaataaaacctattttgaaaaattccacaggtgctaatgagaaaaaaggcaatcgaatccagcgtttcgcacctccagcacttgttgcgagactttctggcaagaaatgcataataaacataataacaattccaccaaaaaatagaaaaaatccaagtttcaaaataaaatcatcggggttgcatcttgagattccccacatgagtaaaatgcctaatattccagcaatgagctgccttaacataaaatgaaattcattgtaatcataatagagaatagcaaaagaagaaagagaataggaaaagataatgctaattgtaatgagactagcacttaataaaaataaaggtttatcgaccattgagaatttttccgataatatcgactttattagaactcattaggtgaatttttgcttgaatcttacatagattttcaaaaagcctttgactcttttctaatcctatttctaactcagtgttgttgtgggaggctttttccatagtttctagccaagattgcgggataaaaactcccggaagtttattgtgtaaaaaaagagcggttttgtaagaagtgataggaaaaaagccaaaaatcaaagtgcagtttgtagaagattcttgattgattttatcgcaccattgtaataattcttgtgcaatatccaaatcataaatgggttgtgtgataatcgcagaagccccattttgaatcttttcttgcatttttttgtaaagattttcttttttattagagtaggaatttagaacactaaaagcataaaaaggtttaaaatcgccttgtatggggtgattgttgatatcttttgcttgatttaattgttgaataattttgagtaataaaagactatttccttcaaaaacaccttttgcttgtggttgattgccatgccttattggatcgcctgtgagtgccaaaataagtcgcaaatcaagactattcatgccaataagctcactttgaatggcaagagtgtttctatcacgcatagaaattgtagcgatacttgggagattaaaagcattttgtagtttaaggcttgctaaaattgcattgtgcttgagtttggcaaggggtgaatcggtgcaaataaaagcgtgaatttttgaaacaagattttcttgctgtaatgcatcaaaaaaggtatctaaagaaaagctaggtggtgcagaaaattcatatgtgaaacatttttcattgctttttaggatttgtataaaattttcaattttattcatcttgtgtgattttcgcccttatttttgcttagaattatagcatattcatatttttttggtattaaattttgctataatcttaagagtttttagagattattttaggtaggtagatatgtttgggattggtaataagcctagtgttttaggtggtacaatgattattgcagggacagcaattggagctggtatgcttgctttgccaacaatttcagctggtatgtggatttggtggtcattggcacttatggtgcttacttggctgatgatgttgttttcttcacaagcaattttggaagtaaatcttaattataagcccggtgcgagtttccatacccttgtgcgtgataatttaggtaaattttggaatcttgtgaatggattgagtgtagcttttgtgctgtatattttgctttatgcttatgttagtggtggtggttctatggtggtgcataccttcagtgctgtttttggttatgagccgccaaagattctatcaggattgctatttgctttgtttttgagtggttgtgtttggtggagtacttatttggtggatagattttcagtgattatgattgggggaatggtcataacttttgtttttgctatgagtgggatgctaggggagataaagagtgcttttattcttgatgtgcaaaatgatgggagtagttatggaatctttgtgtttgtggcactttcgacttatctcacttccttttgttttcatgcttctgtcccaagtttggtaaaatattttggtaaagatcccttgtcaattaataaatgccttgtgtatgggacattgattgcgctttttgcgtatattatatggattgttgcttgtgatggcaatattatgcgtaatgattttaaatctgttattgcagcaggtggtaatgtgagcgacttgatagaggcggcaagtagcaatttaaatggttcttttttattaagaatgttggacgcatttgcttttttggcagtagctacttcgtttttgggagctggacttggattgtttgattatatggcagatttatgcggttttgatgatagcaggcttggacgcaccaaaacaatgcttgtaacttttgcaccacctattgtagcgggaatgatctaccctgatggatttttattggctattgggtgggctggacttgctgctacaatatggtctgttattattcctgcattgttgcttagggctgctcgtcaaagaaatgataaacaagtgcaaaattatcgagtatggggaggcaattttacaatttatgggcttttagtctttggttgtgtagtgggaatatgccatattttatttgtatttgaacttttgccgatgtatcaataatgctaaaagaaatattacagatttttcaatatattcaaaaatttcataaagataattttgaggctttgaaaattacattggagtttttgctcgtaggtagaaacaaaaatcatctcaaagagattttggctaaagataaagagcaaatagatgagagaatacaatctcatcttttgagctatggactaaaagcaactagaattgaagccaaaatgaatcgcaaaaagattttaagagctttattggaaattgaagtttcaattgaagaagttgagagatttattcaagccattacactccataaaacgattttgaaactttatgattatgctacgcctatggaggttaataggcttgttgctttgcttttggatttgaaaaatggggagagtgtgtataatccttgttgtggtcttgggagttggctttttagtctaaagggtaaaaaatttcaatattatggggaggatatccatagcaaattaattgatattgccaggatattagctgtttttatggggtttaaaaatgttcatttagaagtggctgatatttttaaagattctgcttttggtaaattagaagcaaataaagctttttgttattttcccatagaggcaaatttgaatctttggggatttagagatgaagcactagagccttttatcaagagtttttcagaagtgccttttttggcttataccctaaagcactttcatcaaaaagctgtttttattgttcgttctttgttgttgtataaggcttgtggagagcgtttgcggaagtatcttataaaacaaaaattgctagaggcaattatagaatttcctagaaatatttttcctcatcagatggaagatttttctttgcttattttgtccaaacaagaaaacaaaaaagtcctttttatcaatgcgcagaatctttttgtcaaagaaggcaaatataataaattaattgatatagaaatgatttgtgatttgtattttagtaagcaaaatacagatatttctaggcttgtggcatatgaaaatatccatttagaaaactttaaaacctcttattatatcaaagggcaaaatgataaaaaaacattgaatcttgcggagtttgtggaatgtgtttatagaggacagagggttgaggtgaaaaaagatgaggttttgattgattgctataatgcgggaattaaagattttttggaatatggtttgagtgaagaatttgatgaattttctccaaaatccaatcaaaaacgaattgaacaattaaaaatcaagccctatgatattttgctctccatgcgtggaatctctccaaaagttgcaattataggggaggggataggggataaaaatattttgcctaatgcagggattttggtgttacgccccaaaaataaagagattgcaaaatctttgtatgtgtattttctctccaaagagggatttttggcattgagtaagatttatcaggacaatcaagaaagaataggggagagagaaattgctaattttttgcttcctcaaaattttttggagtatcaagaaaaatttaataaactattgttagaaggggatcagattagaaaacataggcagatgattagggagttgttgggattttgaggaagctaaatatagcattagtttgtgcagcttgactaaatgttggaaagcaagatagccaaagggctaaatagagctaaatttagccacttttagcctatgcttctcttgctaatccatatacctacaaccattgttatctcccatttcacaagctttgcggtaatattcttgggcttttttataactcctttttacacctgtaccacctcggtaggcgttacctacattaaaacatgcagaagccctaccagcctcacaagcttctttgttgtaattaaaccagtcaacccaatctgcccatatagcttcagcttgagactgagcattgccatcgtatatataaatattagattgttgggctattgctagtcctgataaacataaaattaaaaatacactttttttcattgttttctccttattcaagattttctttgtagctataatatagctttttttctttgacttctagcaagttttcttttgtgttttcattgataaatttgatgagaaaggctttttcttcttgtgttaagttgcaagaaaaggcataatgacgaagaatctgctctccattaattatctgcgtttcttgggtaatgattttaacccttggatcgttattagagaatttaatctcataatgattgggtgtgctaaagtaaaatcctttctcccttctttctttcacaatctttttcttcattttattcctttgttttaaatgaccttgttattatgccccccccccccctgaatatttgcttaatttcaacaaatactaaagaaatggaaaaatataaataaaaatgatggtttatagaaagtgatttttgaattttgggttagaaaaggtttaactaaagattttggctaataaaagtaattttaaaataagaatcttaaaaaaaaagagtttataaaatacagaaatcccacaaagagcccaaaagactctttaatagattaaagaagcatatcagcaattaaagtcccgatataagcgacaatgtaggcaacaaaagttgtcatcaagaaaagatatacgatatatttaaaccctccagcttctttgccaaatacgacagtggcagcaagacaaggattgtaaatcataataaacaaaatatagccgatagctactttcaaaggaatggtgtttttgatagtttccattaatgccgagcttgtttcatcgacttcaccaccaagtgaatataaaactcccattgtggatatgacgacttccttagcagcaagtccgctaactaatgctacactcattttccagtcaaaaccaagtggagcgaaaagcggctctatgaattgtccggttttgccaaggtagctattttctattaattgctcttgaagttcaaattctaagctttctttggcttcttgtgtggtggcagattctattttttgtgcataagattcttgtaaatctttttggagtggaaaagtacttgcaaaccaaatgagaatcgtggcagccaagataaaagtccctgcttttttgagatacatttttgcttttgtgtagatagaaaaccatacaagattccaatttggaatacgatattttggcatttccattacaaagggttcatcagcacctctaaaaacgcttatgcgtaatatttttgccataataagtcccaaaatagcgcccaaaatataaataccaaaaagccaatttcctgcttgttctgcaggaaaaaacgcaccaacaaaaagcacatatacaggcaatctagcaccacaactcataaaattaataataaaaagtgttaataatctatctttgcgacttcttagggttcttgtcgccataaatgcaggcacagagcaaccaaatcctgtaacaagcggaataaagcttttgccatgtaagccaaatttgtgaaaaaagccatcaagcaagaatgccacgcgagacatatagccggtagtttctaaaagtgcaataccaaaaaacaaaataataatattaggcaaaaacaaaataactgcacctacaccaccgatgattccatctgctaagagcgaggcaatgagctcattagagacattggctttgattccatctccgataaaagcaaaaaattcctcaatataccccattggaatatcgccgagcgtaaaagtaagctgaaagagaagccacataaggaataaaaagatagggattcctgcgtatttgttgatgaggattttatctatggtttgtgtgtggtttctttttttgttttcataacgcaatgtttcggtggttagaccatttacaaaggcatttaaatcttctaagaaaatatcttcactagatttggtattgtagatgatatagaggttgtttagagattcttgcaaaatgggtgagagttccatccaaatgggcttttcgtgcaagaaactaaatagcttttcatcttgtttaagtagcaaaatagcaatatcgcggtaagagaggttgagggattgtagatttctgtcatttttggatttcaagaaatcttcaagttttagtatttctgtttcgatttcattgctataaattcgtttgtttggaagtagattttgtttgtgtgtttgtatgactaaatctagtaattcattgagattttgtttggtttttgctgaaatttgaatacaaggaatgccaatgagatttttgagttctttttggttgatatgcaccccttcattttcggcttcatcactcatattgagagctaagattatttttttgggtaattccaaaagttgcgcactaagaagtagattgcgttctaaattagtagaatccgctacattgataataatatcatactcatcgctttcaatgaagttttttgtgattttttcttcttctgaatatccatacaaagaataagtccccggaagatctatgatttgaaattcgtaacctttataaattgtttttgcttgtgccttttctatggtcactcctgtgaagtttcctactttcatattggagtggcaaagtgcattgacaagcaaactttttccgacatttggctgtcccacaagtgcaattttgataattttttccattattgtttctccacttcaattgcttttgcttcttctgttcttaagattatgcaacttctatctaattctacgaggattgtagagcctcccaaagaagtttctagttttttaatcggcttggattttgcaatcccaaagctaaaaaatctatcttttaattgtttatccacttctaaactcttgatgattgcagattctccatcttttaagtcattaatggtcataaaaatccttttatgaattattttatctagtattgtaagattagtatgcttgaaataatattaaaatttattatcatttataaaataattgattctatgatactttttggatatttaggtgagattctttgtatttttaagtataataaatcaaaaataaaaaaggatgatttaaattatgaagattctaggctttgatattgggattacttcgattggctgggcatttgtagaaaatggggaattgcgagattgtggggtgcggatatttaccaaagcagaaaatcccaaaacaggagattcccttgccatgccacgcagggaagcacgaagtgtgcgacggcgacttgcacgacgtaagggtaggttagagacactaaagcggcttttagcaaaagaatgggatttgtgctatgaggattatatcgccgctgatggtgagctacccaaagcttttatgggcaaaaatcttaacaatccctatgtgctacgatatgaagctttgcagaggattctaagcaaagaggagtttgcgcgtgtggttttgcacatcgctaaacatcgtggctatgggaataagaataccaaaatgacaaagagtgaagagagtaaaagagagcagggcaagattctaagtgcattagccacaaatgcgagtgcaatcgcacactatcgcacggtaggcgagtatttttataaagaattttgcgaagtgattaagaatccacaaggtctaaacacaaatgagcattgcatacaatccaaagtgcgagtgctaaagcccatacgcaataaaggtggagaatatacaaattgcattttgcaagaggatttgcaaagggaattgcggtgcatttttgagtatcaaaagggctttggattccccatcacacaagagtttcaagacaagattctaaaaatcgccttttaccagcgccctttaaaggatttttcgcaccttgtgggaaaatgcacattttatcctgatgaatttcgtgcgccaaaatgctctcttagtgccgtggagtttatcacacttagcaaaaccatcaatgtgctaacctatataagtaaagaaagtggggaagtgtatagcaaagggcaatatgagcaaatgttagattctgtgtttaatgctgtgtgtgaaaaggggagcttgagctttgtgcaattacgcaagattttgcatattgatgagagaatccgctttaaagaagtagattatatggctagaaaatccaaaaacacaagtggagattctacacacaaacaaaagacctcaaatcctgaaactaaaaaattcatagagcataagaatctaaaaaagttttgcgagattctaagtgagatagcaggggatagggcattggcagattctatcgcacgagatattacgcttatcaaagatgaagagaagctagcacaaaaactgcgtggatatggcaaatttagccaagagcaaatcacacaattaagtgcgttagactttagtcatcatatcaatctaagccttaaggcattaagcgagattttgccatttatgcgagagggaatgcggtatgatgaggcgtgcaaattagcagggctaaaggcacggcacaatgacaaaaagagcaagtttttgccacccttttgtgagagtatctatgccgatgagctaacaaatccggtggtgcatagggcgatagcggagtatcgtaagattcttaatgctttgattgcaaaatatggaagtgtgcataagattcacattgagcttacgcgagatgtgggaaaaaacttccaagagagagaaaaatacaaaaaagagatagagagcaactataaagcaagggtgcaggctatgcaagagtgcgagaagctgggattgacactaagtgaggggaatatcctgaaattgcggctttttagggagcagaatgaaatatgtgtatatagtgggagaaaaatcactttagcaaatctcaaggagcaaggagcgttagaaatcgaccatattttgccttattcgcgaagtagcgatgatagctatatgaataaagtgctggtttttacaaatgagaatcaaaacaagggcaataaaacaccctatgaggcatttgggggagattctcaaaaatggggagagatagaatctctagcccttaggagtgggtatccaaagaaaaaggcaaagcggattttggacaagggctttggagatagagaggctggatttaaaagtcgtaatatcgtggattctggctatatcgcacgtttgattgctaactatactaaagagtatttgaaatttttgccgctagattctcatgaaaacacagcacttattgcaggagagaaagacagtaagattcatgtggaggcagtgaagggaatgctaactgcgactatgcggcatttttggggattgggtagcaaaaaccgctatgagcatacccaccacgctatcgatgcgattatcattgcctatattaatgcggcgatgatacagagattctcacaatttagacaaaaccaagaaagcttaaaggcaagattctatgctaaagagttagcaaaagaggagtttaagacgcaaagggcgttttttgagccttttagcggctttagggagcaggtgctagcaaaagtggggcaaatctttgtctcacgtccaccaaggaagcgggcaagaggggcgttgcacgaggaaacattttattcaatagatgataaaaaattatccgagacttatggtggcaagaaaggagtgcagagggcattgagcttaggcaaaatacgacagattgggacaaaaatcatggcaaatggacctatggtgcgtgtggatatttttaagcacaaacaaagcgggagattctatgctgtgcctatttatacgatggattttgcccttggaatcttgcctaataaggcggtagtgagtggcaaggataacgataggattatcaaagactggctagagatggattcttgctatgagttttgtttttcgctctttaaagatgatttgatagaggtgcagaaaagagatatggaaaagccagaattggcgtattttgtgtctttggatgcatcagatgggaggattaaggttagacatcattgcaatgatattacgaagattaatgagaatcaaaagaatctttttagcgaagccatagaaaaagaggtggtgggtaggggaagcattcaaaatctcaaagtctttaaaaaatacaaggtttcgccgctaggggagataaaagaggcaaaatatgagccaaggcagcctatcgccctcaagacttctcctaagaaacatcggaagcaaaataatgcacaatgaaagataataaggagatacaatgggctatgatgaggcatttaaaaatgtcatcatatcaagtagagcaaaacttagcctgcaagataatcatttggtaatagcaggaaatgatgaggtagcaaaactctatatcaaggatttgcattgtatggtgctagaaagccctcaaatcacgattacccaagcgcttttgagtgcgttagcagaatctaaagtgctggtgcttacctgtgataggacacatgctatcaatggagttttcacgccatttttggggcattttgccaatgcacaagtggcaagagagcaaatcgctgtgagcacagaatctaaggctaggctttggcagcaaatcgtgcaaaataaaatacataatcaagcctctgtgctgcaatcttgtggctatatcacagaagcagcggagttggcgagaatgtgtgaaaaagtagaggcagatgatgctagtaatgtcgaggcaaaggcggcagcattgtattttaagacgctttttgggatagggttttcacgcaaagccaaacacaagattcacaatgccttgcttgattatggctatgctatcgtgcggagctgtgtaatccgtagtgtgtgtatgagtgggctactcacttggagcgggataaagcatagcaatcagtttaatcaatttaatctctgtgatgatattatcgaggtgtttcgtccttttgtggatagatgtgtgcttgggcttttggaatctagggggctagattctcttgatgaggatttggagtgtatgagcaagcaggataaaaaggctttgattgagaatctacaaagtgaggcaaaggtgggagagcagagtttcccactaagtcgagcgataaaccactatgtgcagcggtttaaaaatgctttgttgtatgggcaaccattggtggtggtttgtatggagtagggtatggtggaggataagtttatgcgggtgctggtgatgtttgacttgcctactaagactaagaaagataggcagacaggcacgaagtttcgtaataatcttattaagcttggcttttttatgatgcaatttagcgtgtatatgcgaatctgtaagggtagtgcatctgcaaaagccgctatcaataatgtgaggaagtttgtccctccaagggggagtatccgctgtcttattatcacagagaagcagtttgattctatggagattttgctaggtggggtgggattcaatgagatgatgaatgagccaagaaatctcgtgctttttgggtttgatgagaaaaagggagagtatgtgtatgcggataatggtaaagatagcgatgaagagaagttgttgcaatcaaaattaaagaaagcaagaaatatacaaggaagtttatttgagttttgaagatagaatggtgtgctacttaggataatatgtgtagaatagtaacaatatggggaatataaaaaacaataaaatgtgaaaagtgttatgtaatataaagtaaaaaagtcttggcaaaaagggatttttggaggtttttaatctcacaccctgcacctttactcctagtattgccaagaaatacttaggtaggtttattttagtccctttttaaatcttcttttgctattgtagcataaaatcccaattttttggtctattttagcatagaaagatttaaaaagggactaaaactcagcatgaccaaaaatcctactatttgtgattttagcatagaaagatttaaaaagggactaaaacttagcatgaccaaaaatcctactatttgtgattttagcatagaaagatttaaaaagggactaaaacctcaacaagaacattatcaaaaagagacttattttagcatagaaagatttaaaaagggactaaaacaatttcggttttattgttcccacttcttttattttagcatagaaagatttaaaaagggactaaaaccattatggctttgttgttcccacttcttttattttagcatagaaagatttaaaaagggactaaaacccggttctttagctgattattttggttttcattttagcatagaaagatttaaaaagggactaaaaccctcgtatgattatttcaaaataggaggttattttagcatagaaagatttaaaaagggactaaaactcagtatgactaaaaatcctactatttgtgattttagcatagaaagatttaaaaagggactaaaactccattgatgcacgaagtttatttctacacgattttagcatagaaagatttaaaaagggactaaaacggcgaaatgtatgttcttcctaaagatatgattttagcatagaaagatttaaaaagggactaaaacttatgttcgtctagacccattcggctatacattttagcatagaaagatttaaaaagggactaaaacgtcttatcacagctttttaattatgcttgaattttagcatagaaagatttaaaaagggactaaaaccaagcgaaatacgaaaagaccactcattcgattttagcatagaaagatttaaaaagggactaaaacttccttttttgttgcaaccaacgcttcctgattttagcatagaaagatttaaaaagggactaaaacaatagggtctttaaccataacagaataccaattttagcatagaaagatttaaaaagggactaaaacctgatgctacaactattcctgtagtattagattttagcatagaaagatttaaaaagggactaaaacctttctgttaggcctaaagcagtttatacaattttagcatagaaagatttaaaaagggactaaaaccactcaaaaaaccttttttaaaagcattttattttagcatagaaagatttaaaaagggactaaaacgaagaagatagaagcgatattagtgaaacaattttagcatagaaagatttaaaaagggactaaaacagttgcattctcatcggcagtatttatatgattttagcatagaaagatttaaaaagggactaaaacgacgcagaagattgcgacgcaggaggattcattttagcatagaaagatttaaaaagggactaaaacactgtcactcctaataaaaattggcagacgattttagcatagaaagatttaaaaagggactaaaactttgggataactgggaagattttataacagattttagcatagaaagatttaaaaagggactaaaacatataaatcactttcttgcacatttttataattttagcatagaaagatttaaaaagggactaaaactgataatctagtagctctcaaatcaacaagattttagcatagaaagatttaaaaagggactaaaacagctatcaagataaggtttatcaatgcgagattttagcatagaaagatttaaaaagggactaaaacatatcaggctgggatgtaaggtctgtgctatgcctaccttcactcctagcaaatcacttagctcataactaaggcgatttgcagggattgccccttaagcgttccccactcttatttttatgagtttatttatagtctttacctgattattcaacttgacttttgcatataaataaactataattaccacaaccaagcaaacatagcattgggctcataacctaagaggaagctgggagcttggttatctctcctagtatttttttgtcaattttgccctttccaaaatacatatttttataacttagctcattttgtttctttcgtatctgctctattaccacataaaaatcatcacttacttgtttagcactcactaatacttggttattgcttttatctaggcttttgcctttaaaatctgcattatctgagtattcttggtattttgctatttcctctaaagttacaggtttttgaccactgagcttaactaaatcactttgtaagccgtgtcgctctagcgtgtgtataatctcatcgggctgtatcgtccttcggacatcatttgggtatttgaaacctagcccctttgcgatattttcatcaagcttatttatccccactcttttattcttagctagtgcataggctaaaacatcgctattgagattctctaagccgatgagattcatctttgagccaaatttaggacttgtatcgatgagctttagcgtatcatatagctttttatcattattttttgcattcattttacgcattatagcatacttcttagccattacctgcacacccttacttcccactgcaccacctaagaatcctaatgcaaatttgctagggtcaaagcctatgatatttccattttcatccctctctacccctgcgagagttccactcacaagcccacttcctatgtgtgcattactttgatagatatttgggctagcttcgttaaagtatctatgctctgcctgtgtatctttgggcttagtgcttgtgatatttccgctagaatctgtgtaagagcctttgttgttgatgtgttttatttggttggagttaaagatagctataaaagggtgttctttattactaccatccaatatcagtgcgtcatagccctttgattgtaaaaactcttttgttttttttgtttgatatgtataacgctctaatgaaagccctaatttatccatttcctcttgaagtttgtatggatagtttggattatccccacctctaaaatcaataggatttttaacatttaaaaacacttcatagagattgtcatcaactcttttagcatattcaatatcatctacaaaccaaaagcccaaaccgctttcatcaaattcgcttttaaactcttttatatttcctgctttgctcccgtgataaaacaccttaggtaatccatctttatcttttgtgatagggcttgaatctttgtgccactctagcaaatcacttgcctttttctcatcgtatttaaatttgctttggacttttactaaagaaacttcgtctatgccttgttttgacaaaagcttagaatctatggtagaattagatttagctaaagacatattagaagccacgctagtatcaaaatccttagctaaagaatctaaggtgctatgttttttctcgtggctcttagtgcttaacttagattcaggctttgcagtgggcgttacaatgaacgaatcagttgtattcctagacactgcattgtgcttcggcaaggtcaatgattcgtgcgacttacttgccgacttttctaatccctctaattctaaagtataaatcttattacccctatatttcccttctatcgtttcttttagcgttattagtgcctctgtgttgctatccacttctgctttatacctgtgaattattattgcagggtcgttgtgttttacatctttgtgtgtttgtataaaccttgctcttgtatataactcctgtatatccttaaccgcctctatatgctctaactcactaaagccattattcacgcttttagctattgctttatcacttagcatttttgcgatattctttttacttacttgtgctatgcgtccatcgtttgcatttgttatatcttgtcctacaatcttacttaaaagctcttttgtggcttctctttgtgtgtgtatctcttgcttttctatcttgtttatcaaatgccccgcttgtgctatccgccccttttggctttgcattattttcataggctctagggctttaaggatagggtatttggcagtggtagcttcccagccttttgctagtgtgtttgctagttcttgttttagagattcttttagctgtggattatcttttatgaccttaaagccttgtgatactgctttacttcccactgcaccacctaagaatcctaatgcaaatttgctagggtcaaagcctatgatatttccattttcatccctctctacccctgcgagagttccgcttacaagcccacttcctatgtgtgcattactttgatagatatttgggcttttttcatacttctccccatattctcttataattgcttctgcttttttacgcaatttacttgtaggcgaaaagatttgtggattctttgaagttatagtttcaagcaaagccattgccttatctctaggcatttttaaagctttttcacacaaacttcttaaatccctctcccaatgttttgggtcaatggcattttgtgttttagtaacttttgctagataaaaatcattgccccccattcctaagctttcatcgaggtagttgcctatttgccctgtgtatttggtggtgtctttgtagtaggttatctcttgagtttggaagttgtggttattgactttttttgattgtagagcctcacgctcccctttagagataagctcctctagctcttgtttgcttaggtctttgtattcttttagggcatactcgatatttggattttgcaaactatgggcttgtttgctatgttgctctaaaaactcaatttgttggaatactttatacatttctcgctctggcactccaccgccttgagctcttatgattgtgtttgctatattttgggctaatacttgttttgcttgctttggttgcttggcatttgctaaaaagtccataagcttgtttttatcaagcttggctactaagattccttcctctctttctaactcatatatatcttttggaatctgttttgcaatctctgcttctttagccttgcttaaattcaaaagttctatttgtgggtcatagctcttgccctttacctcaaacccacttacttgcaactttctttgtgtatctagggtattgtttagccctccttgatattgtgctagagttgtggtagaatttgctttagagtttaaaggcagagtctcgccttttgtaattggagaagatgtatataaactttctccaccctctttttttgtataacttgtaactatccatttatttgttggcttacctttccaattatctttaatgccaactataaaattatcaaattcaatccttaatcgccccttatcatctttaactaccttgccactttctattatctttggtatagattccacaaactccttagcctttgcttttgcctctgcctcacttaatccctctttgataaaatcctgtgttctcctctctaggatatgttgcaaaccaaagtgtgaatctccccaaactacatcaatatcccctaactcctctttatagaatgcccctgctacttgaccttgtttttctcttagaatcttagctatggcatttgctccatctctgtaaaattcagcatagtttgtgccaaattcggctattgggcgtatatcaagtgcagtttgtatcttttctcttaagctttggggtaattctttgttgataccattttctaggctttttttagcatcaagtataaactccctcataatacttacattagcaggcgaactatcaagaacatctacccagtctatatggtattttctattttctgctagatactcatcgaactctttcctttttggaaatacttcacttttagataaatttgtgctagaatccacattgtcaatcttgttggcggaatattgcgaagtctgtaaaagcgtttgcgagatagaattggcgtttggagattgataaattatttttgctcccgcatttagcttattttgtaaatttctagtttcttttatcccatttgaaatacttaccaaatattccccattatcaaagcttacatttacgaaatagtcctcatttttcaaatgtttagcaagtaaaatttcctcacttggctcttttataatcaaatcaggttcatctaatacttcttttatttgcggtatgaattcctctctaccttgcgaaactagctttagcaaactgcccttttgtagtcgtatctctttgccacctagtgcttgttttatttcctcactatgctttgggatatagctttgctctaagttttctaagccaaaagtctttagccattgctcttgtgtctctttagtaagtgtgtgttctttgcctttggtgtctttaaagattgtatcttgcaagctgtttgggatttgctcctgcaagtctcgtgcatttggcgtttgtgaatctatctcttgctttttacctaccttctttatatactcattaaatgctttctctttttcttttaaagctgggagtaaatctataaccctacttgttacttcgcttgcctcacctttgctaattaataattctaagaagtcgtaaatatctgccttttcaatccctttaccctctttaaagagtgtgggcgataattcttctattaaatctgccttagcattttttagcacttcataaagtgcatttgcgggattttcttgtcttgcaaattttgccaaactagcccctagtatctctcctattagatttttgtaatactcagaatcttgttgcaaaattacattacttccattttcatcagtggtttttaaaacattctctattttctcaaccaattttttaaaattatccgctcttgtgcctcttaggctttgagaagtcgcattaatagaatcaagcaaataaggtcttaattccaagtttttaagcccattttcccctgtatcattaatgagattatggaatgctcctgcattttttacaaacatatctttgattttggtaaaattctctctattgttgttttgatagattctagttagcacacttgcaatattctctccattgctattttttgctaaatgtcctagtaatgccaaattagcttcttcctcgttaggcaaaagctcattgttttccaaagattttgcaacctttgtggagagttcatctacactttcactcccaaaatatcttggcatcatttctagttctttagcatattttcccaaactagccattaccttatcaccataagtgagattagtatttgcattactcacaaaggctaaagaaactagcttttgattttctaactcatcttttggcattctaagcagcaattcatcactttttaattccacaccaaagctttctttgatagcatcttcatacctttttcttgaagcttgattaaattgcttcattccctctactctatgatttcctgctattacttgtccatcaggggctaagataggcaaatcttcaaatcctcccctgccaattaccaaatttggtttaaattgtgtggcaatgcgttcaatcatagctggattactctgtgttcgtggttggagagcattaccattaaaattagtttttaaatcctcttgcttgactactacatatttaagttctagcacctcattattacctaatgttacgcttgtggtgggtgcttttatttctctaacttttatattatcgcccaaatccacctcacgattaaggctgctttgtccgctttctttgtctttttgctcttgaaggattctttgattttcttttatttcctctcttctagcttctctttgtagctctctttgtgcttcctcttttgcttgtatttctagccttgcttgtttttctgcctctgctcttgcaaaagggcttaaagttgctgaagaaacttcacttttagataaatttgtggtagaatccacattgtcaatcttgttggtggagtatcgcgaagcctgtaaaagcgtttgcaagtttgaactggcgtttggagattgatacaatactttagcaccactatctagcttattttttagattattgctttcttttatcccattggagatacttactgcatattcgcctttatcgatactaacatttacgaaatagtcctcatcttttaggtgtttgataaacaaaaatgaattatcgctatccctcaatatcgcttctggctcatctaatactgcttttatttgcggtatgaattcctctctgccttgtgaaactagctttagcaaactgcccttttgtagtcgtatctctttgccacctagtgcttgttttatttcctcactatgctttgggatatagctttgctctaagttttctaa

SEQ ID NO: 3763 - DNA, 23141 bp, synthetic construct
  misc_feature 1..23141: note = Synthetic
  source 1..23141: mol_type = other DNA
ggaatgtgtcaaaaaagcctctgcgcaggctttgcgcctcagcatttagcccgtgaatatcattcatcatgtgcgtgatataagtagattgcgggtgcaagtcggcatttttgcgcgcgaggattatcacaaattcgctcgcgtttttgagcgcgtcctgtccgccccaagtgggcgcaaagatcttttcgcgcaccgctttatcgcgcaggataagcagattccaaggctcaaagccaaagctagaagggctaaggcgcgcagattctaaaatcgtgcggaagtcttgctcgcttagctttttgctgccatcaaataccttgcacgcgtgacggaagtggaatgcctcgatgattttgtcgttgtctaggaatttcataagtgctccttttgtgtgaatttaaaagcgcaaaatagtagtgtatttattatttattgtcaatgcgataaaagcacaaaaagcccctatggattgcgagccttagcactcacacagaaattagattctagcgaatttgcgcgtgtgattttgcacatcacaaagcataggggctatggcaataaacacgagatgagaaaaaggaaaaagaagcggaagaaaaacaaaaagttttaaaagccttgcaagagaatcaaaaagctatgcaagcaaaaggctacaaaagcataggcgaatatctttataaagaattttaccaaacttaacactgcctagatttggaatctttaaaaattgtttattgtttttactttcaaatttaacaataaggcagatgaatttattgatgaagtattgagagaagaaagagatttacaagattctaatcaaaaatctaaaacctgcaaaaagagacgccaatgagtgaaaaagaaacaaggctatattattaaaggagattctatcatcacttgggcttttggacatattctaaaacttgcagaatatggcgattggggcaatccaaatcaaaacacaaacgagtggccaaacaccacttacgcaaaagtctttggtgtagaaaggtttgtagtggtggagggtagggagaaataacaaattcgcttttgatttgtggattgtttcactttgtttgcaataacaatgctttgcccttgattcaaagttttattagtaactctctactataatgcaagatttatttttgattttagaaggacaaaataattatgttagatagattccacaaacttaaagagtattttccgcagtgctttgacaaaaacggcgatttaatgccacacaaacttcaaaaggcgattttggatttggcgcaagaaattaacgcacaagcaaacacagcaacgcaggatttagaaaatgaagcggcgttttcactctcaaaagagtcatatagcctaaattggcttggcaagtcttatgctaaactcttgcgtcatttgcctacacacacgctgattgcgcaagatagcgcgcacaacgcacagccacaaaatgcaaattctaaaaatgtccttatcaaaggcgacaatttagaagtgctaaaacacctaaaaaacgcttattaccgcaaagtaaagatgatttatatcgacccgccttataacacgggcaatggagactttatctacaatgacgagcgaagtttcacgccgcagagtttggcgcaaatggcaaatatagagcttgaagaagcaagcagcatacttaatcttacgcttaaaaattctagcacgcatagtgcgtggcttagttttatgtatccgcgattatatatcgctaggcagcttttgcgtgatgatggcgtgatttttattagcattgacgataatgaacaggcaaatttaaaacttttatgcgatgaaatttttggggaagataattttgtggtttcaattccgcgattaacttctgcacagagacccgcacaagaaaaatatataggtgtgaatcacgattatattttatgttattctaaaaacaaatcatataattttcactctgttataaacagagattttagtaaagaagttttttgcgataatataggaaaattttttaaaaatgatacaagcccaattcttgcatcagctacacaaggatattcaaatggtggagattatgatattgaatttaatggaaaaatatttagtccaattgattcaagtggaaatcgtaggcgttggctttggacaaaagagagaatgcaaaaagctattgagttaggaataatagttgaaacaaaaaatagtttgagagttagaaattatataaataaagaatttcaagtcggaacaaataaaatggttgataaagacgaaaaattatctataacaacctttgatttaatgaaagccgattttgtcaatgataaaggaacggatgagattaaagaattatcgattcctttttcttttccaaaaccgacaaatttaataaaaacattattgcaactttcaaccacgccaaattcaaacgatattattttagacttttttgcaggaagcggaacgactgcccaagcggttatggagttaaatgcccaagataaaggcaatagagagtttcttttggtgcagttagatgaagttatcgacaaaagcaaatcaaaaacggcttatgagttttgtaaaaatgagctaggaagcgaaaatcctacgatttttgacattaccaaagagcgcataaacgcgcaagcgcaaaaatcgcgcaaaattcaaatttggatttaggatttaaaatctatgaattgcgtgaaaatgattttgactcacaaaatggtgctttgtttaaagaagttgataaaaacgcattgttagaaagttttagacttcaagactccacgcctttgagtgtagaaaatcaaacaatcgatttgggtggatacaaagcgataagggcaggggaaaagctgtatttactcaatagcggctttgaaatgaaacatttgcaaaaactaatctcgctaattgacgcgcaaaaagactttgtgataaaagagataagttatcttaatgacgcctttgaaagtgctagaatccgcgaaatagaagagggaatcaaatcttacagcaacaaaaaagggcttaaaatccttgtgcgagcgaggtttgcttaatgggatttagttatgaaagaaatttgccacaccaaagcaaggcgatagattgtgttttgttagccttaaaaggtgcgagcgtagaagcaagcttaaacaaaagttttaacccaaagataagcattaacgacttaaatttaagcgcaaatttaagagagttacaaaaacgagaaaatataaattctttgcacacgcttacaagggtgtttgatgtatgtatggagacagggactggaaaaacttacacctacactaaaatggcattagagttgtgtaaggaatttgggttgcgaaaatttatcatcatcgtcccaagcctagctataaaagccaacacgcttaactttttacaagccgttgccacaagagagcattttaaaagtgaatttgagcttgaaatcatcgctaatgcaatcgaagctaaaaaacaagctggcaaaaaaggcagaaagctaatgccaaatgggttgcgtgattttatagaaaatgacaatccaaaagaggtgcattttttaatcataaacgcccaaatgcttacggcgacttcgatgaatgaggattatgaacaaaacttgtgtgatgaatttagcaatccttatgacgcgcttaatgcggtaaatgccgtgtgcattgtagatgagccacataggtttgatgagacaaataaggcgtgggcgaggattgtgaataaaacagaaaaagccataaatccgcagatgatttttcgctatggtgcgacatttaaagaggacgggcgtggaaacaaatatcacaatcttatctaccaactcaacgccattagtgcgtttaatgacaatctagtcaaaggcgtggaaatcagtgtctgcgaagcacaaggtagcgaaaagcacaaatgggtagaatttagcggcatagaaaacaatcaagccaaatttgaactcaaagagcagggcaaaagcggagtgcttaggcaagtgagattaaatgctggtgagagtttgggcgtgatagatgagaatttagcgcatttgtgcgtggagataaaaaccgcaaaatcaaaagcaatcacaaaatttaaactcaataatcaagacgataacaacgagctaaaaaagggcgataggattaacctaaatgcgtatttgccacaaatgcaaacgcaaatgctacaaactgcgcttaaaaagcactttgagctagaaaaaaggctaatgcaaagtcaaacgaaaatcaaacccttaacgctgtttttcatcgaggatattgaaagttaccgcagtgatgacgctacaagggagtttttacgaatcgagtttgaaaaaatcgccgagaatttaatgcgtgagaatttaaaagaggcgagtgggttttataaggagtatttagaaaagtcattgcgtgatttgcgaggcattagcggcgggtatttttccaaagataactcaaataaagaagagtatgtcgtaagtgagataaatgaaattttacacgacaaagaaaagctgttaagctgcgagaatataaggcgttttatcttttctaaatggactttgcgtgagggctgggacaatccaaatgtctttgtgatatgcaaactgcgttctagcggaagcgagataagcaaactccaagaggttgggcgtgggcttaggctgcctgtgaatgaatatatgtcgcgcgtggggaatgatggtgattttggggcgcattatttgcattatatagtaaatgatagtgagcgagattttgcgcaaagccttataagcgatataaacgctcaaagtggcgtgatatttagcgaaaatgctacaaagttagataatgcgatgatagataaactttgtgaagtttcagggctgagcaggctaaaactacaaatggagctagtggaaaaaggcgtgattgacgaggatttggtgtttttagaaaatggtatgttaaagctaaaagaactttatccaaacgcttttgacaaagaaaacttgcaaaaagacaaagtgcgacaaagtggcaaaacacaaacaaaggcgcatatccgccgtgataattacaaaatcttacaagaactttgggagactatcaaccaaaaggtgattttagagtataaaattcaaagtgaagcgaaatttgaagctttgttggaggaatttttgcgtgattttacgcaaaaggctgtgaattcaagcgtcattacgacaaccaagagactagaaacgcacaatcagcaagcaaatttgcaagaagttttgctcacttctaacacgcaagagttgcgctatcaagcgatgagtgaagatgagtttgtgaaagagggcgcaaatgccttgctagcaaatataaacaccttgcgaaaggtgctaaaacaagtgggatttgacgagaaattttacaatcaacgaaatgtcgctatgctgaaaagtgaatttaatagatttttgtttgaaaatgcgataagcggctttgaagtgggctttgctaaaatctctagtgcgacacagccaaacttgcaccctacggctttcacagatacaaatggcaaaccctatgaggcgatagaatcaagcaatttagggatagaatctagcgatgaaatcacgccaaaaaattatctttttgatgagttgttttatgattctgctattgagagagaaaatatcttacaaaatgttgatagagttttggttttcaccaagattcctaaaaatgcgttaaaaatccctgtggcaggtgggataagctacacaccagattttgcttatgttttgaagtgcgaaaatggcgagcagatatattgcataattgagagcaagggcaaagatttgcgtgatttaagcaaggtagaaaatctaaaaatatctcgtgccgagcagtttttggaaaaaagtgggatttttggtgcaaagatacaatttagggcgcaatttgaaagcgaagcaatcacaaagattttgcaagaatttttaaataaaaatgatatttaacagaatcctttttgcttacgaatcgcaaagatatttaaagaaaaatttagattttaggcaaggatatttttttgagagttgaggcgtttagtagatttgtgcaaattagcattgaggaatacaatcccgcacttacgcagattcttaactatgcaaaaaagcgttttcagcagatttcacacctgaacttcaaaaagatatgtatataaaaggattcaaaaatgagtaatatttacttctttggtgatacacacggaagccttgatatagataagatttttatgcctagttatcaagcagatgattatattattgtctgtggagattttggcgtattatggagtgatgaaacgggtgtgtttaagcaagatgatatgctagaaaaagaagccaagctaaaagaacgcattcaaaccttgccttgcactcttttgtttatagatggtaaccacgagaattttaatcgcctaaacactcttaagcaagttgagagatttgaatctattgtgggtgaatatataaaagataaatgctatcatctcaaaagagggaatatttataatataataggacatactattttcactatgggtggagctttaagcatagataaggcgtggagggctgaaaggctaagctggtggaggcaagaagccatttttggatatttggtcattggcatagagatgtgaattttacaagcgatgagatagaggcaaataccttgtatttgcattgcttgaagttagataagcataaaaactttgagcgatttgattttagaaaagagattttttatgccaaaacgagaaatagacataaggagtgattaaatgataaaaataaaactttctactatattatttattattgcaataattgtaagtaatgctaatgcggttttctgtgttgattttgcaacacttaatgtatatgaacaaatgacaaatagtaaatatactcaaggagataatgaaattggaaatgaaataagaaatattacaaatacgataaaaagtgaaattaagcaaatagaaaacaataacaaaacactattaaaaaacttaaagagagcaaaagaagccgaatcaattttggctttgaaaaaaagctttttgcttaagcaaaacaacgagttacaaagcataaataacaatataaaggcaaactagaatgaaaattgaatctgcaaaagttaatttatacaaaccataccaaaataatctttgtatttttttacaagaagaagaggttttgcaaaaattaattttatttggtggaattttaggctgtattcttgctttcttaacttctttttttactattggagaaaatattgccataggactctatatgctaggagtcatatatgcaggaataatgataggactttattttgtaagcgaaacaaaagatacaaaagaagctgttattccaaatgaagcagataaagagtatttactttcacttggatatgaagtgaaaaagttttatggagacgctgttaaaagtggtagagtaaaaaacaataaaactcgtcctttgcttataaatgcagaaacaatgaaacggcactttcttgtaatggcaaccattggagcaggaaaatcagttctaatgaaaggattgatagaacaatatgccgtattgggcggaggttgttttattattgatggtaaggggacagatgagtttgcaaaggaaatatatggagtagttgcaagtgtggggagagaagatgattttgtatatcttaattttttagatatggataatactcacacaatcaatccattattgagcggaggggcgttaagtatatatgaaattcttattgctttattgataggagaagaaaacgaatggaaagaaaaacaaaaagaatttatgaaatgtatcctcaaacttatggtgtataaaagagataatgaaaaagactttgtttttgacttttcatcacttacaaatatgatgagtcttgtaacgctagtaaaaactgcaatagaatataaacatttagcaagatataatgttggaataatggattttgttaaatatgtaagttctaccattgaagtggatataaatgattttttacaaggagataaagaaaataaaaaatgggtagatgaaatgattaaaaaaacaagtggagaggggcaaggcatttatgatgtttctgtatgcgttggagcttggagaaatgttttgacaaatttaagctcagactatggtaggatttttaacgctccaaaccctgatatttctttatgggaagctacacaaagaaataaaattatatttgtaacattgcctacaatggattctgatactactccaaaagagcttggaagattgttgctaggacttattaaaggagtcgccgcccaaaaagcaaaatttgcaaaagaatctaaaattccttttgcttgtttttgtgatgagttgggaagctatgttattgagggatttggaagattagaatctaaaagtagaagtttgggtattagcgttgttccattttttcaaagtcccgcacaaattgatgttgttgcaaaaaatgattatgaaagaaaagaaatcattgatgttactattaatgaaaaatatgcaccctgaaacaacagaattttatgcaaaaatggttgaaaaaattaaaacaatgagcagagactatcttaaaaggcgtgatggagctaaaggttctggagcgacagaagatacttttagaatagaagagaaagaagccatagaacataatgaagtagtaaatatgaataatggcgagatgatgatatttgctaatggcaaactacatagagccatagcacaaacggaaacttctttaatggcacttggtaaaaaaacgacttatcaaggaatgagtagcgagaaaattccattagttcaatatgttagcaaaagaatattttttaaaaagactaatgaaattgttaaaaaactaggattaagttatgcaacaaacacaaatgcagaagcaatgagtaattgaatttatcatcttttgcgtatttttatagaatctgtattcttgcttttgttatttgttaaagttaaatcctgtgtaatgctatctttgagctgtaaagtataatcaatcattacaggctggtcatagcctcgtatgcttttaacacaatgaggtagccaagtgagttgtctgcccattttttcaatcaagtcccctaattcatcatcgctaaatttcgtagtagaatcatagactgaaccctgcatacgcataaaatcatactttgcaagaaaacttcctatatcattataggcattatgccaatcactttcagtgtaatactcttgcagagctttagtatctaaatcaaaggctatggttttaagttttttattgtctattttgccaaatttcattgtctttatctttttgaaagagtgcaatcaaatcgcccacatagtttggattattgctatcgcctagccaatcccaacttttaacattcttagcaaaccaatcgcaatgttttagacaattaaatactaaaatccctaaatgtgcttgtgcgtttttctcgcctctaaactcataatgatttttagatacttttgtaagtcctgctcttttagtagccaactcttctatctttgcatacatttcatctaagtcgtagatgtcctctcttagaatcttttcttcatctaattcaaatcgtgtgccaaacatagttaatcctttgtgaaatttacaaaagaaacaaaggggaggacgacaactgccaccttccccctttgcgagtgtgattataacattgtattctattaggaatcttaaagaaaaaatgaagtgtagaagtgcatatgaatacaacgaaaattagcacctatttaataaaattttcaataaaagttgttatcatatacgacaagtaataaagagatgtgtgtatgaaaatatatagctttgacatcggtgtagcgagcattggctgggcgtttatagaaaatgaagtgctacaagattgtggtattagaatctttaccaaagcagaaaatccaaaaaatggagcctccctagctttgcctaggcgagaggcacgaggagtgcgaaaacgattagcaagaagaagagggagattaaacaccataaaacaattactttgtaaagaatttggattgcaattagaagattatttgagtaatgatggtgaattgccaaaagcctacactgcttctaaagctaaccctttgaaatccccttatgagctacgcacacttgccctaagtcaaaagctagattctaaagatttggtgcgtgtgattttacacattgcaaagcaccgtggctatggtaataaacacgccaaagacagcaaagacacagaatctggcaaggttaaaaaggcaatagaatttaatcgcaagactctagcagaaaagggttataggagtgttggagaatatctatatagagaatttttccaacaaagcagaatctcacaaaataacggtgcaacagaatttgtcaatgtgcgaaacaagactgggaattacgagcattgtgtagcgcaagatatgctaaaagatgagcttgaactcatctttaggaaacaaaaagagcttggcttacatttaagcgatgggtttgaaaagcagcttttagacaagatttttgagcaacgcccattaaaaagctttgcggataaggttgggaagtgccagtttatcgctggagcaaagcgcgcgcccaaagacagcataagcgcgatagagtttgtagcactctcgcgcattatcaacacacttgccaatcttagcaagaaaagcggagagatgtatgacaaagctatggttcttacaattttagattctgtgctagaaaaaggagagatgagctactacgcattgcgtgaagccatcaacctagatgaaaaaatacgatttgcggattctaggctagattatagcaaggagataaaagagacagaaaaggtaaaatttgtagaatgtaaaaatctaaaatcttttaaaaaggtgttagggaattgttataaaacattagaaagaaagcatatagactccattgcagagcgcattgctgtgataaaagatgtagagaaactacacaaagagctagaatcctattgcgccacagagcagctctctcttacaagcgagcagatacaagccctaagccatcttaacttctcatcacacattagcctaagtctcaaggcattagagcagattctaccctttatgcgcggagagcgtgaagcacgcagcagcgatgcggactattgtatcggcattgatgagagtggagagagccagtgcttgcgctatgatgagtctgtagaaaaagcagggttaaaagctctaagcaaagatactttaaaagggcagatactcccaccgcttaatgagtttgaaccatatctcgcaaaccccgttgtagcaagggcattagccgagtatagaaaggtgctaaacgcgctgcttaagcaatatggcagcccccataaaatccacatagaatacgccagagaagccaagctaaataccacagagcgacaaaagtatgaaaaagagcagaaagataattacgccgctaatcaagctgcccacaagaaatgccaagagttagggcttgagccaagtagcaccaatctcttaaagctaaagctttggcaagagcaaggagggttgtgtctatatagtggggcaaaaatcacaatctcctacttgcaagatcccaccgcattgcaagtggatcatatctatccctactcgcgtagctttgatgatagctatatgaataagtgtctagtccttacaaaagcaaaccaagaaaagggcaaccgcacgccttttgaagcctttggaacagactctgccaagtggggagttatcacaaccctagcccaaaagctcccacacaaaaaacgccgtagaatcctaaacacagcctttaacgataaggaagcaggatttaagctccgtaaccttaatgacacaagctatatcgcacgccttgtagcagattatactgaaacatatttggagtttttgtccctagttgagagtgagaacaccacgcttggcaaggggcaaaaggggagcaaaaagcacattgccattgtcaatggtgcgcttactagcacgatgagatattatctaggctttgctagcaaagatagggataatcacttacaccacgctcttgatgcggtgattattggctttatgaatgatagtgtgataaaggcttttagcgatttcaaaaagacgcaagagacaagcaaagccgcctactatgcccacactctaagtaagcaggagtataaaaaacaacgagcttttatccaactcccaagcggcgaaaatttccgcgcaaacgtgctagaaaaagcagaatctgtctttgtttccaaaccaccaagaaaaagagtgagaggggcattgcacgaagaaagcttttattcacaaaatgatacaaaattactcaagagctatggtggggcagaaggtatagaaaaagccttacaattgggaaaaatccgtcaaattggcacaaagattgtaagcaatggcgcgatggtgcgtgtggatatttttaaacatagaaaaagtggcaaattttacggtgtgcctgtttatacaatggacttcgcgctagggattttgccaaataaagcggttgtgcaaggcaaagataaaaatgatgtgattaaagattggctagagatggattctagctatgaatttatattttcactctataaagatgatttgcttttggtgcaaaagaaagaaatggcggagcctgagctatgctactttgtgagttttgatactagtggtgcaagcatcaaagtggcaaaacacgataataacttctccacactcacagagaatcaaaaactcctcttcagcaatgctacaaaagaggaagtggtgggtaaaagcattggaatccaaaatctcaaagtttttgaaaaatggcaagtctcagttttaggtgaagtaaaacgcacacaatcatacccacgcgaaaacatatctcttgcctctaaagcaaagaaataaaatgagttttgatgaagcctttagaagtgtcttggttagctctgaagcaaagcttagtttgcaggcaaatcacttggtgctaaagcaaacaaataaagaggcaaaactttttctcaaagatattcattttgtgattttagaatctccacaaattcttattacttccgccttattaagtgcctttgcaaaacacaatatcgttcttttgacttgtgatgaaagtcatcatatcaatggcattatgcactcatatttggggcattttcagcacgctaaaattgccaaggaacaaatgatggtcagcactcataaaaaagcgattgtatggcaaaaaatcgttaaaaataaaattacaaatcaagcccgtatcttaaaattacaccacaaatctaaagaaagcgatgaactcttaagttttgctaaaaatgtttcactgggggattctagaaatttagaggcagttgcagcagcaatatattttaaggccttatttggcaaagaatttcacagagatgaaataaactttatcaattctgcacttaactatggctatgcgattcttagggcttgtatcgtgcgaaatgtctgtatcagtgggcttattacttggctaggaattaaacacgacaatatgtataatagttttaatctttgtgatgatttaatagaagtatttcgcccgtgggtagatctatgtgtgcttaaactgaatacgctagataaagaagcaaccttacggccaaacgacaaacgagagcttattaatattttacaacaagcagccttaatagatggccaaaaacatcctttgagccgagccattggacgctatattcaaagttttagatcggcgttattaggagatcaaacattaatggttgtaagttttgaaacttgaagataaatttatgcgcatactcttaatgtttgatgtgccaacaaaaacaaaaaaagaacaaaaacaagctacaagatttcgaaatgaactcatcaagcttggcttttttatgatgcaatttagcgtgtatatgaaaatatgcaaagggttaagctcggcaaaaagctctctaaatgctgtaaaaaaggtgcttccaccttatggtaatgtccgcgcacttatcatcacagaaagacaattcgacaatatagaaatattattaggaaacccatcatttaatgaaaatgttaatgaagataaaaatcttgtgctatttgactttgacgaaaatgcgggtgattaccgctatggtatggagtatcaaaaacaagaagaattgaatacaactactacacaaccaaaacaaaaaatcaaaaataggcaaccaagcttatttgaattctagggttttgatagggatatgatttaccctgcggaagaccccttactcccttattttagtcccttcttaaacttctatgtcgcgaattataaaggatttcaggtaatttctagcttaaaatcctttgaaatccctatctataggcaccaacagagagcctattctagcatatagaagtttaagaagggactaaaacagcaagcgcagctgcctttgcgcctatttatgattctagcatatagaagtttaagaagggactaaaactgcagtttcttctgctaaagcccatagttttattctagcatatagaagtttaagaagggactaaaacaattaaatctggtgcgtcaaaaaacactaaattctagcatatagaagtttaagaagggactaaaacgtaaattcaacacatagcttaattaaaaggattctagcatatagaagtttaagaagggactaaaacgcaatatcattctgtggcaagccgattattattctagcatatagaagtttaagaagggactaaaactagtgagtcagtcggcttttaatgaaaaaaattctagcatatagaagtttaagaagggactaaaacccctccgctcatttattccccctatgattaattctagcatatagaagtttaagaagggactaaaactcattaagtcttgaattgctgagattgtagattctagcatatagaagtttaagaagggactaaaacatacaataacaaaggacaccctgctcaaagattctagcatatagaagtttaagaagggactaaaactcattaagtcttgaattgctgagattgtagattctagcatatagaagtttaagaagggactaaaacaagcgagcaattaggattaagcaaaaaaaattctagcatatagaagtttaagaagggactaaaacagtcgtgctatctatcatatcatcgtgtgaattctagcatatagaagtttaagaagggactaaaacatgcaagaaaaaaacatattaaaaggcatagataatatataatattatagtaaaacatataatattatatactttgctatatttatctatacttatattatatatatcaaataaatgttataatgataaaaatctcttaaatcaaaggagtttcaaatgacagccatatctacacaacacacacaaagacgctcattattaggcactagaattgtattagatgaagaaaagattctaaaagaaaacaaatacgacttagatagaatgtatgagattattgatgaattggctaaagaatctggacttataaagatagataaacacacctatcattgcaaaggcaatgataaagacttggcgtgtttaggcatatttgtatataacaatcttattgattgcaaatggttcactttgaatgttaaagaatgggattggataagtgaaaaagaggggaacgagactcttattggcgatgatatgggcgtttggcaatgaagaatcgtaaagccctaaactttgatttatctacaaatgaacttaaaaagcattttaatagcactgcggaagcttatagtcaaatcaaaatatttatgattgaaaatggttttgagcataggcaatattcaggttatatttctaaagaacctatgaatgaaagagaaataacaaaattagttagaaaacttaataaacagctatcttggctctctacttgtgtgctaaattttgatgtaacagatataggcgaacaacacgacttaacacatttgcttacaggtaaaaaatcaaaaattgcagaatttgaaataagtaatgaatctaacgaagctaaaaagacagagcttataagaaaacatagataaggatattatattctattataatatataaaaatatataatattatatacttatatatattatgttatatttatctatattttcttatacgacttgatacaagttctacattttcatttgttgattcattctctagctcatttagtctgttttgcactttttgcaacaaagcattagaaaatccatttgttttaatctcttcacaacttgtaagcttgtgggtatgtgtttcatcttcaagcaataaatcaagctccttttctccataatagtgaaattttgttataatgctttcaagattagcaatggcaaaaagttcaggataatgctcaaataaaaaattaatatcaaacaaatctctaaccttgtctcttccattgaaagcattaattttcatagcaatgagtttgtcaatattatatacatttactccattgatattttgataaaaaatgtttttgtcttttaataaacgcaaacgatttctttctctgccacttacttcaatttttagtggatagtttcctagatgtgatgtagccgttcctacaaacctataaaaaaccataaataaatagaaatatctataaatagtttttctgttgtattcctgtttcaaccttggctatttgcaatattatttgtcgctaaatcatattgcagagccgtcaagtccgcaggcgtaaattcggacagaacttgccctattttttgtggaataagattgtagagatttaaactggcattataatctctatctatttttaatccacaattttcacattcatagattctttctttaagtgtgagagtttctttaatgcttccacattttgagcaagtctcagagcttggatagaatgtatcagcctctataatctctcttttgtggtaatcgcttttatactgaagctgtcttttaaactcataaaagcttacatcgcttattgcctttgctaatctattatttttcattaagcctttaatattgagattttcaagtccaaagtaagcataatgttttactaggcttgaagtgagctaatgtaaaaaatcatttcttacattagcgattcttgtgtggagtttattaagcttaacactttgctttaagtagttatgagacttttttatgccttgcattgcttcactcttggtttttgggtgttgctttttgcttagacttctgctcactcttcttaaacgccgtgtaagcttatttaagggtttgggtgcttgaatgcttaagccattagataaacttgcaaaggattttaagccaacatctatgcctaatccaagttttgtttgtttgctatctttatgagttcttttaaattcgctttcacttatctctaagctaaaagaagcatagaatctattagctttttgggaaatagtgcaagagtgaattttaccttgaaatcttagattctctcttaacttaacactgcctagatttggaatctttaaaaattgtttattgtttttactttcaaatttaacaatatcgccccctaaataaaacgagccttgattatcttttttctttttaaactttggatagctgactttgccttgctttaaatctctaaagaatttttggaatgcaagatttagatttaaaaatggttgttgtgtggcatatttagttacttcatagacaaaagggaattgttcttttttaatcgcattaaattctttttttaaatctaaatgtgtttttttaacaccttgcttataatattcttgccatttagaaagcccccaattataagccaacctagaacaaccaaaggcttttttaaaataagtgatatgcttattatttggaatgagttctattttatgcgagattgtcattgattacaccttgcatatcatcaagtaattttttgtttttcttgcttctacttccataaagctagcagaaaatacagtgataatctctaaaacatctttggctaattcttcttcaaacttaatattttcatcgcctttgttaatgataatcacctctacttctttagcttcacaaatagcaaagattaattcagctccaaacttagcaacctatctttatgcgttagaacaagtcttctaacttgtccttcaaggattaaattaaaagcttgattaatccttttttataataattcatgccactgcctaaatcctgtatgacttcataattaaacccagccttagcacaataaagctctaaaacttgcacctgccttattaaatcatctttttggtcagagcttgacactctagcataggcgattgtttttagattgtcagtgttaaatttgatatttttattgatattttttaaagattctaatttgtatctgcgacttccgccttttgtgatttcatcaggctttaaaagtccttgcttatcccaatttcgtaaggtttgtatggtaacaccaagaatcttcgaggcttgtcctattgcaattaatttattcataggagcattttatcaaatttttataatgatggcaagttaaaaactacaaataattaatatatatttatagttttttatagattattttaatatgttattaacccatagattccacccttgcaataccaaaatagattctatgattactatgcaaagcaaattacattaataataaactttatgcaaaagaagctaaaagctagattatcataaacgagccaaaagcagaatctaaactcccattatgccgattctttgcttgttatacaaaggattgcacgctatatcaatgatagcaatcgcataatcagcatagcttattttggattctttgttggcattgagcctgaattcctcgccgatgatttggtatctgccctctcttggcgcatgtggtataaataaagctggtggactgacatatacccaatgcagtgttttttgcgtgcgcaaaaagtccaaaacctctgcctgtgcgcttgctatcgctctgtattcttgcggaaattgcggtaaatcaagcagtcgcattgtgtgcgcattgtttatatacatacttccgactccacccacgacaatgacttgcttcgctttgcgtaagaatcgcgcttaaatgctgtatatgtgctctaaataaactcatctctttggcttctctaaatgcatcaatcacagcataaaacccttgcaagtcgcgtgagtcaagcgcaaaaatgtctttttgaataatactaagatgtgtatcttgtagtatgagctttttggcatctccgacaaaagcactcacttcatgccctcttgccaaagcctctttggtaatgaggcttccagccttcccgcttgctgccaaaaccgctattttcatcacttctccttgagatcacccctaggattcaccttatcagccttgcctccataactcacactatacattaccattacaattcctaatatacaagtaagcaaatgccaaaatcaaaatttttgtggttttcatcattttgagatataagttaagatacaagcaagcagattttagggttgtgtagaaatttttagacaagcaaaaacacaaaaagtgtaacataagcgttcattgtaggtttgcaggctaaaaatttcaaactccctgaaatatagcttctcaagcaaagcgttcgggcaaagccccattagtgcatagcaaaatagcaaaaaagagaagatttagctctcatggaaacgagaatctagaatctaagattcctatctgtgcgattaagattctcgttttgtagaatctaaaattttctcaatgctttgaaaatattttaattattttcaatcacaagataataaactctatgacaaaagctaggttctaccaaaagattttttcatatcaatcacatagcggaattttgccttgccgcttgtgaggttatgatacgcctcatcgattttatcagcagtgataatctctgtctctgggtagattttatgtttcaagctaaaatctagcatctcttgcgtctcagcgattccgccgatcatagagccatagacttttttatttgccgcaaagactaagcgcgtcatatcgttttctacgctctctcctgttggcggtagcccgacaatcgcaagctctccgccgtgtttaagcagattgacatattccattggatcatagcgcgtaggaatggtagagatgataaaatcaaaacgttctttcacattagctaaagaatctgtcgtataaagcgcctttgcgccaagttttagtgcttcagcctctttgtttttattgcgggcaaacacgctaacttctgcgccaagttttagcgcgtatttgagtgccattacgccaagcccgccaaagccagccacggctaccttgcttcctttgccaactttgctaaattttatggggctgtaagttgtgataccagcacacaaaagcggcgcgactttttctaagggtgcatcttgtggcacacataccgcaaaatcctcgctcaccacgatgttattgctatatcctccgtaagttggctcatcattatgaaagcaatctttgcagtcataagtcagcaccattttgccattgtcgcaaaactgctcgcgcccttctttacacgactcgcattctccgcaggaattcaccatgcagccaacgcccgcataatcgccgggcttaaacttagagactttctcgcccacggctaccacgcgcccagcgatttcatgtccgggcaccatagggtagattccctcatgccattcactccttgcgctatgaatgtcgctgtggcagattccagcaaacaaaatctcaatcaaaatgtcgcgctcacctaatgcgtggcgactgccctcaaaacccctaaaatttgcactcttagaatccaccgcaaagcccttaaagcttatgcgcttgccctcttttgcctcgttgatgtagttttgcatagttgctcctttgtataaaattacaatggcattataaagcctaacacctagtgtttgtcaagagtaaatcataaaaaatgacaagaatttgtaagcaagtaagataagtaagcaaaaaagtatcgtataagtcgtggataaaatcgattacaaaaaaagaaaagaaaagaataatcccaacccaaaaaggttaaggattattaatgattaaagcttgcttgcgtgagatttgaggtattgtttgacgccatcagctgttggtttcattccttcttgacctttttgccaaccagcagggcaaacttctccatgctcttgcacaaacaatagcgcatctgccattcttagcatttcgtccatattgcgaccgagtggaagatcattgattacagcatgtcgcacgacttgatctttatcaatcaaaaagcttccacgcagtgcaacagcgccatttacaagcacatcataatctcttgagatttgttttgtgatgtcagataccataggaaatgttacattgccgattccgccttgatcgataggtgtgtttttccatgcgaaatgcactacatcagaatcgatagaaacaccaattacattgaatcctttttcagcaaaatcttttactctatgatccattgctaaaatttcactagggcaaacaaaagtaaaatcttttggccaaaaaaacactattgcgccattttttcctaaattttttgaaagttcaaaatcttcaacaatttgattatttggtaaaactgctggagccttaaaatctggggcttttcttgttactaacatagttatgtctccttgtttaatatgtaatttagactgataacaatggataattattatcatttgagattgtagcttgtaattgttaatttattctcagacttctagagttttcatctctaaataatggaataaatcatataaacttatatttttttgctaagattaggtttttatgttttgagaaggagtgttatgcagcatttatttattatagaagtcaaataccaaacaagccttgaagtcgtagaatcccaccttgccaaccaccgctcattcttgcaagaatggtataaaaaaggtgtcttgcttgcctcaggaccgcagaatccaaaagtaggcggaatgattatcggcagatttgaatcccttgacaaagccaaagaatttaccaaacaagatcctttctacacgcataatatcgctacatatcatttcacagaatttgatcctgtgcttcatgatgaatgtataaataatttcttaaatcacaactagcacaaggacaaaagtcatgaatcaaatcattcattttatcgtagatacaattggtagctttggctatccgggcatttttatcatgatgtttttagaatcaagcttttttccatttccttcagaagtggtgatgattccggctggatatttggcttacaaaaacgaaatgaatatatccctagctctactttctggagcattaggaagcctggctggagcgatttttaattatattttggcgatatattttggtcgtgcgtttttactcaaatttggcaaatatttctttttcaccgaaaaaacaatgactaaaatggaaaatttctttaccaaacacggagaaataagcacttttttggggcgacttatcccaggtataagacaatacatctctcttcctgcgggcttagcgcgaatgaatctagttagattctcgatttatacgactatcggagcgttgatttggatcacgattttggcgtggtttgggtattatgtgggtgtgtggtttggtgatgatttatcaatcagcaatctccttgaaatgcttagctcaaaagcggattctagcgtgcttaaa

SEQ ID NO: 3764 - DNA, 23117 bp, synthetic construct
  source 1..23117: mol_type = other DNA
  misc_feature 1..23117: note = Synthetic
catgagagcgtcctaccataagcgtatccttatactcataggcatgcttttttaccgcctctcttagctcccctatatcagataaaataatctttaaagaatccctcatttgcaacgccacagcggtatcaatgcaatcactacttgtgattccataatgaaaccagcggctttcctcccccaaagattcagccacgcttgtagtaaaggcaattaaatcatgctttgtaaccgcttcaatctcatcaatacgctcaatgttaaatgttgcattcttgcagattttctcacaatcactatccgggattagccctagcttattccacccacgcaccaaagccttctccacctctagccaagcagaatatttagcatttaaatcccaaagctttttcattttctctcttgcgtatcgctctaccataataaatcctccttaaaacatataggctttacttctataatctactagaatctttatcaatcatcaaataatcctctatcctttgatttcaatttccattgccctgtatctttattctcataggcaagctcgtttagaatctcttttataagcttattattagcttggattccattcttaagtaatggcaagatacgcaaacaaagctcatcaaattttacacatttattttctttttgcgctttggtaagctctcctaaaatataatacctcgctctctcctctattggaatcccatagtttaaaatacttgcctcatctcttatatgatagagtttagagcttggctcgtaatcaaagcgttcgttaataagcaaaatcacattttcaaactttgccataagctcataataccctccctcaatcgcctttttaacaagataagcatgtatagattctaaagttgcaccattatttgcgacaataatgttttcaatatccctatacatttgctctaggctttgctctcctgcttctagctttgttcttgtctttggattatctatctttttaaaataaatgataagctgtccctttagcacacgcgtgggattttgcacttttttgaagcttgaaatccctgtattttcttggctcacacaacctacatattcaaagcctacattctccgcagattcgattaagatttgaaaaagttttgggtcttggtgctgaaatacaaaggctaaccagcggttatatttaagcactctatacatttcctttaaggattttttcattaaatcataatattcatatttgcttttctctaaacttcctttttctatacattctttttcttttaaggctaaatccacaggtaaatctaaccatacattccacatcgtgcttaaatcaagatagggaatctttgctccataagggggatcagtgtatatgaaatccacactttgagattctatctcttttaaatctgtcgcatctgcttgaaagattttctcaccatttgttttatttaacagcgaatcagttttgtctaaattatttctttgctctagtaaagcaccattaaaatccttaatcacatttgcaagaggataaaaatagctttgataaaataaatcgttaggcgcggattctagctcttgtttgccaagccttactcgtttaattttatctctataatgctgctctatgtctaaaaaagctggtcttggagcaatgcgatagcggtaatatttgtatataccactatcacctgcagactttacagaatctgcataatgaaaagttaagttacatcttgtaatagtattataaaaccccaacatcaacgcatatctcatatttctttttataattctttgctctttacttctgcttggtgctgtatgtttaaagataagttttctaagtaaggctagttctgctaattgttttttactaaaaagctttaatacagaatctacatcactacctttaggtaaagtctcatcttttggaatccaaagtgtagaatcctgctgctcttgtgttgcaatctcaccaaactcgctatctagtgcattgggataatactttgcaccttttagaatctcctctgcttctttgtctgcctctttttgattacctttaggtcttaagctttcaaactcttttaaaatctcttcacttaagacataaaactcacttaaatctacttttacgcttaatgcctttgtcataaagatgcttagaggatttaaatctatatgaatccctactcttccattcatcattgcttcaatggctgtaactccacttccaccaaagctatcaaggactacatcaccatcatcagtgaagtttttgatattgtgcgttacaatatcccaactctgccttgtaaagtaagctgtgcaaccataatatcgtgcttttttgcgtttttgaggcttgagtattgctttaggtaattttctatttaaataccaactatctggctttttgagcgttttagaatcttgggttagagtttgctttaatgattctatgggtgtagtaaggtattgtttcaaaagtaaaaaatcgttgttatcttgtgctaccccttttgtcctattgagcgttagcgaaatatcttttttagattcttcgcttcgctcagaatgacaattcaaagaattaaacaactccttgcaagaaaattcttttaaaagattctgcccatttgtttcaaaaagcataaagcttttaccattacaaagcgcataaaatggggcttttagctcgggattaattgcataataaaatgcctgtcgctctgccttgctttgtgcgctaatttctacttttggagcttttgcgtccaaaacgcaatgaggtttagaatcaaaataaagcacataatcagggaagcgcgtaaaagtaattttctcattacttcctaaaatcgtaggacttgtaagcttcaaggataaagccatttctagcttagaatccttatttatttccttagatttattgccagattctttagaatcttttaacacaaagcctagctcttttaaaagtggcgcgataagtaactctcgcacggaatcctctttgaaattttcatcttctaaagcttgaaaatcaaaagtattcattttgctactccttttattaaaagtatttatgaatcaaattgatttttgccttttgattcttaccttttggcagtcaaaataaaattttatattttctaatcttataaaaattcgctattggttatatctaggcttaatttatcaagagtgcgattaaagctatcattcctgcatagaatagggcatttgctacaatcaattgcgttatatacttcttttatcctagcaccacgccaaatctcttccaaactttgctctcttaaatctcctaaaaaatgcttttgactttgtctgaagtgaagacatgcccatactttgaaatccgcacttattactgtgctaaaaaacataccatgacatttattatatcctctatctttgctttcctttaatcctgccatttcattgtatttttgataacttgcgacaatcttaaagttagaatcttcatatttctcacgcaaggattctaatttagggataatgtctagcgtatctccagtaaatggtctaaactgcgcaaaatcaacacctctatctttgactagctttacaaaagattccatatcaccctctgtaatgctgcttgttaggaatcctaccccgaagcttattttgctacctaatctctgtttagttttagagaaattttcaatattttgcaaagtcttttcaaaatgatagggtttcatgccatgtatctttttatacatttctggacttcctgcatcaaggcttattctaaaatattctaaattttctgctattacttcattaagatgctctttaagattcattccatgcgaattaagcccaatattttgcccagccttttttaggagttttatagcatattcaaaatatggcgagcaggtaggctctcccccgccacttagaatcactcctttattatccatgttttttagattttcaacaacattttctacttgttctttagtaagctcggcattgttttcattgtttccacagcagcccggacatctatgattgcatttatttgttaagtcaagttcagttacgattaatgtcttatgagcattaaaaaaatagtcaattttattatggtaacgcaaaatcttttcgcttgagttgaaattgttaattttcattgttatctccgtctttatgttttaagtatggaatcaaaacttgctagattacaggctatagattgaaatttattattagggttagactatgttaaatttaaaagtttttctaggtatttcccatatccgctcttatctaactcttttgctctttttaagagtgtttcctcatctatccatttgtttttgtaagcaatttcttctagacatgcaatcttaaatccttgtctacgctcaatagtttgcacaaagctaccagcatctaataggctatcatttgtcccagtatcaagccaagcaaaccctctaccaaatatctctacttttagttttccattctgaagatataatttattaatatcggtaatctctaattcacctctttttgatgggattatttgcttggcataagaaataacattgttgtcatagaaatacaatccagttatagcataattgcttcttggatttttaggcttttcttctagacttattacctctttgtttttatcaaattccactaccccaaattgactaggatcatttaccatatatccaaaaataactccgcctccgtgtttagtgatatgactcttcgcgctacttaacataccgctaaatccttgaccataaaaaatattgtctccaagtattaagcatacattattatcgtttatgaagtccttgccaattataaatgcttctgctagcccatttggaagctcttgtatacaataatcaaatctcataccaagccatttaccatctttaaatatctctttaaacctaataatatctctaggtgtagagatgattaacacttccctaatatttgctagcataagtacagatagtggatagtaaatcattggcttatcataaattggtagaagttgttttgagatgatttgagttgtaggatatagtctagttccactaccaccagctaaaattatgcctttcacatgcttttcctaatgatttttagcttgcgattatatctaaataaatcaaagaagatttaaagtttgtataattgcaaaatcttgtttttggtaggtttgaatgcttttctactataagagttatgtacttttgtttgcttttcttgctttggttggctgcgtgcgtcaagattatagtgtaagcaaggaatctagttttgaatctttgcttaaccaaagtagccaagataaagatttatttgctttggattctgttagttctatagattctgataatgtttctaaatatcaaagattagatttagatattgtttctctctcacaaaagattaatctttttagtaaatgttattactatgaggatagggggatctgcgataaaattttgcaaggctttaaggaagaatgtgaagatgatttacaagggtttgcttgcgcgttagttggaatatctattgtagataataagagcaatttaaatactagagatagagttattgcgttaagatattttattgaaggttgcaagttaaaagattctttatcttgcatgtttttgcgtaaattttatgttagttatggttatgaaaaagaggcacaaagacttctagattccataaccaatatatgcgttaaaggaggagtatttgaatgttttttattatcaaatctatatgagggcgatcctagctttggtgattatagagaatatataaaagaatatagattaatggcttgcaatcaagatttagccattgcatgcggctatcttgattctttgtctctacagaaacaggattataaaatgtatcaaaagagggcttgcaatctaggaatgctagccgcatgtgattcatctcgtgagctaaatgagcttaatatgcgaagtatgcattttagaatctttagagtatggtaacctatcttaataatgcttattgctaaaatatatgctattttgattttttgtgtaattaactttgaaataaatatttcaaaacatattttattaagtttatacgcactatatagttatattctcaatgaatgtaatgttgttatcttgtatagctaaggcgtcaatacaaaagttgtaataatatttgcgtttttctaagaatatgtgaatagtctttgtcatcttttctagcttagctgtagtaatttttaaaagtggatttggcgatttaattgatgatgttcccttgatttctataaagtgaagtgtttcttctttttgcataattaagtctatttcaccatattggctataaaaatttctgtctataaagacaaatcccctttcacatagatatttcagtgctagatcttcataatgattacctatttttcttgtatttattgttcttctttcatttattggcattatatctttccatataaattatgttaattgtctattttagcattataatactagtttatctttctatttagggaagcgcatgaatgagttagacaagattataaaatctgctatgcaagattttaagaatataaagaaatatattcgcaaacgcgatgttgatttgttcttgcgcataagaaatatgaaaaaaagagatatagactttttggaagaaatatgtctaatacatatcaagaatattcagcaaggtgataaaatacagcaaaatttttatcaaatgttagataattttgtatttagttctcttttgcagaggcatttcttttcaagttttgagttatttcgtattctttgttatagattccatttattgccaaagagattatttatgcgggaggttaaacgatattctcgcaaaattatttgtgataatttgtcaaagttaacattttataagattgaaaatgcagttaatttttttgcaccattgccacttaacgaagagcaatcagaggattatctaaaagaatgcttaaatatactttcacattcaagagtagatactatagttataaaccccttaaatttagttccaaaggcacatctatgttctcataatatgttgcaaaaaacgcttataagcaatcttagagttttgtttgaaaactcaaatggcaagacaatatttcttgagaatggatatgagttcttggatttgcttttggaatcattaaagaattgtttaatggatattccgcgtaccattaaggttggggtgagtttgcaaatatattatttggattccattcaaggattggataagctagctgtgcttagtagtcaattattagccaatgacaaggagaagttgcttgttagatttaaagacatagattttgaatatcaaaaggaatattttacaaatctacaaaagtataaggcaaataaggtattcgccaatcatgcaaatagtcgtgctaatctcatggcatgtttggatagatatagagaatataagagggttttagatgcaagccttagaagctttgatatattcattattagcttattgtgtatgtgggggatggattctaaaatatctcttgaaattgaaccagagcttaattttgcgttttataggctagctagacaaaagaatataaatctaatttcaatacaatgctacactaagcattttacacaaatgctagcatatcgtttaaaatatgcccattcagaatttttacaaggtatatgtagttatattgatatgcacataaataagcaagaatggcaaaaaaaatgcaatgatttttctcatagttttaacatagctcaaaaaagtatttcaaaaagaagcacattaagctcaaattatcaaagcatattagaataccctaaagatactatgtctaacttatccttagctgtagattccaaaatagttagcatgaggcaatataattttgaaacatttaactatgaattgcaaaagccattgaaacttgatttgaataatgatctttcttttgcgaataagttagagtctttgccatgcgatacgcctaatcgcaataagctagatgatataatttatttaaatgccgatgatatgaatcgtttgacattacaaagtattagcacgccaatagtattttctctcaatacccaaaaggaaaaggatgccctagcaaaagccatatctaagaaagaagagatagaaagcaataaaattagcattatgactaatattatttcacttctcaaggataaagctagcgcgctatttgccacattatgccaaatatatccagacatgcccaaagatataatagaagagaaagtttatcttttgattgatacatttaaatattatggctatgaatatcgcaatttgactaatgagacagattccgtgctacttgctccagttggaaatgttctaatatatacgaattctttagatataaatgaaatagcttcatgcgtagctgcaaatatcatgataggcaatgtttcttttgtagaggattgcttgcaagctagaatcctctattatctacttatgccaatattagatttttgtccatttatgtcgctttatcgcaactctcaaatacaaatgcaagctcaaattttatgtcatggcgataaatatactgaatctactaattccttgattagtgatagaggcgtagcagttgtatttattagttcattttatgatatttatgaggctttttgtgagattatgaaatctagtattgcaaatccaatacccatgttaatctatacagattcttatatatacgatgatgcgcaaaagatctttgtcccgttaaatgtctcttgctctagtcttggcgatttgatagctaatcttcctaaaaagacttctcatgtaagtatatttacatataacaaaactgaaatgaattatgctatatcgcatatcaatacttccatttgtattaatggtagctataagctagctgttgtatcaggtagtgctagaatttttcgtgctggatatttgcaacctttcttaagtcgttatcttttacataacttagtgagcgcaaatcctagcaatgtaataaagaagaatagtctttattctgatgtgattggttgctttggcgggattcttagtgttgatgagattgagttcttatataacctaaatcataattatagtcaatacctaaagaatcttgagcgcacggcaagtgtagataatctctatgaggttaagaaaaattataaaatggttttacgtgtatataatgaagatgatttttttcatatatgcgttattatgttggttgcgcatttgttgcagattccaactaagataagttttagtcctacatatttgagcaaaaatgagagtgctaaatcgctagatatagataagttatctaaatctttcctagagaaatatatctctatatttacattagtcatagaggaagaacaagatttccttaatactttagaagatgaatcgttgcttagaattcttcaagatgaggatatatttttatccaaaaatacaaatacctatagagagcttaaaactaggggtataattgcggagtattctctaccaatacttaataagaatcttgaattagaacgttatgtttatacacaatatatacaaatagagccaaatatatttctacaaacccaaacaggctataagatagaatcatggctacataatttaactttagagcagcaatctcaaaggtgattttgattgttataaagttattttgtattttaagcaatcgcagttcttactatattaagaatttattgatatggcttagattctaaagttattacaaataccatattttgattttataaaaatttccatatactagtattaatgctatagttattatattttagatgtatggagttgttaaatgaaaaagttagcttttgacataggtattgcaagtattggttgggcttttgtggaagatgatgaactaagagattgtggagtaagaatctttaccaaagcagagaatccaaaaaatggaaaatctttggcattgccgcgtagagaggcacgagcagttagacggagattagcacgtagaaaaacaagacttaattcgcttaaaaggttgctctgtaaagagttaggttttaatttaaatgattatttaagtaatgatggagttttgccaaaagcttatgagacgaataaagatactaaaagtccatatgaactgcgcactttagcactctcacaaaaattagattctaaagattttgcaagagtggttttgcatattgccaaacatcgtggctatgggaacaaacacgcaaaaataggtagcgataaagattctggcaaggtgttaagtgctattaaggcgaataaacaggctatggaggataaagaatacaaaagtgtgggcgaatacctttataatgagttttatcaaaagcaaagattagaaagcgagaaaaaagttagtaatcatgcaagtgaatttaaaaatgtgcgaaataagggcaaaagttatgagcattgcgtggcacaagagcaattaaaggcagagttagaacttatttttaaaaggcaaagagagttcggtgtaagtttaagcaaagagtttgaagataaagttatagatattgccttttttcaactcccattaaaagattttagcgataaagtgggtgaatgtgtgttttgtgaaggacaaaaacgtgcccctaaagattctttaagtgccatggaatttgtggctttaacacgtattattaatacattaagaaaccttgaaaaacgaattagtaataaaacttattctaaggaaaaggtccaagagattttgcaaatcgtactagataaaggtgagataagttataaaaaactacgtgagattctctctttgccagattatgtgcgctttagtgattctaaacttgattatactaaagaattaaaagaggttgaaaaagcaaagtttatagaacttaaaaatctaaaagcttttaaaaaggctttgggaagaagctttgatgagttttcacgagatagccttgataaaattgcagaagctatagctttaaataaaagtagagaaaatctaaaaaaggaattagaaaaaaatttcgctcaaatccttagacaagagcaaaaagaagccctaagtgatttaagctttgcaaaacatattgatttaagtctaaaggctttgaatgaaattttgccctttatgcgaggggagagttctaatgaatgtttgcgctatgatgaggcagtagagagagcggggttaaaagaaattgcaaaaaataaagagcaagggaatttcttattagcattaaaggaatatgagccatatttggcaaatcctgtagtagcaagagcattaagtgaatatcgtaaggtgctaaacgctttgcttagaaagtatgggcaagtgcataagattcacttagaatttacgcgtgaggtaaatttaagccatgaagaaagaaaaaaggtagaaaaagagcaacaagcaaattttactaaaaatcaagaagcagaaaaactttgtaaagaaatagggctacatataagtaaggatagcattcttaaagcaaagttgtttatagaacaaggagagttttgtgcgtatagttgttataaaataacctctgatcatctaaaagatcctaatatgcttcaaattgaccatatttatccgtattctcgtagttttgatgacagctatatgaataaggtacttgtttttaacaaagaaaatcaaaacaagggaaatagaactccttttgaagcttttggaagtgataaagataaatgggagaaaatattaagtctagcagatagactgcctaaagctaaaagaaagagaatttataataaagattttaaagacaaagaagctggatttatcttaagaaatattgttgatacaggttatatagcgcgtctagcaagtcaatggacaaagcattgcttgaagtttttgcctttaagtgaaaatgaagtaactatagctggagaaaagggttctaaggtgcatgtagaaataataagcggaaaacttacttcaatgcttaggcattattggggtttgggcaataaagatagatccaatcatctccatcatgcagttgatgcaataattattgcttatgcaagtgccaaaactatcaaggcatttgcagactttagagcaaatcaagataagaacacagcagaattttatgctgaacaaatttcagaattggaatatgtagaaaaaagagcattttttaatccctgcaaaaactttagaaaaaaagttttagaaaaattaaattctatatttgtgtcaaagcctcctagaaaaagggctagaggagcattgcatgaggaaacattttattcttttgatgataaaaatcttttaaaaagttatggtggtgaaaagggaatacaaaaggcgatagagcttggcaagattcgccaaattggcacaaagattgtgagcaatggaactatggttagggtagatatttttaaagacaaaaaaggcaaattctatggtgtgcctatttacacaatggactttgcccttggaatcttgcccaataaggctgtggtaggtggcaaagacaaagagggtgtgattaaggactggaaagagatggattctaattatgagttttgttttagtatctttaaggacgacttgattttagtgcagaaaaatgaaatggaagaggcagagttgtgctactataaaagatttaaaacctctggagcttcgatagaagttgttaagcatgataatagggtagataatataaccgaaaatcaagaaaagatttttaaattgaaatttgataatggcaaaaaaatactagatgaaagtttaattgcaatccaaaatctcaaaatctttgaaaaataccaagtttctccactaggcgaagtgcaaaaggcagaatttataccacgtcagagtatatctcttaaatctacacccaataaaaataagctaaataaagtcaatgaagtaaaaagttagagggatcaggtatgtttgattcagcatttcgcacgcttttcttaagcactcctgcaaaattaagattagaaaataatcatctttgcatcacacaagagcaaaaggaaaatgtgaagattccactctctgatattctttgtataattttagaatctcatcaaatcacatttacaaattctttacttaacgcctttgcttatcataaaattgtagtttttacttgtgatgaacatcatctaccaagtggaatttttatcccatttttgggtcattataaatctctaagtattttgcaatcccaaatagctttaagcaagcaaagaaaggcaatcctttggcagcaaatcataaaatccaaaatcaataatcaagcctcattattaaaaatgttagataaagataaatatacgcaattagaatcattatcaaagagtgtaaatctaagcgattcaagcaataatgaagcaaaggctgcggcgatttattttaaatcactttttggtagagattttagccgtaaaattgatttggataatgcaataggcacgattaatgctgcacttaattatggctatgctattgtgcgtggggttattactagggttctttgtgcaagtggtcttaatcctgttttaggtttatttcactgtaatcaatttaactcctttaaccttgctgatgatttgatagagccttatagaatctttgtagattctcttgtttttcatatgaaagaatgcggtgatttgggggataatttagggcttgcagatcgcttaaaattaacaaagcttttaaatgcaagtattttgattgatagtaaaatctatccactaaatcgcgcagtcgtaataagcgttcagagtttggttaaatcatttgaaaaagattataaattaaagttaccgctttttgaggagaataaatctaatggaagagaagtttatgagagtattagttatgtttgatgtgccaactcgcacaaaagaagatagaaaaaatagcgcaagatttcgacaacaacttattaaagatggctttatgatgttgcaatttagcgtatatatgagaatttgtaggggagcaacaagtgcaaataatcatattgatagagttagtttattcttgccgccaagagggcatgtaagggcattaatactcacagagaagcaatttgataacatgagacttttgcttggtaagataagcaataatgaacaggcaaataagccaaaggagcttacgcttttttaatatgacttgtgattaattacgtatatttttgaatctttgtatagattaagaaatatattaaaggcagatatatcaacgtgacttaaataaagtaaaaaatattgatattatgatttttatgtagaatttactcttagcatgatataaaccaatatttaagcttaaagtaaaaataggattttgttagggattgtaaccctgcgggagatcctgaactcccttattttagccacttattaaaccatttttgaattatatcccaaattttatcaataacactaaatattttatagtatttagtgttattaaaacttatcaaatatcctaaaatacgcagtttcaaggtagtgtattttagcatagaatgatttaataagtggctaaaacagtgaaccatattcgccgcagatatagtaattttagcatagaatgatttaataagtggctaaaacaactatgtatacgcagggtataaagagaaattttagcatagaatgatttaataagtggctaaaaccatcacaagcgcacttatcggcggcggtgattttagcatagaatgatttaataagtggctaaaactgataatgtggtctcccccgtaaagagccaattttagcatagaatgatttaataagtggctaaaactcgcgtctcgtctccatcttacgcttcttaattttagcatagaatgatttaataagtggctaaaacctccacataataatactgttctttgcgtaattttagcatagaatgatttaataagtggctaaaacacttcatattccttggtttgcgattggattattttagcatagaatgatttaataagtggctaaaacccgtgcttacaacatgatatggaataatttattttagcatagaatgatttaataagtggctaaaacaccgagatattcggggagctgcaaacgataattttagcatagaatgatttaataagtggctaaaacctccacataataatactgttctttgcgtaattttagcatagaatgatttaataagtggctaaaacagactcccacatacctgaaacctttgaacaattttagcatagaatgatttaataagtggctaaaactgcataccaacattactatattctttcataattttagcatagaatgatttaataagtggctaaaactggagtcacgggtttagttatttcggatcattttagcatagaatgatttaataagtggctaaaaccagcagtttgtaagacttcattaattcgcaattttagcatagaatgatttaataagtggctaaaacttggaagcagaagctaaaaagcgcggaattattttagcatagaatgatttaataagtggctaaaacgcatagggaacttattacttcctgttggtattttagcatagaatgatttaataagtggctaaaacaaattcaaaacaaaatctgcgtttaaatttattttagcatagaatgatttaataagtggctaaaacactcgtagtcaatgaagtcatcgaaataataattttagcatagaatgatttaataagtggctaaaacgactctttcttatactgtcggtgagtataattttagcatagaatgatttaataagtggctaaaactagtgccttttcggcttcattaatccctaaattttagcatagaatgatttaataagtggctaaaaccagaatccataaatcttatggcaggtaaaattttagcatagaatgatttaataagtggctaaaacctgcattctgcgtaaaaaagaaaactagatattttagcatagaatgatttaataagtggctaaaacattaaaacaaatgctacgcgtcaatcaagaattttagcatagaatgatttaataagtggctaaaacatctcgtcatttagtaggcgatgctgtagaattttagcatagaatgatttaataagtggctaaaaccatattcatctttagcagcactatttgatgattttagcatagaatgatttaataagtggctaaaacaatgcatccgatagtttgtcgaattcatcaattttagcatagaatgatttaataagtggctaaaactagtgccttttcggcttcattaatccctaaattttagcatagaatgatttaataagtggctaaaactatctctacagctcctaaggtttctagtctattttagcatagaatgatttaataagtggctaaaacacagaaccgcgactcgaatatgtaatattattttagcatagaatgatttaataagtggctaaaactatctctacagctcctaaggtttctagtctattttagcatagaatgatttaataagtggctaaaactagtgccttttcggcttcattaatccctaaattttagcatagaatgatttaataagtggctaaaactatctctacagctcctaaggtttctagtctattttagcatagaatgatttaataagtggctaaaacactaagcgcagcattaaaattagatggaaaattttagcatagaatgatttaataagtggctaaaacttggtttagtgataactatagcgttcaatcattttagcatagaatgatttaataagtggctaaaacatctttattagctgataaaatcaaattgttaattttagcatagaatgatttaataagtggctaaaacccccttttttgaactctatcgcaggattaaattttagcatagaatgatttaataagtggctaaaactcgtagggatttgtaacattatttggttttattttagcatagaatgatttaataagtggctaaaacctcattgggcattgtagtagagggaggagaattttagcatagaatgatttaataagtggctaaaacagctaactttaatatatttaatctaaattaattatcttaaaactttattataatcatcaggttaatgtaactaattcatttttagcttcttcataactaagatgctaagtttatttcttaataaattaagagtttttatttgaagcttaataaatccattgctagtaaaaagctagcaacaaccttataacagttttatgtaatttctatatcaagattttaaagaaaaatccgttatcctaatcatctactactaagagtataaatttatcaatttcttaattgaaatacatacctccatcaactactatcgcttgacctgtaatataatctgaatctggactagctagaaatgctactacgtttgctacatcttcaggttcacttagtcgctttaatgtaatatgttttgcatattgctccattccccactcaaaaggttttcctgccgcgtttgctacatcttgagcaattttaaacatcattggggttttgactatgcccggacaatacgcattaactgtaatgcctaaatgagctaagtcctttgctgcagtttgtgtaataccacgaacagcgaattttgtgcctccatatacagccaattctggattaccaacttgcccagcttgagaacttgcagagataatcttaccaccgtgacctaattctttaaaagctttagtagctgcttgtatgccccataaaacgccacctacattgatatcaaatgtcttacgatagatttcaaaagtaatctcttcaattggcgttattggacctattgccgcattattaatcattacgttaaaatcacctaattcattttttgctttttcaactgcattaaatacatcatcacgatttgatacatcaagttttatagctattgctctagatattttacttatttcttttgcactttctttagcaagagattcatttatatctgcaatagcaacgttaaaaccatcttttgcaagacgtaatgcaattgcctttccaataccttgtgctccgcctgtaatcattgcaacttttgacataatagcctccttaatataaatggtggacttttgcaagcccataaactggtgtttctaaaccttcatatctagctttaagttgtaaggataagtataaggaatagtgtcttgattgatgtaagtttccaccatgaaaccatagattttcttgttgagtgggtttccacatatttcgcagttcgccttcccaaggaccagggtcttttttggtatttgaacctaatccccaaactttacctactttatctgctacttcttgtgatacaatttttgccacccaaaaattcattgagctaaaaccagtagcataaattaccaaatcagcctctagttccttgccattagtaagaactacggaattctcttttaattctttaatatttccattttcaagcttaatatctccattggcaacaagctcgctagctccaacatcaatataatagcctgaacctctacgcaaatatttcataaaaagaccagagccgtcatcaccaaaatcgagcaaaaagcctcttttctctaatctatcatataaatctttatcacgcttttttatttcatcataaactggcttatggaaatctgccatgattctaaaaggaactgaagcaaacagtaagtctgccttatcagttgtgattccattctctagtgcttcttctgaatagagtccttttagggcaagttccataagagaatcagaccggacgatatgagttgaactccgctgtatcatagttacatcagcgtcattttcccataatgcagcgcaaatatcatgtgcagaattatttgagcctaacactactactttttttcctttgtataagtctgatgatttatgttcgcttgaatgctgttgctcacctttgaatatatcataacccttaggcttaggtatattaggtactcctgacatccctaatgcaaatacgacgtgcttaggacgtaatatgatttctttaccttctttttcaactgtggctatccactccttattggtatcatcataagaagctttgacacactttgtagatgaccaataattgagttccataatcttaacatagcactcaagccaatctgctatcttgtctttaggtgagaatacaggccaatcatctgggaatggaagatagggtaagtggtcataccatatagggtcatgtaaacataaggatttataacgatttctccattgatcgcctggtttaggatgcgcatcaacaattagtgttgggacttctaatcttttaagtcttgctcctagtgcaattccaccttgtcctccaccaataattaatacataaggctgtttgctatatcctagctctgtttcttctttttgctttttttctagccatgttagacggtttttgttgattccatgttctgcgccttttattctgtttttgtttttcttttcttcaaaaccttttagttcgtttgcaactgtgagcaatgtccaacacagtccattttttagtctaatatagcctttacctctaaatacttttgtttcaaaagtaaagaatccttcaataatatcgtcatagctatttatatctccttctactttgaaatttgtaggtttgctgcttgtaagttgagattgaagcatttgtttaattgaaggtttgccttctaatgtaataatattccatgtcaaacttattaaatcgcgccaataacatgaatcttgaaacaagtctaatacatcggttagggtatgggatgtagataaagcttgttcaaaattattaagccaactctgaagagtatttatataattttttttcatatattttacctccgttagaaattaaagcaaataagaatttattgctttaatgccgattatacaaaaaaaaaaaacgtactacgtatttatgttaaataatcctttataattctgaagtatttacatgtctttattttatttaagcattagtttgtgagttgtagcaacatttgcaagtcagcttagacgttacaattcttatcatattaatttaatagttggcattttgtaatattaattacacttatgaatttgcattaatcaccttgtataacttaaagtagctctcatgtgttttctattaaaattaataaattaatactattacgcttgaagaattttttgtttgatgtttatactataggttctaatttgatatttatatatttattaaatttatagttttttgtttagccattattatttataatctttatagtgtgaagcttgcttatgataataatctaagtttccttttataaaatcacattttatgataatgctaagcaatagcttcttaagatacaaagctaagattttcacactacattgatgctgaagcaagcacaaatgactaaattttttagattctataaaacttatagaaagcaaagattttttacaaatgaatacctagcaataatttcctatctaacttttaaatttatttatgtattaagtggctttgattttatagttaaatgctaggaattacttagttttgtcgctaaatttttcttgaagcctttataatattgtgttaggtcttttgtaattaatttcttattaaattattatttttatgtgtaaatatgtaaattttattattttgtttagctctttgtgattcttcttgttataagatgttttatctataattattctgtttttaactataatagcctatctcctagactagattatcgaataatctttactcttctctttaataaatatgctctaatcttatattgtaagcctagtttctttattgcattaaggaaaatcttattatgtgtagctttgtagtagtctttaagtattgtatatagagctttagagctcacattaagcgaactaatagaatctaaaatctcttctgcactcttatgtccttgtatatgtaatatacgcagagctcgcaactcgttatatactggtagttttagtatatatggatatgttgaaaagtaggaatccatgaattctatttgtaattccaatctatttttcataatctctaaccctcttttagaggttaggctattcttgtgatgtcgatagtaatataacggagtatggatttcgccaattttaccttttagaccaatccttagccaatattcataatcttctaccaagaatcttttctcattgtataatccaacttcttttgccactttagccctatataaaaaacaagcaccaatgccgcaatatgcaataagtttttctggcataactgatacttctctttttgcttgtctattattttctcgcagtatgatgtaatcagcgcataccattacataattattttgtgtttgcaaaaaatcaagcataatctctaaagcttgtggtacatagtaattatcatctgaagtccaagttaaatattctccttttgcttctgtaaaaccgatatttaaagattttggcagcttttgattgatttcattgtggataagttttattcggttatctttatttgcataagattctatgatttctcttgtattatcggtagaacaatcattaacaatgattaattctatgtttttatatgtttgattgagtattgattctatggattgttcgatatattcttcaccattatatgttggtaggacaatgcttataagtggcatggtgtttctcaaagcaagctagtagtatcaatatatggcatattaaatgccttagctatggattttaaagctatgctaccattatatgcgtttagtccaccaatagcccctggcattcttagcatctctttccaaccttgattagctatgacttttatatatggcaatgattcatatgagtaggtaatgctagatgtcctagcaattacacctggtatatttggcacaccataatgcactaaatcttcctctatatatgtaggattgtcatgtgtagtttgtttagaggtttccatacaaccaccaagatctacagatacatcaagaactacaccacctttattcatcattcttaaatgttctctagtgatgatttttggtgttgaggtagccgttataagcacagctccaattagaatgtctgccccctttagagcttcagcgattgaattttcgttactatatagtaactttacttgattatttattactaatgggtgatttgagactttacaaacatcaatgtcaagtacccatacatctgctcccataccaacaagcactttggccgcgttcatacctaccacaccaccgccaacaactacagccttagccgggctaacaccagcacatccgccaataagcatgcccctaccaccgtaattagcagcaagtagcgtagctgcatgttgagctgcaaatttaccagttacttcgctcattgcacttaatattgggtagttacccattggtccagcaatggtctcaccacaaatagaagtaactttagaatctattaatgccctagctagctctgatgaataagccaaatcaaggaaactatatagtaccatgtctttacgtagaaagcgaaattcctcctctgttggctccttgcatttgactagtagatctgcacattcccaaatttcttttgcattctttagcacagttgctccagctatctcatagtcattattattataacctatgctagagcctagcccatcttctatatagattttatgactaggattagaatcttttaacaaagctacatcgctaggcactaagcctaccctatgctcatgattcattatctcctttggaacacaaatattcataaataatccttaaatac

SEQ ID NO: 3765 - DNA, 23111 bp, synthetic construct
  misc_feature 1..23111: note = Synthetic
  source 1..23111: mol_type = other DNA
ctagacttggttctaaaaaagtataacgttctacaaactcatcaaatccccaatctttagcgagtaatttatccataccgccaaatactaagtcaaaactttcacccacacacattgtgtcaatcccaagtcttttggcagtgcttaacgcaatatcaatcaagggttctatggaatggcaaggcacaccatcaaatgcaaaaatgtcgggcaatctcgctacaacatcttcccaataaacaggcactacaatatgctctagcccataatactctgcatatctatgcgcattttctgtctcatcaatagcattaggtgaacctatacattttaatgtaaaagcctttgcgccttttgggagataggaagcaacaatagcagaatctattcctccgcttagcataatacccgtgctgttgggattaagtccttgcatttttttagcaatataagaatctagctcttttgcatctgcaatagtgtctatggtggaatctaaaacaagatttcgatgcgataaatgaggaaaaaaattcctagactcatctgcaacatacctaaaagccaaatagtggctcatacaatataccttatcatctagtatggaatcacttgttcccataattactcctttagtaagatttacagcaaatatgccctcaaatacaaacaggcaacataagaaacaaatagtgcaaaaagaataagtaaccgaaagaaagtgaaagaataaaaagtaagaactagaagtgatttataatatgtagcacaattaagtgctacccccccccccgatatttatcaaacacttccacgaaagtgtttagattatatatcataaatttctcccaagcggtgaaacaactcaaatcattgcttttaaaaatttgtgtatgcaaatccatagtaaaaggctttttcttatcccataaggcaaatggaacaggaaagccttttttgacacgattaatgatagattctggaagatatgatttagcaatatattttaataaaaacttcgcaatacaatatttatcgctaaaatatttataatctttaatatattgtggcacaggaatatttgcacatactttataatcaaatggaagactatttacaaaatctattaatgcagaatctaaaaacacaaaaccattttcaaagccacaaaaactaagtgcattagcccctctatcaactaagccacgagtatgcaaagattgtatgaaatgtagcataatattacgtatatcatctggcatatttaccaaagacaatggggcaatgagttccatatcatctacaatatactggtcgtgaataattgattttaatttttgtgatgagatataacgatagttggataaaatatagcgataaaaatctttcttgtccccttgaaagctgacatacatcagtaaattatgagaatagccgccaaacaagtcatctgcaccttccccacacaaaacaatatcacaacaatcttttctagcctgtgtttcagcataagcaagtggcaattcatttgggtgtaagggtgcagccttatgcttgattaaggctttcatcaaagaatctttgtcaaaaaaatctgtgtaatctagcaccttttcataatgaatagtaaaaaatctattggcaacttctctagagtattcaaactcatcatctccataaaagcccatactatatgtgtaaatttccctttctggatatagtcttttacatattgccacaagtaaggagctgtcaagtccgccgcttaataaaataccaattctacgcgcattttgaaccttttttttaatagattctataagtaaatattcagctattgtagcagattgactaatacttatgtctttcctagtatcaaacctaagagaattaaaggaatctaaatgactcttgcgtctaaaatcatcaaacattgtccaatgcaacacaggataacggaagctaaaaaaacttgtgattccataagcactataatcactaaagccatttttacaaacagcctgtgataaattctcataatagatttgttcatctattttatgaaacctattctgtaatccaaacatcatttcatacattatttacccttactcaactttactttatttctgctaactcttgtttagtcatttgagcgcccggtgtaacttgctctccctcgctaccataacaataatagcacgcactaattggagaagctgctcgtataaagtcttgtaaattcctatagctaaacacaggcagcaccccccccccccccgaatctcgtaagggtgtcaaatattctttgagcattcggtcgcacgtgtatgccatctaatgcacatagagaaaaattttgcacaatatgtgaaatagttgccctagaacaacgcgtaataaaaccattttccattgttaaacactctttggcaaaagtgcaagaatcaaatactttttgcatatattcttctggcagtctcttcatatatttgtcgccacatttgctccacaaaccttcgcccctataaacattcctccgaatcacagctacgccatatttgtctagcatttcttctagtttttcagcactttttgcattcacttctccataatcagacaccctaacaaaaaattttttatgctgtaaaagttttaatacaggatcttttggaataatcgtggcatttgtagccacacaaacatatcgtattctgtcttgttttgctacaaattctaaaatatccttacaatgaggatgcaagaaaaattcaccaccctgaaattgtaaataagcaatcctagattctgtgatgagcgcttgtatatcagcaataatctcttcgtaaggataaaatggtaattgctttgcgagatatggggagaagttagcacaattcctgcacttcaatgtgcaattttgcccgactatcacaacaatattattaatcgtattaacatattgtatgagcagcttatctttgtagctagattctggtaaaagttgaataagtttttttcttgcaaatcttccaatcttatacataatatccatattgcactcctccattattgattttgttctgcttcttgccgaagtgagagtaaaacattattaagcaaggttgaacttgtgccttgtgtgtatggaaaatatacaattctcacacctctttttgcaaattcttcatcaattttttgccattttggcgtagcaaaccaatcatcgccaacaaacataatgtcaaattttaatttatcgtgcatagcaagcttgtccatattttcttgtggaataacagcatctacaaatctaatatttctcacaatttccattctctcgtgaaaaggaataactgcttttttgttcttataacctactaactcatcagtagtaattccaacaattagcttatcgcacatagattttgcattacgcaataaattcaaatgtccaatatgaaacaaatcataaacaccagttgtataaccaactatcattgttgctcctccaatcacttataggttttttgcatatcttcaagtaatactgataaaatagtatttgtgctaccattcttaggaaaataaaaattctgtttcaaaatttcatccctaagagcaaatctagtaaagaaagttgcctcatagtcatcacgaaatcgtgccaaaaactccaataaatcatctgcattactagcaataaaacaaccttgcaatacgcgcaatgcccaccaattaacttctgaacgaaaatcgccctgtgtatagattgtaggcttaccactaagaaatgcgtaaatcaacatagagcttgtgtctgagaccaaaacatcagcgcgtgaaaaactctcaataatgctaggactttcgtcccaaagcccattttgctgcacatcatttttaaaactatcccattgcgcttgtgtcataattttttgattatggacaacataatcgtggagatttgggtgcggacgaaaatgtaaaaggattctgctagcttttgcttctagtaacagcaatttggtatagcttaaaaaagtggagtgtgtctccttgacaccccaccgaggcatatagagcacacgaatgcgatgaggacatcttactgaatctggtttgagtgatgcttgatgttgctgtatagtttgtgcgctattagcatatgcaatcaattcatcaaatcttgcgcacccggtaactttaattgtaagcagacttttatttttctgttgagcacctgcaacttgagcgtgaaatgttgtaggtgaaaataggtagtcataataacgtagattatcctcactataggcgcaaacatcatcgtgtaattcaaaagcatatactccatattcaacatagcaaagcttagaaataattgcaatatgtctgctatgccaagtttctggacgtagcccactataagggcgagtagtaaagcaataatgcgccatacaatcactaggggtgagataggtcattgcattaaaagcgtgattctcttcccatttatcaaatcccaaaatgcaaagcaagtttgtttgtgtttgtagggattgagagaatagagagttgattacctgtgcgtaagatttatgcttttgctcttgattgattcttaattctgcacaaactctatctaaatcttcttttgtaatgacaggacaatgcattttgtgagcaaatgtttgcaagcaatgactagcacctaaatcataaaatctattactgctgacctttgagggcatagcaagcacaatgacttcaaaaactggattttttaaaaaagtgtgcgctattggctctaacgcctcccaacttgctccccaatcattgtaaaaaacaacacgaattttatatgtaatgtctaataaatcagtattttgcggggggggggggagcaaatgcactaggggcgcaaatggtgcgagattgaaaaagtgtattaaagtttttctgctcttgatgtctagctatggcttgacgcattgattgtaatttacgccaaagcatagtaggacacagctttttgactatctgtttgaatgtcctaataacctttactaccaccactatctccaaatatgcttgtctgcctcttactgcctttcaagcttaacatcttaggctataaaatatatgcaaagtatcaaatacaaaaacaaagagcggattgtaatacaacaaagacaattttgtacttaaaccttgtaaaatctaagaatgctaccatacaaatatcgttttgctcaatctcttaaatagcttatatatcatctcgtctcaatacccaatgccgcagagatacaagccattaggcttaaggacaaagcggtgcgctcataatttggtagcgatacaaataaaacatcaatcgcaatggtttgtgtgccttgccttacttaactagcatattgattttatagaaaacttcatatttctttttgtcttaaaacataaaacaccgctacgccaacagcactccaaactataagggcgacaattgaaggagttttaagtgcagctggggaaaatggcacaaactcaagcaataaaaatacaatactcaataaaatactaacaaggtttagaatacttaatgaatgtaactcgcgccttttgacataaaaagctacaatactcacatataagaatcctacgataatccccacacaagccatatctacaatatagagcaatgcctctctgccaaaaatcaccatagagcaagaaagtaacccaacaatacatactatgcgataggatatgccaaaacgatttatatctaaaagactttttggcaaaaagtgatgagtgcttaaggattctaaaagtttgcttgtcgttataaaaaagccgttaatgccactcaatatagcacatagcacacccacgcacaaacacactactccagcataaccaaaggactgataaatcccctcatatatcgcccaaggatacgagagaatatgataggcatctacacccaaagcaacaatacaaataagcaaaacatagagtatatagccaatccaaattgaaagatatgtgaaaagattaaaaatgcgtttgttataatgtatagattctatgatttgtgtcgcacattcaaagcctagataagcccaaggagcaagtgaaaaaacaatcaaaatagaatggatatttaaagattcaaaatgtatataagaactaaaatgtatttgcgatacactatcaacactcatcataataaaaaataccactacactgccacatagcacaaacacgagcaatttctgcaatacaaaagctattttgatacctagaacattaataaccccaataatagcgatacttgccgcactcacaagaatatctgtaagatatataggtgtatcattaatatgatacaaaaggacatagccgcttaagcccaaggagttacacataatgtttaaggcggtagcatttaagggaataatacacaaatacgccaaacttaaaaaccacccacaaataaagccgtgtgtcctacctaacacttcaagtgtaaagtaaaattcaccaccgcttttccgcagtgatgtaagcaaaaaagcataatttgaggcgataacgcaaattgctaccccacctaaaaaaagcccaataatactctcgctcaaaccaatgcgcgataaaaacaaatcttgaggtaacacaaatgctccccaacccacaatgcagccaacacacaaaaatatgatattgacatttttcattgccacatctcgccaaagattctatcataacgatatggctcaaaacgcgcagcgccaccatttggagtaaatgtcagctcccctgcaaagattctattttgtatacaatacaaatcaacgcgcacatacttaaatggtgtcgataaacacttagctattgcgcacatatcacgcaaagattcaggttttgctgggggaatttcactgggcggattgagatatgttatatctaagacattccactgcgtgtcaaaaagtgtattgcgcgtatgggtagtgtttgccacttggataaattgaggcacaccgccaaagcaatggaatctaaaatcgtgtaaatcttcccccaatagctcctctgcaaagattctaggctctatatctttgtaatgccactctctatacatcgtataatagtttattttaagatgctctgtgagtttttgtgtggattgtgtaagaattttagaatctgctagaaaaacatctttatcaggcactattactacgcccccacaatcgtgattggtctttaaaacaaaactttggggaagctgtgaaaagtctatctcatctatgctcttataaataccataaagctttgggagataaggacaagtatttgtagcaaacagcgtatctgtgagtaaatcaatagactgaaagagtggagattgtggagagaggatagaatctaaatatgtgcgattgcgaatctgtgttgttctgtgggtaggattagattgtaagctatcttgtgggttagtttctttgtagattcctaaaatattagaatctatttgttttaggctataaggctgctcccccccccccaacaactatttgcattatcacactcttttaggagcgtagcaatatacattcttgctttgagtttatctgctaaggcagtataaattggacttctatcaaacaagattctatgaataattttttcattgtaagtttgaggatttttaaaatccggcacatagccaaaaacttttttatgtcgcttaatgaagtattcttcatcacttagtttagctaaggctctctctttccattttgcccgtattggtcttatgaagtttttatagagacaattttctcttacaatatcttttattcccatttcgaatcctttgtagctctaaggtaacaaaagtataatgaaaaataataatattttaacttaaaagggcagcacaaatttttgcgcaaaatattacaataactcgctctaagcgcatcactcctaatgtttttcactatcttggttttctaaagccttttttgcactctctgctccatttttccatagtgtatgcctgtgtaaaatgtagtctgcactcacttttccactaaacattccactaagcaaaggacgatttgctttaaagataaaagcagctaaatgcccaataattgctaaaatcatcaaaaacattcccaaattatgcagctgcgtaacccaaaacattgtcccctcacttagattaaatcccgctaggtttttataagttttaatcattccagtaacaaccaaaagcaaaatcaccatcgcaattcccacataagcaagtctttgctcgggcaaatatttctcacttggtggctcctctcccttaaacaacatcgccttaatcacagcaatgcttttaccaaaatcgccctttttagggagtatatcaaactcctttcgcccaaaatgaaacatcaaatggaatcccacaaagaataataaagcaatcgcaaacacataatgcacaactaaagagatagaataatccccgctccaagccattaaaggcaattcattgagcatataacgcttactgattggcatttgcaagattccgctaaaaataagcccaaaaatacttattgcaacaccccaatgcacgattctattttgcgcactttgtctttgtatttttgcctctttcattttctctcctttttatcggttctatttgccattgccacagcaatacctcctgctattacccccgcaacaggagctaaaagcacacttttaatcaaagcagaatcttcactcacaaagtttttaattgcaagattcatatgcggaatccccattttttgtggttgttcttgtgtgaaattgtgtttttggtttaaagattcttggatttgctcaaacgacactggcgagacataaaatgtagaagtgccaccattttgcttatctccatagatgaatgtcccttgcttttcgcccttatatgcttgtgctaacgccctagccttttgcaatatctcttctctatctccaaagattatggcttttttagggcattgcacctcacaagctggtttttgattcttggcgagtaaatccgcgcagctatcgcatttatacatcgctcctccccctgcaagtttgggtgcgattttcaaatagattccaactcctgcttgtctttgtggaatcccccaagggcatacatctctacattttgcaccgccaaagcaatattcatcatcaatttttactgcgccattagaatccttagaaatcacgccaaaggggcagagcttctggcaagtcgggtcatcgcagtgcatacaacgtctaggcacatatatgtctctatcctcaacctttagagattccacataagtccaattataaggggttaaacgcttagcatttgctctatctttggaataatcctcatagacctttcgcggaaaataatatggaatctccgctattggctcgggaaaatttgtcgtattttttgctttacacgcctcaacacaagcaggaatctccctatctctgcacccatcgcacaatcccaaatctataatggaagccattttatattgtggttgcttagaatctgtagattgtgccgcattaacgcttacagcactcacacttgccacgcctagaaattttaaaaaatttctacgcgatgtatttgtctgattgttttgattggtttcttccataattttaaccttgatttagccttaaaaatatggaagtatataaaattgcaaagaaaataaaagtgatattatcacatttgcactaagccctacccaaacattccattaaagtcattttcaatttgagtatatctagtgcagcggcaatttgtctgcgatgatgcgtagcgtggtaaaacaacgaaatagaataaagcaatataaatctaagctattataaacaatatttaatgtatcgttaatgagttttaatagatggaggtttgtagatgaggatttttggttttgatataggcattacaagcattggttgggcatatgtagagagcaatgagcttaaagattgtggggtgagaatctttaccaaagcagagaatccaaaaaatggaaaatctttggcattgcctcgtagagaggcacggggagctaggcgtaggttagcacggagaaaagctaggcttaatgcaattaaaaggctgctttgcaaagagtttgggctaaatgtaagtgattattttgcaaatgatggggaattaccaaaggcatacgagacaaccaaagataccaaaagcccctatgaattgcgctctcttgctttggagcaaaagttagagcctaaagagttagcaagagtgattttacacattgctaaacatcgcggctatgggaacaaacacgcaaaaacaggaagcgataaagattctggaaaggtgctaagtgcgattaaagtaaatgaaacagctatgaaagataagtatcaaagcgtaggtgaatatctctataaagaattttatcaaaagctaagattagaaagtgagaaaaaaggtaacaatattacaaaagagtttaaaaatgtgcgcaataagggcgaaaattacgagcattgcgtggcacaagagcaagtaagggcagagttagagctcatctttgcaaagcaaaaagactttggggcaacttttagcgaaaattttgaatcacaaatcatagaaacagccttttaccaaagggatttaaaaagttttgaagataaagtcggcaaatgtgtgttttatgaaaatgaaaatcgcgcacccaaagattccttaagtgctatggagtttgtcgcgctcacgcgtattatcaatactttaaaaaatcttgaggagaaaagtaagaatcttggtattggtgaagtgtatgggaaagataagattcaagagattctaaaaattgtgcttgataaaggtgagatgagctataaaaaattgcgtgagattttacaccttgatgagcatattttatttgctaaagattctaagcttgattatacacaaggagtgcaagaagccgaaaaggcaaagtttattgagctaaaaaatcttaaagcttttaaaaaagcaatgggtggagactttagcaattttgctcgtgaggagctagataaaatcgctaccgatattaccctcgttaaaagcaaagaaaatttagctaaaaaattgcaaaattattccgcattaagcaaggagcaagtagaagccttaagcaatttgagttttgcaaaacatattgatttaagccttaaagccctagaacagattctgccctttatgcgtggggacaaaacgggtaagtgtttgcgctatgatgaggcggtgaaaaaggcagaattgcaagaacatagaaagcataagcaaaagggcgagtttttaatcccgctaaaagactatgaaccctatttagcaaatccagttgttgcaagggcattaagcgagtatcgtaaggtgctaaatgcacttttaagaaaatatggaaaagtgcataagattcatttagaatttacgcgtgaggcaaaactaagcgcaaaagagaggcaaaagtatgaaaaagaacaaaaagagcattttgaggcgaatcaaagagcaatacagcaatgcgagattctaggattacccattaatggcacaaatattcttaagatgaagctttggttagagcaaggggaatgttgtgcttatagtggagagaaaatcacaagagaacatttgctagattctaatgccttgcaagtggatcatatttacccctactcgcgtagctttgatgatagttatatgaataaggtgcttgtgtttgctaaggaaaatcaggataagggaaacaaaacaccctttgaagcctttgggggtgataaggagaaatgggataggattcttagccttagcgcaaaactccccaagcaaaagcagcgcagaatcagcaatacaaactttaaagataaagagggcggatttcttgcgcgaaatctcaatgacacaggctatattgcaaagttagcaagtcaatggacgaaagattgtctagagtttgaagatttgcgtgaaaatgaagtaacgattgcaggagaaaagggcagcagtgtgcatatagaggtggtaagcggacagcttacatcaatgcttaggcattattggggcttgggtaataaagatagaaacaatcatctccaccacgcagtggatgcagttatcttagcctataccaacaatgcgatgattaaagcatttgcaaattttagaaaaaatcaagaggaaaataagaaaaaattctatgctaagcaaattgcagaatctgaatacaaagccaaaaaagcattttttgagccttgcaagaattttaggcaaagagttgaagaaaaaattaaagaaatctttgtctccaagcctcctagaaaaagggttagaggggctttgcaccaagaaactttttatccttttgaaaaattatgcaacgataaagaatattctgaaaaattaaaaatggattatggcggggaaaagggtatgcaaaaggcgattgctcttggaaaaatccgccaaattggcacaaagattgtgagtaatggtgcaatggtgcgcgtagatatttttaaagacaaaaagggtaaattctatgctgtgccaatctatacaatggattttgcacttggaatcctgcctaataaagcagtagccataggcaaagataaagacggagtgattaaggattggatagaaatggattccaattatgacttttgcttctcgctttttaaagatgatttaatcttggtgcagaaaaaagaaatggaaagggcggagttgtgctattttgtaagttttggttctaccaatgcacaaattaatgtagaaaagcacaacaataaatttgagggcttaagcgagaatgaaaagattctctattctaacgccacacaaaaggaggtggcaggtaaaagcataggaatccaaaatcttaaaacttttgaaaaataccaagtctcgcctttgggtgaagtgcaaaaggcagagtttgaaccccaccaagagattaagctcaaaagcagtcctaaaagaaaagactaagatttctataaggagggcaaggaatgtttgattcagcctttcgcaccttatttttaagcacacccgcgcgattaagcctagaggataggcatctttgcataacccaaaaaaacaaagaaagtgtaaagattccacttgtagatattttgtgcgtgatgctagaatctcatcaaatcacattgacaaatgcactgcttaatgcatttgctctgcataaaatcgttgtttttacctgcgatgaatcccacctaccaagtgggctatttatgccatttttagggcattttagaagttttagcgtgttgcaatcccaaattaacttaagcaaacaaagaaaggcgattttgtggcagcaaatcatcaaggcaaaaattcacaaccaagcccttttactaaaaatgcaaaacaaaaaagaatataaggagttagaatctttagcaaaaagtgtgaatttaggggattcaaacaataatgaagccaaagcagcggcaatttatttcaaagctctttttggcaaaaacttctcccgcaaggtgcaaatttttgaagatagcaaaatgggaacgataaatgctgcactcaattatgcttatgcactgacgagagggattatcgcaagaagcctttgcgtaagcggactaaatcctgcacttgggataaatcataaaaatcagtttaatgcctttaacttagcagatgatttgatagaaccttatagaatctttgcagattctgttgttgtgcagatggttgaagttggagaattagaggagagcttaagtttgcaaaatcgtgcgaggctcgtagatattttgcagagtgcggttatcgtagaaaataagctttatccacttactcgtgcaggtgttgtgagtgtgcaaagtgtagtgaaatgccttgagagagaaaatttcaagcttaaacttccgctattttgcgaggaaaaaagtaatggaagaaaaatttatgagagtgctagtgatgtttgatatgccaacttgcagcaaaaaagagcgtaaagattatgccagattccgtaagagtcttatcaaagatggatttatgatgttgcaatatagcgtatatatgagaatctgcaaaggtgtagcaagtgccaataattatttagataaggtgagtttgattgtgcctcccaaagggcatattagggcactaattcttaccgaaaagcaatttgataatatgcgattattgcttggcaaaagaagtgagaatgaaaaagcaaacgcaccaagacagcttacgcttttttagtctattgtcaagttataaggacaaagtttctaaagacttaatcgctaaaatgtttgaaaatacttattggtaaaaagatttaaagtagattcggttttaagggattgtaaccctacggagaccgaaaactccttattttagccgcttattaaattctatgtggggattatatcttagattttcttaaaaatcactcatctaagatattttaagcctttaaagtctttcaaataccgcaaaatacgataattgagaaagtatattttaccataaaagaatttaataagcggctaaaacgtgatttggtcccatttttggtgcaagacaaattttaccataaaagaatttaataagcggctaaaacttagcgacagctgtcccatccttatctatgattttaccataaaagaatttaataagcggctaaaacgcaagtatctcaagaatatgtatggtttttattttaccataaaagaatttaataagcggctaaaaccttgttaaatttctttctcgatttatgtgtattttaccataaaagaatttaataagcggctaaaactcacggcaatacgcaatgttcctaaatacgattttaccataaaagaatttaataagcggctaaaacttgaacaaatacatcatatactgatgttcaattttaccataaaagaatttaataagcggctaaaacttatccctgtgtcagctgaatgttttcgtgattttaccataaaagaatttaataagcggctaaaacgttacttatagagcctatgatgagtttcaattttaccataaaagaatttaataagcggctaaaacctctggagcaaattatgttacgcagtggaaattttaccataaaagaatttaataagcggctaaaacgtttgtgttgctcgttataaaagaaaggctattttaccataaaagaatttaataagcggctaaaacttgccagtagaatcagtgtcatcagtagggattttaccataaaagaatttaataagcggctaaaacgttcgtcctcgctttgcatattcgcaaggtattttaccataaaagaatttaataagcggctaaaacggtttgcagaaaaaagattttcaaaaggtaaattttaccataaaagaatttaataagcggctaaaacctcattgatatgcagggtttaatcaaatctgattttaccataaaagaatttaataagcggctaaaacgtgtcaatgccacgacttttatcgacaaaaattttaccataaaagaatttaataagcggctaaaactccagacaaaagatggttttatcggaatgcattttaccataaaagaatttaataagcggctaaaactttcagctccagagcctcaacaggaagtgaaattttaccataaaagaatttaataagcggctaaaactctcctcccgatatgcttaccgcaatttatattttaccataaaagaatttaataagcggctaaaacctgcttcacaatcttgctcactcacttcaattttaccataaaagaatttaataagcggctaaaacatcccgaatgttgaaacaaaaaaggttgaattttaccataaaagaatttaataagcggctaaaactctctttgatacgctctacctgtgttcgggattttaccataaaagaatttaataagcggctaaaactctctttgatacgctctacctgtgttcgggattttaccataaaagaatttaataagcggctaaaactaatactttgatatgttgagcattaacaagattgccatatcattattatgatttcatacatttgataccaaaataaaggaggagcaatgaaagcaaaagttatgagtttagcactgatgttagccttatctagcacgctctttgctacaccgccggtccctacaaagccacagccacatatcaagggcgttttaccagaggtttttaacaatgcgagttttgataaaaaaagagaggctttaaaagcagatttcaaggaaagggaagccattgataagaaaagagaggaattaagaggcaaaatcaaagcactagagctagagaaaaaaatcctagaaatcaacttgcaagaggcaaaggcaacaagagatgatactaaaattaacgcgactttagctcaaatcgtgcaacaagaagcaaagatttcacaagaaaaggctaaagaaaagcaaattatcgccgaaatggaacaaagcgcaattagtaagattaacaagattttaggatattaaggagattctatcaatccgcacaatgcacttgcttggctgaatttctttatcgccgatgtgcgagatggtttaggtccctatttgggtgtgtttttgaaacaacacaactttatggaatcccaaatcgggcttatctccacaattgcctccctttgtgcattactttttgcaatccccttagggattttcatagacaagacatcgcacaaaaaagccctgatagccttttgtatcctcgccatagtctttgcgactttggcaaattacttctacccacattttggctttacgcttttagcccaaatgagtgtagctctgtgcggagtgtgccttgctcccgcatttgcagccctcacacttggaatcgtgggactatctgattatagcagacaagtgagcctcaatgaagcctataaacacgcaggaacagcctttagcgcattgcttagtcttggattcgcattttattatggaatcggtgcgatttttgtgattaccgcgcttatgggcgtattctcacttttgtttcttagccttatacgcagtagtagcattaatcataaagtcgcaagggggcaagaggacgacacgagtatatctctatgggaagccttaagcgataaatccgtgcttatcttgggtgcggcgatgttttgctttcatttgagtaatgcgtatatgctccccttgcttagtcaaagggcgcacacgcttggcattgattctagcggggcatatgcagctgcgacaatccttattgctcaaagcacaatgattgcggtttcgctcgtgtgtatgaagattctcacgcgtcctcattctcttgcagttgctccccgcttttctcaagtttattttatcctaatggctctttgctttgttgctcttattgtgcgcgggggcatagcagcgcattttgaaaatcttatcggaatggtcgctacacagattcttgatggcattggagccgggattacaggcgtgattttacctgttttagtagcgataatgttgcgcggaagcggacatatcaatgctgcccttgcctgtgtgatgactcttggcagcataggcgcagcactaagcgggagtttgggaggatttatagcgcaatattatggatatttttatgcgtatatcgccctctcttgtgttgcctttgcgggattgctgctttggattgtctcttttaaaatcttagagacacaaaggcggtggggttaggtggataaagcaaactaaaacgcaagattatacctaatttcccctaataattcgtccaagaaaatgcacttttattcgtatcaagctctttaagaatccgcatatcctgcgcacttaaagaaaaatcaaagacattaagattttcttgcattcttgctcttttagaagtttttggtatgacagagattccttgttcaatcaaaaatcgtaaaaccacctgcgcgggtgttttgttgtatttttgtgctatgtttttcagtgtgggattttctaaaattgaacctttccccgcgataaaaggactccagctttgcaacaaagtttttttgctcttcatcgcccctcttaagggcttttgttggaggagtaaatgtgtctcgcactgattaatcgcaggaatcacctcacaagatttcacaaactcactatacgccttcgcaccaaagtttgaaatacctatgctctttaaaataccttgcttataaaagctctccattgctctatacatcgccttagattgagagtatggcatatggataagcaaagaatcaatataatcaagccctaaagtttttaaggatttttcaatggatttttttgctaaatcctcgctacttgattctaaaagcttagtttggataaaaaactcctcacgtttgattccgccttttactgccgcatttatcgctgctccaagctcggcttcattattatacatctgtgcgctatcaaagagccgataacccacctctatggcttcgctcatcgccttttgccctgctttacccgtaagcgaataagtgccaagcccaagaatgggcattttaacgccattattgagggtgagagtttgcatttttgctccttttttggaaatttgtttcaaatcttgtgcgaaaagtggataaggtatataagccccgagtgtcgctactcctgtgaattgtgctagattctttaaaaagtccctacgatttgtcattatacgatttcatagaatcctccttgtttgtaaaatagattgtgtaattatacagcctgatactaagtatttgtcaaggggtgaaagaaaatatattaaaaattatgaagcaagtattgcgctactaatctagctaaaagccaagtaaatataaacctcgtagttctttagctccaagcgaagctaaagatttcaagctacctaaaatttatgatagtgcccttaatcccacgacagagataataataagtgcgatgaaaaagagtttttttgcatttttgctttctttaaaaaacaccacgcccacaagcacgcctccagctgcgccgatgcctgtccatatcgcataggctgtcgccattgcaatgccctgcatagccattgatagcagagcaaagcttagcataaactgcaccaaaagcccaagcaaaaagatttttcgcccacttagggagtattttttcatcgtaattacgcctatgatttccatacaaccagccattatgagatacacccagctcattttgcctccttgatagaatcttgcacgatttcatcaattcccaaatcgtgtgagagcgtttctgcgagtttttcgccttgagtttcctctgtcttatctgctgaaagctttagccccaccacgccaagaagtaaggtcgcgataaagaggattttaagaagtgagaaaggctcaccaaagataaggatttcagcaagtgtaatgcccgctgtgccaatgcccacaaacacgctataagcaataccaatctctaagacttttatcgctagaatcatacttacagaggatatgagaatcccgattcctgtgagtgtgtaaaaaaagagattatcggaatattttaacccactcgcccaaaagcattctacaatgccaccaaaaagcaccaatccccacgcgagattgtgggtaagtttgatatttttcatttgtttcctttgttttgttttatacattttatgggttcaaaaagccaaagcccataaatgtaattagaatttatgtaatgatgtgatgtgtaaaggtgagaagcagagctttaaagtgaggagatagagaaaaaatagatgagaaacgcaaacgattgatagccttggtcccaaaacattgcctatccctccattttaagaatcttaaatttgtggcattatagcataaaagctatatctcttgcactgccaagcacaacacttgtgtatttaatagtttgcaaaaaagtttaagaaatttatctttatctaccctaacattccattaaagtcattttcaattttgagtatatctagtgcggcggcaatttgtccgcgatgatgtgtagcgtggtttaaaagtgcgaggataaaaaatccacgagattttttaaactctacacccggaaagctaagtgtggcaatgctttcaaaatcctcaatggattctatcaacgcgatgattttgctatctaccttgcttcgcaatgcctcaaatgccgatatgtcctcataaattgcactttgcaatctctgtttagatgttacagaggcgaaaatctcctctacgccctccagctttttgggcgcaaacgcaccaaaagcccccaaaacaatgccaatatcaccacagaggatatgctccgctgtttgcatcacactgccataatacaacccacaatccttatacaacacttcctttgggcatttcttaaaagtcgcaaacatatttgtatttgcaagctgattgtattgcgcctgaagcaacaaagtctttttcattttctctcccttttgtgtaaaatctgcgccattataccactttaagattctatatttcaatgaggcttattctttggcacattttaagctctttggaagagagtagcttgataagcgcagcggcataagtgctataagacactttgctttcgccctttgcattgagcttaaactctcttcgccaagtagaatcctatctcaaggaagtagcaacttattgcctttactcacaagtttttgatagaatctgctcaaaaactcaaggagagagtatgctcaatgtcatttttgatatggacggcacactcattgatagcgaagattgtatttgtgcggcgattaatgaaatacgcgcagataagaatctgccaccgctagagtatgactatatcaaacgcgtaacgcacacaccgggtttgggttgtgcaaaaatcttttatcatatcgatgatttcccccacccaagctataaaatggggtttgaggattattttagcagacattacgaacaagatgcgcggctctttgagaatgtagagtggcttttgaatgaatgtaagaaaaatggctattttttagctattgcctcaaatgccccacaagaaagtctttgtcctattttaaagcgacataatattttgcatttttttgacgaagtgctaggcgcacaacaaaatttagaatccaagccaagtgcaatgatgatagagagaatcttgcaacgcgcccctgtgcgtaaaagtgcgtttgtaggtaatggcacaaaagatagaggtgcggcacaaaatgcgaagattccatattttcacgcaaaatggggcatagaaaaagataatcttaaggaagatgaatttaacaatgctaaagatttgtttgcacaattgcaagaattagcaatggcataaatgataaatctttcatataaattatatgcgctaatagcatagggcaacaaaataagcgagtttcaaccaatgccttttgattctaaagcctcacaatcatcaaagatttaaaaaaagcaaaactccatatcctaaaaaatatgctttgtaacaagttgtgcgtttgcaaagagtgagagtgtgaatcctgtaatatcaaggctcacaaatatcacaaataaaagctgattaaagtttgagcgcgtcagcaaaaaaagactaagcggaaataatataagccccaatcctaaaaaaaaccacccaagcgcacaacatagcacagcaaggtaaaaaatattgtggttattatgcggattcatatcatttcacaagcacgcgttcaagcacttctttaatatcgcttacgccgataatctctagcttatcaagcacttcttttggaatatccttcaaatcacgctcatagtttttttgcggaataagcgcagtttttatccctgccttatgcgcagcgataagtttttcgcgtaatccaccaatagcaaggacattcccgcgcaatgtgagttcgcctgtcattgcaatatgtgcgtaaattttagaatctgtgagaatagaggcaatcacacacgccatagcaatccccgcactcggtccgtcctttggtgtcgcgccttcaggcacgtgcagatgaatatcatagagctgataaataggatttttgtgagtttctttaggctttagaatcttcttatcaagtaacatttttaccacagaatgcgctatgtgcgcggattctttcatcacatcacccaaacttcctgtgagcgtaagcgcacccttgcccctaatctttaacgcctcaatttttagcacatcgccgcccacactcgtccaagcaagtccattgacaacaccgattgtgtttttcttatctgctggggaaatttcaaacacgattttatccaaaaactcacccacattgtgcggtgtgataactacattttttttgccctttaaaatcaaagtcgcgcctttacgcataatctgtgcgattttatgtcttaggcttcgcacccctgcttcgcgcgtgtaagattctataatagtcttaagcgcgggagtggtgatttttagctcatcttgacttaagccgtgtttttgtaactcctgcgggataagatatttctttgcaatctcacatttttcttgcggggtataagaggagatagaaataaactccattctatcacgcaaaggtgctggaattgtgctaatatcatttgcagtagcgataaaaatcacctgcgacaagtcaatgtcaaaatttgtataataatctctaaaggcgtgattttgctccgggtctagaatctcaagcaacacgctcgtggggtcgcctcgatagctcctgccgactttatcaatctcatcaagcaccaccacaggattcatttcttttgcctcaatcagtccttgcgtaatgcgtccgggcattgcgccgatgtaggtgcggcgatgtccgcgcaattcattcacatcttctagtccaccgagagcaatacgcacgagttggcgt

SEQ ID NO: 3766 - DNA, 23099 bp, synthetic construct
  source 1..23099: mol_type = other DNA
  misc_feature 1..23099: note = Synthetic
gcttaaccccttagtggaactattgtttaattgcactaagctaagatcaagcttttttttagcatttacaaattcggtgatgagtttgtttttcttttcaacattaggtgcgacactttcgtgtttagcaattttgatattttctaagtcttcttcagtcaatgctatgagtttatctaagatagcattcacctcatctaaatgttctttaagcattttatctcctttttaaactcttaaaaaggagataaatttttagattagagaatctgccattgcagaagctgtggctttaagatcaatcttataagtgccatctttaacttcttgtgcaatctttgaaactttatcattctccattttttgagtttcgtttattttagtttctttatcagttttatttgtatttaatgctgcatttgcaacataactttgttgtatagaatttatcattatctgcctccttgattaaaagtctttatgaaccaaatcggcttttaagataaaaacttaacctctttctttcaaaaaatcaaataataattttgaaaaacctaaaccaccacttaaagctttactcatcgtatcattatacatagaagaataaatctcatcgctcgcatcttttccaaaaagagaattttgattttttaaagatatatccaaaatttctttgattaaaaaagcttcaaaagcgtcagtttgttcctttaaaagctcatcttctttcgtttgagttttaaattcgcttttatcaattttattttttgtagcatctaataaagctgtgtttaaatgataagtgcttaaaaaattatccatcatatcacctctaaatcggcattaatcgccccagcacgttttaaattttccattatagtaatgatgtcattaggtgatgcaccaaggcgattgagcattcttgcaacattagccaccgttgtttttgaatttgaaatgcgaagagtgtttgaagttgggtctatcatacccccatctttcatatcaatttcattttgtgctgctggattatcattatttggttcaatttttatagtaatatctttatgtgtaatgagcacaggctcaacttcaacatccacccctgcaatcacggttccggttctttcatcgataatgactttattttgcggagtgtaagcaatgtcttgctctaatactcttgccataaattcaacatttgaaagctcttcaggtttattgagtttaatcgttcttgaatcaacagctcttgcaacactttcgtcaaaaatagtatttaaaaccctttctatatcgtgagcggtcttaaaatctgctgtttttaaactcaaggttaaatcattattttcgctaaaattctgtgaaatttctctttctacattagccccgcccataattgttgctgcagtagtgtgtgtccctgctccaccgggtcttgccgctaaaccgccggttgaaagtgagccttgtgctatggcataaatctcaccatcaattcctcttagagctgtaagcaaaagagttcctccttgcaaggacttcgcatctcctaaagaagcgaccgtaacatcaagtttatccccgcttttagcaaaagctggaatggtagctgtaaccataacagcagcagtgtttttggacttaatatcatcaggatcgactttaatgttcattccttgtaaaaggttggaaatggattgaagtgtgaatttagagcttgtcccatctccacttccattaagtcccacaaccaaaccatagcctatgagctgattgtccctaacgccaactgtattgaccacttctttgatttgaattgctaaaaggcttaaattcattaataaaatcgtcaataaaattctcatcgcattttccttaaaaatactttagattaaaagaaagcaaaaaacattccaacattgaagcccttgttttaattcagagctttgtaaggtttttaataaaattttatcttattttagataaaatgttgcaattttatattatatttttaaggtagggattgaaaaaattagtcatagaccttgatggaacacttacaattgatgataaaaatgtgccttatgaaaagaaaaaagtcaatcaagaagttttggaaaaacttaaaatttacaaaaaaatgggttttaagattaccatttttacaagcagaaatatgaagacttatagaggtgatatagaaaaaattaaggctttaactctccctaaaatcaaaacttggctcgcagaaaaccatatcgtttatgatgagcttatcgttggaaaaccttggtgtggtgatgaaggcttttatattgatgataaagcaattcgccctcttgaatttagcacacttgattttaaagaaattactcaattgcttaatacaaaaaagcaacaaaaagctgttttaatcacttcggctaaatacttaagtgatgaatttacccttgagtttggtcaaattgtgccttcatttttacccttaggcaataaaagattgtatgagtatcaagcaaaattatttaaagattgtagaattttcttatccttacctaaagattttaaaatcaatacttttgatttaaaaaaatttaaaaatttaggtataaaaccgctttttgttccaaatgatttaaatcttggtgaatccattgtatattgcataaatttgctttgtgaagacgaactttatattatccatggagattgtttttttaaagatttagaattaattcctaattctttagtgctggcaagagtaaaggaaaattataattgggcttatatggataaggattttaagataaaaaattctgaagagctcgatgaaaatttaatcttagcaggagcttttcacatacaaaacacacgcgttttaacaaggactattgttcgaaatggttattctttttttaagggtttaaaatcttattctaagattttaccttttacaattttgaaaaatgattcttggcttgattttggattattaacaaattatttccattctaaaaaagttattcaaactcaaaggtcttttaacactcttacccataataaatggggggggggaatggtccaaaagacttcctcgtggcttaaaaagattgaagcagaaatttcttggtttgaatctttacccaaagagctttgcattttcatacctcaatttttacgaggacagggttgctattttactgaatatatctacaataatactctagccgaactttttgtttttggtaagcttccaaattatgtttgggtaagaattttttattctttaaaagattttttggataagcttcattcttttaaaaatgagaatcttgttttaaattttgattataaggcaaaaattttacaaagacttgaagaattctctaaacaaaataacattgatttgaatcaaaaatggcaattaggagataaaacattgccttcaattttagaacttgttaaaaaacttgataaatatataaaaagtccaaaatgctacactctaatccacggagatttttgtttttcaaacattatgtatgattttagggcaaatagtattaaaacttttgaccctagaggtatggattttgatgaaaaaatttcaaattttggcgatgcaaattatgacttagcaaaattagttcatagtgtgtttggttactatgattttatcattgctggattttataatctaaaaatcaaagcaaatacaattcaattctcattttttcaccataatgaacttaaaaatatacaaaagagtttcttagaaatttttaaaccggataaagaaattttcgctttaaatatacatttatttttatcaatgctccctttgcataaggattgcaaagaaagacaaatggcatttttagctaatgccttaaggctctttgatgaattttttgaggaggagttgtgattatcatcttccctatggctggactttcaagtcgttttgcaaaggctggttaccataaacccaaatatatgcttgatttaaatggcacgagtgtattttcaaaagctgttttaagttttaaaaaatattttaatcattttaaaatccttttcatttatagaaatatagaaaattctaaagaatttattaaaagagagtgtgaaaaaatgcaacttgaattttatgaatgtgtagaattagaaaaggaaacaaagggacaggctcacaccgtaatgctaggactccaaaaagcaaagattaaagcagatgagagtcttttgatttttaatatcgatacttttagacctaatttttctttgccaccaaatttggatatttttgatggatatttggaagtttttgagggcgagggcgaacaatggagttttgttttggctgacaaaaatggcagggtgcttagaacaacagaaaaagaaagaatttcaaatctttgtagtagcgggatttattattttaaaaaagctaaagattttaaagaagtattcttagaacttcaaagtaaagatgaaagaatcaaagatgaattttatatcgctcctatgtataatgttttgattaaaaaaggagcttttataggctttgtaaagattaatttagatgaaattatcttttgtggaacccctttagaatatgaacatttgatacaatgattttttaagtgcatttaccattcgttttttttttttttgtaaaaattgctttggaatttttaaggaaaaacgatgaaaaaaataagctttgcaatgccaatttatcctccacattttcgtaatgctttaaattttattacaagttttaaaaagcataagcttcatttgcaaagtgatttttacttggttttttctaattctaatgatcaagaaaaatttaaagctcttgcaggtaaagcagattttaaaagtttaattttaccctttattccacaaagaactaatgcaactgcagcaattaaaaaattctatgctttatcttgtttaaaaaaattatatcaatatatcatcgtagttgatagcgagagtttaatcatcaaaaatattgatttaatgaaaatgtgtgatgaattttatcaaaataaaattctttatggtaatgaaacattagcaggaataaaacttgacagaattactaaccgagctctttggcattttaaaaatcatcctcaattaaaaaatgcaaagacgaatttatatttatggtttaatcaaatttgtatttatgaaaatgagtgtttagaagaattttttaagcttacaaaaattaatgagaatttaaccgaagtgctttgggaagattttgaacactatatttatatgacttatcttattctttatagaaattttaggatagaaaatatagaaattatttctcgctatgggatttttgaagcatataattttaaacctacaagcatgaaatttctttatactcaattttatcattgcacccccggaatttataatctcattgacactcgaaaagtttttatgtttatacaaatagatagaaaaggaattcttcctctcaattctccagattatattttcaaaaatgcttgttctcgtgtcaaagaaacattatcttatcaattaggatttgcaatgataaaaaattttaaaggatttaaaatttttaaacttccttttattttggcaaaaattgcaatcaaatataaaaaaatacagcaaaaatatcaatttttaagtcttgtaaatcctattttacagcttccttctttagagagttatgttgattttccaaaggctttagaatgtaaaaaacatttatcttatattttaggttcgactttgattaaatcatataaacgatataaatgggggggggggattagtttttttgtttaaaataccttctatcgtcaaagaattcaaaaaaaagaaaaacaatgaaaatttgtgaattttaaaaatatttttttaatctcaaatcaaagcagatgaaaaatttcttagaatttttcataaaagcttagcgaagttaaaccaaattttttaagtttaatccgcttaaattcattaagaaattgcggggtgtgtaagtctttatgatgctctaaaatcaaagctgaaattttagacgaatcaagctgatttaacagggtataaattctttcataaatcccctcaaaacctttccttatatcaaaaggcgggtcaaaataaaggacagccaaagcatcaatttgttttaaaagcttaggtaaaagctcgaagctatctccatttaagatgtgtaaattttcatctaaagcctttgcatttttcaaagcaatatgataagcctttttatcaagctcgatggcataggcttttaaagcataattactcaatgccgttgctgccatcaaagcactgccaccaaaagcttctatgaaaattttatcccttaaattttgtcttaaaacattaaagacgcaagaacagacaatgtttttagtgcttcttgtgctttgcaaacttggcaaaagaagtttttttcctttgtagcgaccgcttggaatgcttgtgaaaatttttttagaattttgctttaaaaaatcgcttttaacttcactcattcatcaaggctttaacgagcttatcttttaaacttaaaatggctttattgattttttcttcgtattcttttttaaattcatttgcaattgtatcgattttttgttccaaaatttttctttgctcttgggctaatttttttgcagcgattttcaaagcttcatcgaattcctctaaagaagttaaaagcttttctttgctaaaaggcacttgtaaaaagggagaattatcattgatgataaacaagggttttgcatgggagattttttcatcacaaacgataaaatcacaatcattttttgttaccaaatgttcttttaaaaaaagctctaaggatttttctaaaatcaaatccttacaatcaactgcaattctcatatcaaagtaacttttaatttatgatttttcaaacttgcactctcttcaccttcaatgagtgcaatcaattcttgagaatttaaaatataaaaatcctcaaaatccctcccactttctttcatcaaatccttacaacaagtatcaaacatataaaaatcttttgcctcatcaacaactaaaaaatcacaacccttatcataagcgtctaaaacaatatctgcggctattttataggctaaatttacattaaaatttaaaagttcaaaaccgcttgatggatttttaaaatccataatcttagccttaagtttggtttttaattcttcattttcataaccataaaaacctatattaaatcccttaaaatcgtgctttatatgtgttagttttctcttttcttcttttttaaattctttaaaatttattaaatttttatcaatcaatcctgcttgagaaatttcatcttttaacttcttaataatttgctctaaatccttgtttttagtaggaagatgataaaaaattccgcgatttttatctgcaagaatttgtaaaaaatcaagttttttcccgggatatttttcaatcattttaaaaataaaataaaacaaagaatctccaaaacaatcttgattgaattttaaaatttcacttgtataataaagataatcatatttttcatagagttttttatcctcatcattaaccaaagaagcaacaaatttaaattcgtctaaaaaatcttttttatcaaagattaaatcttttgtagctctttttaaacttaaaggttcaatcataagctcaaaaccttcttcttgtaaaatttgttctaaatttgcacagaggggaaaaggcttagaattgactaaaatataagcattttcatcttttggaaaatcaaaataaatatcatcatcttgcacctgcaagagcaagtcataaagagccttaaaattttcataattatcataaacatagggcttataatagtcttcataatctttatttttatcaaatctaaaaattctaagttctaattttttcatttgaatttcctctgataaatttttattttcaattatataaaaaaattctaaaattcactagaatttaaaaaaaaattttataaaataaattctatggataaagaaaaattgattatcaaagcctttttaaatgaactcaatggagatgatggagcggtcattaaaaattggtgtttgagtaaggatttattctttgaaaatgtgcattttaaaagagaatggcttagtttagagcaaattgcttcaaaggctatgcttgttaatatttctgatgccattgttatgaatgctgtgccccgatacgctcttttaggacttgctttacctaaaaatttaaatgaaaatcaaatcaaagatttgcaaagaggttttttaaaaacagcaaaaaaatttggcattaaaattataggtggagatacgataagtaatgaaaaaatcgatatttccattactctactttcaaaaattagaaaaaaagccatttatcgtaaaggtttaaaaatcgggcatttgcttgcattcacaggggaacttggacaaagtttaaagggacttgaactcttgcaaaaaggtggaagtttagaggcaaaacatcgctttattaagccaaaattacgtaaagattttttttataaaattgcaaataaagttgtatgtgctatggatatttcagatggcttaagcaaagatttatcgcgtttattagaactgaatcagcttggaatttcttggtttaagacacttgatttttatgagctttatagtggagaggaatatgaaattttatttgcctttgaaaaaaaagataaagaatttatagaaaaaatggctcaaaaatacaaactcaaactcaatatctttggtcaagcagtgaaaggaaaatatgaatttaggggaaaagaacaccatttttaaacctttgtattcattaaaacacagccctattgaagcatattttagtaaaaatagcgaagattttgtcgtgcgtgaaaaagctctttatgaattcagtggcacaggagagcatttgattttacatatttgtaaaaaagatttaagcacgagtgaagctgtgagtattttaagtcaaatgagcggggaaaagataaaaaattttggttatgcaggacttaaagacaagcaaggaacaacttttcaatacatttcaatgcctaaaaaatttaaatcttttttgaatgatttttcccatccaaagcttaaaattgtagaaatttttactcatcataataaacttaaaatcggacatttaaaagggaattctttttttatccggcttaaaaaagtttctcctcttaatgctcttaaaatcaaacaagcctttacaatccttgaaaatcaaggatttgcaaattattttggttatcaaagatttggaaaatttcaagataattatttagaaggacttgaaattttaaagggcaaaaaagttaaaaatcctaaacttaagaatttttttatcagtgcttttcaaagtgagctttttaacagatatcttagtaaaagagtggaattatcgcattttgcaaaggattttagcgaaaaagaacttgcccgaatttacaacttgtctaaaagtgaagccctttttttaaaaaaacaaaaacatttttttaagcttttaaaaggagatgttttgggacattatccctttggaaaatgctttatttgtgaggatttagaaacagaaagtcaaagatttttaaaaaaagatataagcgttttagggcttttactcggtgagagagcttttaaaacaacgcaaggtttggcacaaaatttagaagctgaaatttttagtccttttaatgaatttataccacaaatgcaaggttcaagacgttttatgtggagttatttagaaaagagtaagatggattatgatgaaaaaaaggcacatttgtgtttggaattttttcttcaaaaaggctcttatgcaacgacaattttagaagaacttttgcatcagaattttgactaagggataagaaatgaaaattttaggttttgatataggaatttcaagtataggttgggcttttgttgaaaacgaagagcttagggattgcggggtaagaattttcacaaaggcagaaaatcccgaaaatggagagtctttggctctaccaagacgcgaagcaagaggtgtaagacgcagattagcaagaagaaaagcaaggcttaatggtgttaaaaaacttctttgtcaagaatttgggcttaagcttaacgattatttttcaaacgatggagaattacctaaagcttatcaaatgagtaaaaatactaaaagtgtctatgaattaagaactttagctttgagttgtaagcttgaatttaaagatttggctcgtgtgtttttgcatattgctaagcatcgtggttatggcaataaacatgctaaaatttctcaagatagcaaagatatagggcaaatcaaaaaagcacttaagcataacgaagaggagttaaaaaattataggagtgtgggcgaatatttgtataaaaatttttatcaaaaagttagaaattttgaagaaataaaaacaaaaaataaaaacaatcaaagtacatttgaatttaaaaatgtccgcaataaatctggaaattataagcaatgcgtttctcaagaatggcttaaaaatgaattaaaattaatctttgaaaaacaaagaagttttggggttaaattaagcaaagattttgaaaatgagcttttagataaaatcttttttcaaagagaattaaaagattttagtgataagataggattttgtatctattttgagggtaaaaaacgagcttcaaaagaaagtttaagtgcaaaagaatttattgcattaacgcgaatgattaatacgtttaaaaatctcgaacaacaaaatagaaaaaatcaaagcggagaaatttatagtcaagaaataattaaagaaattttaaacataatattagataaaggaatgatgaaatacaaggaattgcggacactcttaaagctcgataaaagcatacaatttaaagattctaaattgagttatgaaaaagggattgaaaaagccgaagaaacaaaatttatagattttaaagaattgagaaattttaaaaaggctttaggaggaagttttgagggcttagagagaaaacatattgatgagattgctcataaaattaccttgattaaaagtaaggaaaaattaaaaattgccttagaaaattatattaaagagcataaattagagcaaagattaaatgagtgtttgggcaatttaagtgagcttgatttttcgggacatatcgatttaagcctagaagctttggagcaaattttaccttttatgagagagggttttcgctatgatgaagcggtgaaaaaagctggacttagagagataagaaaagattatttgaaaaaagattttttaccgccacttaaagattttgaaaacttagcaaatcctgtggtcgtaagagcattagcagagtatcgtaaagttcttaatgctttgcttaaaaaatatggaaaaatgcataaaattcatattgaattgacacgcgaaatagggctaaatcataaggaaagacaaaattatatagaagagcagaagaataattttaatttcaatgaagaagctcgtaaaaaatgtgaggaaatcggacttgatgctgaaaaatatcttttaaaaatgaaacttttcttagaacaagatgaattttgtatttatagcggagagaaaattaaaattgagcatttaagagatgctaaaatgttagaaattgatcatatttatccttattctcgaagttttgatgatagttatcttaataaagtccttgttttcagcaaagaaaaccaaaataaaggtaataaaacaccttttgaagcttttggaaacgataaagaaaaatgggataaaatcaaaggtttaactcaaggacttaaaaaacttccttctaaaaagaaaaaaagaattttaaatttgtattttaatgataaagaagcgggatttatttctagaaatctcaatgatactgcttatattgcaaggtttagtgcaaattacacaaaatattttttggattttttacctttgagtgaaaatgaagtaagcatttctggagaaaaaggctcaaaagtgcatgtagaagccattagtggaagactcactgcaatgcttaggcattattggggattagggcaaaaagacagaaacaatcatcttcatcacgcggttgatgcggttattgttgcttacacaaatgccaaaatcataaaaaattttgcagattttaaaaaatttagagaacaaaataaggcaaaaatttatgctaaagagtttgcacaaaccacagataaaaaaatctttaaaccttgtgaaaattttagaaataagattttgatgaaaatagatgaaatttttgtttcaaaaccacccagaaaaagagcaagaggagctttacataaagaaagttttatgagttttgatgataaaaaattgcttaaaagttatggaggcagagagggtgtaaaaaaggcattaagtttaggaaaaattcgcaaaattggaacaaaaattgttgaaaataaaaatatggttcgagtagatatttttaaagataaaaagggtaaattttatggtgttcccatttatactatggattttgctttaggaattttgccaaataaagcagttgtaagtggggaagataaaaaaacaagagagattaaagattggaaagaaatggatgaaaaatatgaattttgttttagtttatttaaagatgatttgattaagatacaaaagaaagatatgaaagagccaaaattttgttattataagaattttgatgtttctaatgcttcaatttgcattgctaagcacgataataaatttgaaaatagggacgaggatgaaaaaatcttatattctaaagccacttataagaaagtagaagctagaggtatagggattcaaaaccttaaaattttagaaaaatggcaagtttcacctttaggagagaaacgggaatttgaatttgaaccgagaaaaaatataagtttaaaaacaacaaatagaaaaaatgtcttttgatgaagcttttaagagtgttttgataggttctaatgtaaaacttagcctaaaactcaatcatcttgtcatcaaaaaagatgaaagtgaaaccaagctttttttaaaagatattaacctcattattttagagactcatcaaattaatctaaattctgctttgttaaatgctttggtgaaacacaaaatcatacttctaacttgtgatgagtctcatcaaatcaatggtattttcactccttttttaggacatttcttaagtgcgaaaatagcaaaagagcaaatggctgtaagtgttcaaagaaaggcgattttatggcaaaaaatcattaaaaataaaatcaaaaatcaagcttatgtcttaaaattttcaaagcaccaaaaacaaagtgaagaattgcttgaattttctaagagagttttattaggagattctaagaatgtagaagcgaatgccgcagctttatattttaaaactttatttgggaaaaatttttacagagaagagctttgttttgtcaattctgctttaaattacggctatgctgttattagagcttgcatcattcgtagtgtttgtatcagcggacttctcacttggcaagggattaaacacgataatatttataacaattttaatctttgtgatgatttgatagaggtttttagaccttgggtggatttatgtgttttagctttattaaaaaataaacaaaatgacaatgaatttataacgaaagaaaataaaagaatgctaatagaaaatttgcaaagtaaggttaaaatcgatggaaaaatttatcctttgaatcgtgccatcaatcactacacgcaaaattttaagaatgctttattagataatcaagaattaatgcttgtggaatttgatgattgaagataaatttatgcgtgtgcttttaatgtttgatgtgccaactaaaactaaaaaagaacaaaaatatgccaatcaatttagaaaaaatttaatcaaactcggtttttttatgatgcaatttagcgtatatgttagaatttgtaagggcttaagttccgctaaaagctctatcaatgcactcaaaaaacatttaccaccttatggaaatgtccgtgttcttatcatcactgaaaaacaatttgacaatatagaaattttattaggagaaataagttttaatgaaaaaatgaatgatgataaaaatcttgttttatttgaatttgatgaaaaaacaggggattatcgttacaatacagaaaaaatatctgataaaaaagagaaacattctgttaaaaaagaaaagatttatcaagctcgtttaattgaattttaacggtttttaagggattgcaaaccctgcggggaaccgaaaaaccccttattttagtccctttttaaatttatgataaaaattataacataaaattttataatttttatgcaaaattttaaacctaaatccctttttattttaatttgatgagagtctattgtatcataaaaaaaattaaaaagggactaaaacgtaaattcataatttaaattggttatatcaattgtatcataaaaaaaattaaaaagggactaaaacatcagcttgagttacattgactgcagtttgattgtatcataaaaaaaattaaaaagggactaaaacttaatcccttattataatattaaaacattaattgtatcataaaaaaaattaaaaagggactaaaacgttattgaatgattatcagttcattcaaaaattgtatcataaaaaaaattaaaaagggactaaaacgatttagtgttacaccagcccgatttaattattgtatcataaaaaaaattaaaaagggactaaaacatcagcttgagttacattgactgcagtttgattgtatcataaaaaaaattaaaaagggactaaaacttaatcccttattataatattaaaacattaattgtatcataaaaaaaattaaaaagggactaaaacaaaagaaggtatggctaaagctgatgctgaattgtatcataaaaaaaattaaaaagggactaaaacatcttatgacgcttataatgagactatgggattgtatcataaaaaaaattaaaaagggactaaaacattgggtcaatcgctttcaaattttcaattgattgtatcataaaaaaaattaaaaagggactaaaacaattctctatctgttgcgttagcttcttgtattgtatcataaaaaaaattaaaaagggactaaaactctttacgagttgcttaatgactataatttattgtatcataaaaaaaattaaaaagggactaaaaccgtttataatgctctgtaagaagccttaccattgtatcataaaaaaaattaaaaagggactaaaacccctgcgatggcttataatatgatttggaaattgtatcataaaaaaaattaaaaagggactaaaacgatttagtgttacaccagcccgatttaattattgtatcataaaaaaaattaaaaagggactaaaacatcagcttgagttacattgactgcagtttgattgtatcataaaaaaaattaaaaagggactaaaacttaatcccttattataatattaaaacattaattgtatcataaaaaaaattaaaaagggactaaaacatcttatgacgcttataatgagactatgggattgtatcataaaaaaaattaaaaagggactaaaacattgggtcaatcgctttcaaattttcaattgattgtatcataaaaaaaattaaaaagggactaaaacatcttgtaaatgggtaggaaattcagatggattgtatcataaaaaaaattaaaaagggactaaaacgctaccaagaaaataaagctaaatggggtcattgtatcataaaaaaaattaaaaagggactaaaacttcgcaaggttcattttcacccgctactgaattgtatcataaaaaaaattaaaaagggactaaaacaattctctatctgttgcgttagcttcttgtattgtatcataaaaaaaattaaaaagggactaaaactctttacgagttgcttaatgactataatttattgtatcataaaaaaaattaaaaagggactaaaaccgtttataatgctctgtaagaagccttaccattgtatcataaaaaaaattaaaaagggactaaaacccctgcgatggcttataatatgatttggaaattgtatcataaaaaaaattaaaaagggactaaaactttcaatggttgcttgttcgacttattttgattgtatcataaaaaaaattaaaaagggactaaaacagtaattctccaatccaattaaccttactaattgtatcataaaaaaaattaaaaagggactaaaactctgaggttcaagctcgttatttttgttctattgtatcataaaaaaaattaaaaagggactaaaacttatcctgcatgggcttacatcaaaatatattgtatcataaaaatttaaaagtgatttaatttaaaaaaagttgtaatgaggaagtaagctgcaaattttaaaatataaatagaaatacatttttcaatatctacaaaagataaaagatattaaaacaaatgctttatagcatagaaatgcaatttcaattaagatagagatataatgtaaatatgaaaaaatataaaatcattgaaaaaatacaaaatttcatttaaaatgttaatttaaatcgcaatcaattctaaaattttaatttttttacaaagataatgcaaaaatttaaaaaaaatttgttaaattttcaaaatcattaaaatataaaaattcaatttttctttaaatagggtggaaaatgaaaaagaatttaatcatagtagaatctccagcaaaggcgaagaccatagcaaattttttaggcaaagattatgaggtgattgcttctaagggacatattagagatttgcctaaaacaagctttggtatcaaaatagaagatgaaaaatttataccagaatacaaaataagttcggatcatagtgccttagttaaggagttaaaatccaaggctaaagacgcttcgcaaattttcttagctactgatgaagatagagagggtgaagccatagcatatcatattgctaaagccttaggtaaagatgaaaattccttacccagaatagtttttcacgaagtcactaaaagtgcgattgaagatgcgcttaaaaagccaagaaaactcaatatgagttcagttgatgctcaacaagcaagaagattgcttgatagaatagtaggctataaacttagccctcttttaggacaaaaaattcaaaggggattgagtgcaggaagggtgcaatctgctgctcttaaaatcatagttgatagagaaaaagaaatcaaagcctttgttccgcttgaatattttagtgtagatatgatttttgaaaaagatttggatgctgaactcgtcgcatttgataaggctaaaatcgaaagactcactcttacaaataaagacagagcaaagcttgtttttgaagaatgcaaaaaaggagaatttgtcattaaagaaattgaaagtaaagaacgcaaaattgccccgcctccgccatttatgacttcaaccttacaacaaagtgcgagcaatcagcttggttttagtcctaaaaaaactatgatgattgctcaaaaactctatgagggtgtgaatacacatcaaggcacaatgggcgttattacctatatgagaactgatagtcttaatcttgctaaagaggctttgaaatccgcaagaacttttatcaaagagaattttggtgcaaattacttgccacaaaaagaaaaaatttatacaagcaaagctaaaggagcgcaagaggctcatgaagcgattcgtcctacaaatttagactttaccccgcagattgcaacacaatttttaggtaaagatgagttaaaactctatactttgatttataaccgctttttagcatgtcaaatgaaagaagctgtgtcacaaattcaaaatgtttttgtcgcaaataatagggctgtatttaaaatcagcggacgcaaaatactctttgatgggtattataaaatttatggagataaagataaagatagaattttacctgatttaaaaatttctcaagccttaaaaattcaaaatttagagcttagttctcatttgactgaaccacctgcacgatattctgaagctggacttgttaaaaaacttgaaagtcttggtatagggcgtccttcgacttatgctccgaccatttctatccttacaagcagggattatgttcgtattgataacaaacaactcattcctacggaagtggcttttaatgttactgaacttttagaaaaaaattttagcgatattgtagagagtgaatttagtgcaaaattagaggatactttggatttaattgctgaagataaagcggattggcaaaaagttttgtgtgatttttattatccttttatgagaaaaattgaagagggaaaaacaaaaattaaaagccaaaaaacctttaccaaactaggagaagcttgtcctgattgtgggggagagcttgcgattcgcaaaggaagatatggggaatttatagcttgtttaaattttccaaaatgtaaatattctagaaatttaaagccaaaagaagaaaattctcaaaccgcacctaaaaaaaatggcataggcgtaacttgtccaaaatgtaaaaatgcagaacttgtagaaagatttagcaaaagagggaaattttatggttgcgggtcttatccaaaatgcgattttatctctaaatacaaaccaagcaaagagctttgcgaacattgcggggaaaatttagtcataaaagagcttaaaaaaggcacttttttggaatgcttaaaatgtaaaacgaaaaggagagcttaatgaagtataatttacaaacacttcctttggagaaaattaaagccgatgttgttttgagtttgggttcaaattgtcgcgttgcccattatttaagaaaacaccatttaagattatggacaagtccgcttgattggatgttgcatacgaatttagagagtgcgtatgagctttttaaaagcggttttaagaatttttttacagattgctcactggagggggaaattgagacttcaaaggcaagaaaaaagctcatcgttaaggacaatcaaacgggaatggtgagtttgcatcatttctttcctaatgaaagtttagagattcaagtccaaagaatccgcgaacagacatttaaaagatgggaaattatgaagcataagctttcaaattctcaaaacattattttaatttttactggagtggcaaatttagaagaattaacatcatttttagaaaagttttgctcccttgattttatgagtgaagcaaaaaaaaaggggggggggattatattgatttgtatctctaatgataaaaatttaaaagctgatgaaatcaccatgcaaaagactcaaatcgcacaaaataaaatcatatttgagtattttctcaacgaagaaaatggtgatactttaagaggcaatgcattgttttgggataaacttatgaagagcatacaaatgtctcgaaaaattaaatttaaaaacgccttaaatgattttagaatccgctttttacgctcttgcaagaagaggatagctttttttacaaaaagttataaaaacgacattaacgaaacgcactgaatggagtaaaaatggagattatgttatgtgctattagcaatatcgcaagtggaggttgcagtgaggattgtcaatactgcactcaaagttcttttgtaaaaactcaaattccaaaatacaaaagaaaagatataaaacaaattgtttttgaagctaaactcgcaagaaaaaatcaagccttaggtttttgcttggttacagcaggagctggacttgatgatgacaaactcgaatatgtttgcaaggctgtgtatgaggttaaaaaagaagagcctgatttattgcttattgcttgcaatggtttggcgagtgtggagcaattgaaggagcttaaaaaagcaggagttttttcttacaatcacaatcttgaaacttctaaagaattttttccgcaaatttgcacaactcatacttggcaaagtcgctttgaaacaaatttaaatgctaaagaagccgggcttatgctttgttgtggtggaatttatggtatgggtgagagtgaagaggatagagtgagttttagaaaatctttgcaagagcttaaacctttttcatcaccgattaatttttttatttcaaatgaaaatttaaggctaaaagtcccaaaacttaatgccgatgaagctttaagcatcataagagagagcaaaaaagctttgagcgatacgcgtattatgattgctggaggtagagaatgggttttaggcgaaagacaatacgaagttttcgaggctggagctgaagccattgttgtgggtgattatcttaccaccaaaggagaagagccgagtaaagatatagaaaagcttagaagtatgggatttagctttgcatccgaatgtcattagttatcaaaatttaattgatttaaaaattctcattgtgattgcagcttgtttgcttttatccccttatatcgctaaatttttgcgtttgcccatctctgcaacagagattatgcttggtgcggttataggatattttggctttattggcgagagtgagaattttaaaattttagccgatgtgggcttttattatcttatgtttattgcaggtatggaggtgaatttacaaacttttttcaatatggataaaaagctttttcaaaagagtttgttttatattatcatgctttatttaagctcttcgcttttagtatgggctttaaatcttgattatgtttttattttaatcattcctgtaatgagtgtaggattgctttctgtgctttttaaagattttggtaaagaatgctattggctcaatacctctatgcttgttgccactcttgcagaagttgtttctatcgttcttttaaccatcaccggagcttttttacacgaggatttgagtttgattgaagcgggaaagagcattttgtatttgagcatttttttaggactttgtgttttaggttttaaaattcttggagtgcttttttggtggtatccacagcttaaaatcatcttaatacctcacgaggacaaaaatgaaaaagatataagattttgcgttgcaatttttattttaatcattgttgcgatgattgttacaaaattagaaatcgttttgggttcttttatcgcgggttcttttatcgcaacttttttcaatcacaaaaaggatttagagcataaaatttcacattttggttatggttttttaatccctgtttttttcatttatataggttcaacttttgatttaaaaatcattttagaataccgcattctcttactctctttgtttattatgtttgtaatgattattttaagggtcttttgtgctttggtctttacttcaaagataggctttaaaaatacaattttatttgctctaagccattctatgcccttaaccttactcatcgccatagcttctttgtctcattcggcaaaaatcatcacagaggatatttattctgctttgattttaacagctttgtttgaagccattttaattatgagtttgattaaattcatttcaaattacaaacaaaatttaataaattcacaatgaaaattcaataaaattacaattttactcaaaattttaagctttttaatatattgtcagccaaataaaatattttaaatctctttttggttaaaatataaatgaataaaatattaaaggagaaaaaatgtcaaattctgtgactctaacggacaatagaaatggtaaaagctatgaatttcctatctatgatgcaagtgtgggaccaagcgttgtggatatgtcaagtttttacaaacaaacaggaatgttctcttatgatgaaggtttaacttcaaccgcaacttgtaaatctcaaatcacctatatcgatggagataaaggaattttaacacacagaggctatccgattgaatggctcgcagaaaataaattattcttagatgtcattcatcttctgctctataaagaccttccaagtgagcaaagattagatgattttaggtatgaacttaaaaaacgctcttatattcatcaaggtatgcacaagctttttgatgcttttccggacaatgctcaccctatggctatcttacaagcttcagtcgcttctctttcagccttttatcctgatcatttaaacatggatattaaagaagaatatatggaaatggcggctcgcattgtggctaaaattccaacccttgttgcaactgcataccgctataaaaatggttttcctatggcatatcctaatttagatagaggttttacagaaaatttcttatatatgttaagaacttatccttatgatcatgtaagacttagacctatagaggtgaaagcacttgataccgtgtttatgctccatgcagaccatgaacaaaatgcttcaaccgcaactgtgagagcagtaggctcaactcaagctcacccttatgcgtgcatttcatcaggaatcggagcactttgggggcatgctcatggcggggctaatgagggtgttataagaatgctagaaagaataggaagtgttgatagagtcgatgaattcatcaaaaaagctaaagataaaaacgatcctttccgtcttatgggctttggacatagagtctataaaaattttgacccaagggcaaaggtgcttaaaaaattaagagatcagctcatcgatgagttaggaattgatacaaatcttattaaaattgcttcaaggatagaagaaattgctttaaatgatgattatttcattcaaagaaatctttatccaaatgtggattttcatagtggtcttatactcaaagctttaggaattccaaatgaaa

SEQ ID NO: 3767 - DNA, 23096 bp, synthetic construct
  misc_feature 1..23096: note = Synthetic
  source 1..23096: mol_type = other DNA
aataatctctcctagtcctagatgcaaagaatctctccatgtgattggataatgctccttagtgcgattgttgcacaaggattctaaggttgcgccacattgtccatcgtatgtggcattttggcagacacccaacagatatgccacgccatcaaaaagccttcctatggagcttgtgcgcattgtattgagatttttttcatgcatgaggcttagggtttgtaattcgtgtgtgttgaaattgtgtgctatgagctctatatgttttggcgcgaattctgtaagcaaagcaagagctatgcgccgtatatctgtgatggctttttctccgccaagaagactaaattcctctatgctcgcaactctttttgcgtaatagagattacctacaaaagcctctccaccccaaatgtgtccatcgcttcctaatcccgtgccatcccatataatgccaagatgttgggtatttttagtgttatgtccatattcgcctagcaacgcacaaaaatgcgcataatggtgctggacatagcacatatttgcttcttgggaccaaagtttagtatgtttagaaaccttgtttgtgtgtatggattgtgcaatttcttttgcaagcgtgctagaagcatattgtgggtgcatatcacacacatagagtgcaaaatctttaacctctaacccaaaaaatcctaaaagcgatgtaagtgtatgggtgtagtgctgttgggtagcaagatttgtaagatctccaagatatggtgataataatgtataactcccatcagttatgcaaaaacttgccttttggtttgcgccaaatgcgagaatttttgtaggtgcaaatggggtgcgaagtttgtgtgtttttggtgcaaagcctcgagcaaggcgcaagattcttggtttgttggctataaagcgcacaatactatcatcaatgcgatgtgtgatagcacgattgtagcttaaaaggacatcgtgtggtttttgtgggagtgccataagctcgtttgcttgtattgcaatgggcgcaccactttgattagcgcttgtaaaaattagtggagtttgcaaggcagcgcaaataaggtgcataatcccactataaggcaagataacacctatggtatctagttgtggtgcgatgaggtgcaaacaagtagaatctagcacacaatcttttgcaagatttttgcgttttgcaagaagcacgattggcgcttgtgggcttgatagaatcttggcttgtgcattagagcagagcgcaaaggtgcgaatttgttgtatgtccttgcacattatcacaaagggtttataaggtctattttttcgttttcttaaagtttgtaagacatttggcatatttgccttggcgacaagggcatatccgccaatgcctttgatagcgacaatttctccgcgattgagtgcttggattgtagaatctaatgcagcctcattgtaggtcgtgttctcaaagtttagctgtatgccacaaagattgcatgaaataggttgtgcatgaaaacgcctattatgtggattatgatagtctttggcacaagattcacagaatctaaacacagacattgtgctattttgtcgctcataaggaagggtgtagagcatactatatcttgcgccacattgtgtgcaagcgcaaaaggcatagttagaaaatcgcccactgctttgcatatccgcatagcattgttcgcacatagccatatccagagggatttctagcgcaagtggtgtgtttgtatgcgtgtggggtagggcgtgagattgatgaaggatacaaaagtctttgtagggggcttgtggtgtgtatgttgtatgggtgattgaggtaattttggcaggttttggaatacggcgtaaatgagcaagaaatgtaacgagttcttggcgtgtgatttcataaaggcatatttctacacacgcagaggtattgcatacagagcctttaagattcatagtatgcgcgaggttatatacaaatgggcgaaaccccacgccttgaataatgccaaaaacttttatgagataacttttcataggggaattataatattttaatgggctttttgtgtgtaagtgcgtataattttagttttagtctttaagaattggaatgtgttatgcaagaagatgcgattcgctggaataagcgccatagtgatggttttatgccaaaacaaccaagtgatattttacacacatatcagcccttgctagaatcttatgcacaaaaaggaagcgcacaagcacttgatatagcctgcggtaatgggcgtaatgcgaagtttttggcagcattgggatttgaggttttgggcgtggatatttcgcaagtggcattagattctcttcaaggaatggagcatattactacattgtgtgtggatttggatagttttgatattgctaagcaaatatatgatgtggtgttaaatttttattttttggatcggagactttttgctgggattaaacacggagtaaaaagcggagggcttgtgatatttgaaacattttgcaccataccaaaaatctatgataaagatattttttgtgaatttagcgcacaaagaagcctaaaacacgcagaattacaaaaagtatttagggggtggaatattatctataatgcactaaatcctttgtatagaagcgtgagtgaatctgccaagagcgtatatctcacacaaacttttatcgcacaaaagccctaaaatgtcaaaattttcacttcagcataagcttataaagattttttctattgccctgccaagtggcgctaattcattgcttgatatggcaaatatcacggttggtatgtattttattgcggatttttccaaagaacatatgatcgcgctaaatgtgggtatgagctatatgatgatgctttttgcaatcacagcgattttttttattgggacaagcgcacaagtatctcgagcctatggagccaaagattatcaacgcctaaaaagcataatgggtaataattttcttatcacgctttttgtgtctattccacttttggttgtggcatttatgggtggtgagttgtatttggattggatgggtaatggcgtgagtggcgagacaaaactcttgggtatggaatatttggggattgtggtgtttggaatccctgccttgatgacaaaaacaatttgtgtagctggactttctgcacttggcgataccaaacgcataatgtatattaaatgtatcaccaccacgctcaatatcatactcaattatgtatttatttttggctttgattttggaatctttacgctagattcattaggtatttttggcgcaggattatgtaatgtgtgtattacctatcttgaggcattgctactttttggcgtcatttatatgcgtaaaagagttataggctttagctttgtgttgcgtttagaatatagcaaaacaacatttagcgttggaattcctgctggtatcgagcgatttttgacgctttttagccttgttttgacacaaaaatttatgagtgattatggtgctgatgtcattgcaggattccaaataggatctaaggttgaggcatttattcttgcgtttggctttgggtttcaagttgcagctatggcgcttgtggggcagagtttgggtagaaagcgtatggatttggcatacgattttttacacacacttttgctgtatgcaagtattatgatgggaatcttggggcttatgatttgtgtgtttggcgtggaattatctagaatctttaatactcaagaagcagtattgcgcgcgagtttgtattatcttatcgcagtgggcttctctcaagtgccattagtgattattttttgccttgatggagcgttgcgtggggtaggtgcgactaagctttctcttatgattaatgctatgagtatttggctattgcggattataccgatgtatatatttgtgttttatgaagccgatgtgcgctttgtgtttggtatgatttttgtggaaacatatttacgcgcattgattttttggattatttttaagagtagggtttgggaaaaatttatcaagcgtttttagaaacgcttagaggcattatggcgtgtgagaatctctgtgagaatctctggaatgtcgttgttggcgttaatggtgtgatgtgctactttggcatagagattctgacgctcaagatagagtgctttggcttgtgcttggtcgccaaaaagagggcgtttgctgcgctcttggtgatcaagccgtgcaaggattgtttcaaaatcgctttgtaaataataaatctcccctaaggtgcttatgtcattaaagattggcattcctccacctgtggcaatgatagcgttagacacattagcgctaagccacgcaatggcttgagattctaactcacgaaatttctgctcaccatattgtgcaaaaatttcaggaatatgttggttgtatgttgtttggataagtgaatctgtatcgagcaaaaatcgccccattttttgtgcaagggctgaacctatggtgcttttgccactgcccataaagcctataagcacaatgtttgccattatttaaactccagcatataaccatcgcgctgtgcattaatgtcataagcatattgtccatcgagctcaagcgagattcgataaaaattttcgtggctagaaaatacgacttgttttatgtattttttgtctagaatttgtgtttgattgatagccttatccatgccttcaaaatccaaaacaatgcggtaagggcttggcaaaataaagtgtcgcacatttgggtattgggtagcaataaagattgtatttttatcaaaaataagctcaaagtctccgaatctaaggcgtttttcaccaatatattttttgcctatagctttttgcgcaagttctagtggataatgccaatcaatgttttgatgtatttgaagttcttttgtcgctatggtgccatcgatattttggtatgtgatgctcactttttgtagcacgcgcgcggtagagggcaaagcaatttctatatcttgaagaaattctttttttggttctctttgattatgttgtccttcttttggggtaatagggggctcaaaaggatcttctctagcaatgaggatactccagcatataagcagtgcaatgatgtgtttcattttggttctaaccccttaagttcaaaaatatctttttgaatctttgcattttgcttttggagtaaatcgacttcttggagtaatttttcttgttgtttgcgcaaacttagcagtgtgtagagtgaggcattcccaaagagcagaaatgcactataagtcaaaagcgctaccaacaccgcagcgataataagaaatgttttattaatctgtatccatcgcttgaatcttgagggctgttgatagagctcttgcatacccattctttgtattattttttaaagagttgtgtgcctagatactcgctattagaaagttcagattctatttctaagaggcgattgtattttgcaattctttcgcttctagccgtagatcctgttttgatttcaccggtattaagcgcaatagcaaaatccgcaataaaattatcttcactttccccacttctatgactcataatgcatttatacgcattgcgttgtgctagtcgcaccgcttgcatagtttgtgtgattgtgcctatttggttaggttttatcaaaatagcattagcgatatttttttcgattccttgtgcgagaatctttttgttagttacaaataaatcatcacctacaagctgaatcttatttccaagtcgttgtgtgagataactccacccttcccaatcatcttcactcaagccatcttcaatagaaacaataggatatttttgcaccatttcttcataatatgccacaagttcttgtgaagttagcttgcgtccttctcctgcgagatgatacataccgcttccatcgacaagttcgctactagcgacatcaagagcgatagcaatctcatcacctggtttgtatcccgctttttctatggcttggaggataatttcaataggttgtgtattgtttgtaagattaggcgcaaaacctccctcatcaccgatactcgtgatgtgattttgttcattaagaatctttttgagatattgatacacttctgcactagcgcgtagtgcctcactaaagctatcaaagcctagcggcataatcatatattcctgaaaatctaccgtgttatcagcgtggctaccaccattgatgatatttagcataggcacaggcaatacaagcgcatttgcgccacctaaataacgataaagtggtatatgaaggctttttgctgctgcacgagcagtcgccatagaaacaccaagtgtggcattagcaccaagcttagagaaattttgtgtgccatctagatctttaagcattgcatcaatcagcccttgatcgtatggactagcacctaccaaagcttcacatatactaagatcaacattttcacaagcttttaagactcctttgcccaaaaagcgatttttgtcaccatcgcgtaattcaagtgcttctcttttacctgtgcttgcaccacttgggacgatagcgctttcttttgtgccatcacttaattctacaattgccttaatagttgggttgcctcgtgaatctagcacctcttgtgaataaatcttgctaatacgcaccatatttgctcctctttgttagatttggatttttagagttcctcttcctctggctcatcaggaagtggtaaaatttcatcttttatgccaatttgctcacggatcttatttgtgatttcttgagcaattgttgggttttcttttaaaaacacctttgcattttcacgcccttgcccaagcttcatatcgccataagaaagccacgctccacttttgtcaatgatgtcaagcttgataccataatcgatgatttcaccctctttactaatgccctcaccaaacataatatcaaattccgcttccctaaatggcggtgccactttgtttttaaccacttttgcttttgcgcgattgccgatattttgctcattttgtttgagagtggcaatgcgtcgtatgtcgatgcgcacacttgcataaaacttgagggcattaccacctgtggttgtttctggacttccatagcccatcattccaattttcatacgaatttgattgataaaaataagtgtggcattcattttgtgtaaaacgcctgtgattttgcgtaatgcgtggctcataagccttgcttgtaagcctacatgttgatcgcccatatcaccatcaatttctgcttttggcgtgagggctgccacagaatctatcacaataagatctactgctccactgcgtgtaagcgtttctaagatttcgagtgcttgttcgccgttatctggttgagagacaaggaggttttgtgtatctacaccaagattttttgcataatacacatctagcgcgtgctctgcatcgataaatgctgcaatgccgccatttctttggcattctgccacgatttgtaatgctagtgttgttttaccactagattcaggaccatagatttctataattctaccctttggcacaccacctataccaagcgccatatcaagccctagtgagcctgtagagattgcatcgattttttctacctgcttatctccaagtcgcacaagcgcacccttaccaaatgccttatcaatctgcttgagtgcaagctcaatggctttttgccgtttttcgtctatcgccattcttatccttgttgtaaaagtgatttaaatcttgggattgtatcttataagtttgaaaaatatctttaaaaaacccaaacaaatttttaaagcgatttttgttacaatgtccattacataaaagatgtcaaggatattatagcgatgaaacacccacaatctacctcccaatatatgcttggtaaaaagcgacatcttagtgtcgcacatagccctgatgctgatgatttatttatgtattatgcgattaattttggttgggtggattctacgcaagtgcaatttagtgcgtgtgccaaagatatacagacactcaatgaagcgaccttgcaaggtgaatatgatattagcgcgatttcttttggattgtatccgcttgtttgtgaggattatgcgctattgcggacaggcgtgagttttgggaatggctatggaccaaagcttattaaaaaacgcaccactacactaaaaagagatttcaaggttgcactaagtggtgcgcatacgacaaatgccttgctttttagacttgcatatccacatgcgcgtattgtctataaaaattttcttgagatagaatctagcgtgttaggtggcgaggtgcaagcgggtgtgcttatccatgaatctattttgggttatgatgaaagtttggttgttgaagcagaattgtgggatatttggtgtgatcttaataagcacgatttacctttgcctttgggtggtatggcattgcgtcgatcgctgccccttactatcgcgctagaatgtgaatctatgcttactaaggcggtggaagtagctgtgcataataaagcattgctttcgcaaatgcttttagaacgcaatcttattagggtagattctgccaagcttgagacatatcttaatctttatgcaaacacagattctatcacactaaatcccgtgcagattcaagctattgatatgttgtttaagcttggatttgaggcagggttttatcccaatctcatacatgccacgcagtatatgttaccccaagaatatcttacacaacgatattcttaaatacaccaagaaggatttttatggcatcacaatttgtctataacctctcaagtcttgtaaaaattctcacacccagtgtgcttacgcgcgcaagaacagaatctaaaatcacgaagtttttggcgagcttagattctaaggaatatgagggatttgcgtcgcgacttagactatatcatcgcgtgtgcgcaccttttagtatcgctccccttagtgatacagccccaagcacatacgagcgacttggcacatatccaccgcattatggaagtatcaaagaaagctataaatggcggcgttttagcacatatcattatgatatgcgatcgtatgcgcggtattttgatgaaaatctcaaagtgtattatgggtttggcgatgtgaattattatttcacgcaaccaagtatcaccaaatcgcgaccaattagtgaatctaatcaaaattctattgtcttaaagcttgagcaaaataggcattttaccttcattaaagattcttatacattttcagaaaaacaagatcgcattttctttcgtggagcgtgttatcaagagcatagatcaagatttttagagcaattttttgacgcaccattttgtgatatcggacacacaggtagtaagtctgtgcatacacaatacctaaaacccaaagtatctatcgccaagcatttgccttataaatttcttttaagtttggagggtaatgatgtggcgagtaacctaaaatgggtgcttagcagtaattctttgtgtatgatgccacgccccaaatatgaaacatggtttatggaatctacgctcgtgccaaatgtgcattattgtgagatcgcagaagattattctgatgtggaggagaagtttagatttttttgtgccaacccaaaagttgcacaagagattatccacaatgcccatagattctgtgagcagttttatgatacaaacgcagaagaagcattaaatattcttgttttgcgtaagtatttttatcttagcggacagatagatattactaagcaagaaagagatttttttggactttgaggtattgctactcatagcatagagatattttctccaaaccctgactttatggtattatagattccaaggttttgtattttgcggaggtatctaaatgaaaattgtagggattgatataggtattacatctattggttgggcgtttgtggaaaatggtgagcttaaagattgcggagtgcgaatctttactggagcagaaaatccaaaaaatggtgaatctctcgctttgcctcgcaggcaagctagaagtgtgcgtaggcgtttagcaaggcgtagaggtaggctggagtcattaaagaaacttcttacgaatgcgtggcatttatcttatgaggattatattgctacagatggggagttacctaaagctttttgtggcaaaagatttcttaatccttatcagttgcgttatgaggcattagaaaggcttcttagcaaagaagagcttatgcgtgttatattgcatattgccaaacatcgaggctatggaaacaaaaacatcaaacaagatcaagataaaaaagataaagaggaaggcaagatactaagtgcattgagtgaaaatgcaaaaaagatctcgcattatcgcacagctggtgagtatttttataaagaattttgtgcagtgcaagatgttaggaatgcacaagataaaactccaatgatacgcgtgctaaaacctatacgcaacaaagctctatcttacgcaaattgcgtttcacaagtggcattacaaaatgagcttagtcttatttttgagattcaaagaggttttgggtttgcaatgacacaagaactatgtgatgaggttttgcatattgcattctatcaaagaccattaaaagatttttcgcaccttgtaggaaaatgcacattttatgagaatgagtatcgcgctccaaaatattcattgagtgcagtagaatttgttacaataagtaaagttgtcaatattcttgcttcttgtagcaaggaaagtggtgagatctatacacaagagcaatatcaaaagatattgtcctctgtgtttgaggaagtatgcaacaaaggaagtttgagtttcgcacaattacgaaaaatgcttaatatcgatgagagtattcaatttcaagaattaaagcatagtaatcttgaaaagcccgaaacaaagaaatttgtagaatttaaaaatttcaaaaagttttgtcacattttgggcgatgtaaagcaggatagagagacatcagacaatattgcacgagatcttacattgaccaaagacaaggagcaattaaaacaaaagctctgtaaatatccagcattgacacaagaccaaattatgcagctatcagagatagattttgatcatcatattagcttaagtcttaaagcattaggtgagattttgccatttatgcgcaatggcattagatatgatcaagcctgtaaaaatgcaaatcttgtaacacgacataatgataaaaagatgaaatttttgccaccctttaatgagagtatgtatgcacaagatttgcataatcctgtcgtgcttcgagctatatcggaatatcgcaaggtgcttaatgctcttattaaaaaatatgggagattccataaaattcatattgagcttgcgcgtgaagttggcaaaagctacaaagatcgaggcaggtatcaaaaagagatagacacaaactacaaaaacagagagcaggcaaaggaaatgtgtaaaaaaatcagtttgccactcaatgagaataatattttaaaactacgactttttagagaacaagatgaggtttgtgcctatagtggtaaaaaaatcactttagatgatttaaaaaatgtaggggctttggagattgatcatattttgccttattcgcggagttttgataatggctacttgaataaggtgctagtttttacaaaagaaaatcaaaacaaaggtaacaagacgccttttgaggcatttggtgctgattctattaagtggagcaagatcgtttctcttgctaggcgtaatggatatcccaagaagaaagcacaaaacattactactacaacatttgccacgagagaatctggatttaaggcacgcaatctttcggatacaaggtatatagcacgacttattactagttatacacgagaataccttgcttgtcttccattggattgtaatgaagatacaatgttggttgctggagaaaaaggaagcaagatacatgtagaaacaatcaatggtatgcttaccacgactatgcgtcatttttggggcttacctgtgaaaaatcgctttgagcatacacatcacgctattgatgcaattattatcgcttatagtaatgcaagtatgattaagagattttcagactttgtaaaaaatcaccaagaaacactgaaagcagaactctatgccaaagcactagcacaagatacatttaaacatcaaagaaagttttttgagccgtttgctggatttagagaacatgtcttgcacaaaatagctcaaatatttgtttcgcattcgccaaataagcgagtgcgaggagcattacatgaggagagttttaaatcttttaatgatgcaacctatcaaaaagaatatggtggattagcaggtattcaaaaagctttagaattaggcaagatacggcaaattgggacaaaacttgtggcaaatggtaaaatggtgcgtgttgatatatttgcacataaaaagagcaaaaaattctatgctgtgcctatctatacgatggatattgcacttggtgtattacccaataaagcagtagtaagtgggaagagtgatggtgtcatcaaagattggatagaaatggatgaaaattatgaattttgcttctcactttttaaaggtgatgtcgtgcttgtgcaaaaaagctctatggaaaaatcagaatttgcatattttgtatctcttgacattgcaacagcgagtattgctctacgaacacatgataataatataaaaactctcacaccaaaccaacaaaaactctttacaagcgcaacacaaaaagaagtaacggctaaaagcctaggtattcaaagactaaaggtatttgagaaatacaaagtctcaccattaggagagcttaaacctagcaaatatgaaccaagacactatcgcactcaaaaccacaccaaaagacaaaaacccaacaaaggattcttaggtgggctatgatgaggcgtttagaaatgttgtgtttgcaagcaaggcacatttgcgactacaagatcaacatctagtagtgcaaaatgaggaggaaaacgcacgattgtatatcaaggatttgcaatgcgtgattttagaaagtccccaaattactattacgcaagcactattaagtgcgttggctgaagcaaaagtccttgtgctgacttgtgataagacacacactatcaatggcatttatacaccatttctaggacattttgccaatgcacaggttgcgcgggagcatattgcagtgagtgcgcaaaataaggcaagtttgtggtgtgagattgtcaaaaacaagattagtaatcaagcaagtgtgctgcaaatgtgtggctacacaaaacaagcccaagatttggcaaagctatgtgataaagtatctatgggcgatcatgataatatcgaggcatatgcagcagctttgtattttaggtatctttttggcaatgggttttctcgcaaacataaacacaagattcaaaatgccttactagattatggatatgcgattgtgcgtagctgtgtcattagaagcgtatgtatgagtggattactcacttggtttggtatcaaacacaataatcagtttaatcaatttaatctttgtgatgatctcatagaggtctttcgcccatttgtggatagatgtgttttagcacttttagaatctagggtgttagattctgaatatagccaatatatagagacaatgacacgacaagacaaaatggctttgattgagaatctacagagtgaagcaaagataggggagagagtttttccactgcatagggctattaatttttatgttcagcgatttaaaaatgccttattgtatggacagcctttgcttttggtagagtttggggtttaggtatgagggaggatacatttatgcgtgtgcttgtgatgtttgatttacctacccaaaccaaaaaagacagacatcatagtgcaaaatttcgcaacgatctcataaagttaggattttttatgatccaatttagtgtatatatgcgaatctgcaaaggcgttgcctctgccaagtcttctatcaataatattaggaaatttgtgccgccaaagggaaatgtgcggtgtatcacaattacagaaaagcagtttgatgctatggaaattttacttggtggtgtgagttttaatgaagagatgaatactcaaaaaaatctgacactttttagttttgatgaaaaaactggagattatgtatatttgaatgatacaaaacaagatacacaaaacataccaacacataaaaagaagacatcaagcaaaactatctatcaaaaaagtttatttgagctgtattgagacacgatagaacatcagtagtttaaaagaggtgtcagtctaaagggattttcgagcactcatagagcctcaccctgcgccgactgacaagcttattttagtccctttttgaatcttttgtagtattgtagcataagattctcatttttgaacctattttatcataaaaagattcagaaagggactaaaacaaaaagagggctttaacaaagttgaaatcgattttatcataaaaagattcagaaagggactaaaacgttacatgaaaaaaagtaaatttaatttgaattttatcataaaaagattcagaaagggactaaaactcacatgaatccacagaaaatttccgcattattttatcataaaaagattcagaaagggactaaaaccaccttggtattgttgcaggtcaatataaaattttatcataaaaagattcagaaagggactaaaacacgccctcgtttccttgctcgtgtattttcattttatcataaaaagattcagaaagggactaaaaccccaatttgccgagtatgaagacgatagcgattttatcataaaaagattcagaaagggactaaaactggtatcgctcaagcaaggctttataatttattttatcataaaaagattcagaaagggactaaaactcgcgcattctttgaagtatcaataatattattttatcataaaaagattcagaaagggactaaaacctttctcacgcgcatttgcattagcctcgaattttatcataaaaagattcagaaagggactaaaacgatatgccattgctttacccaaaagatacaattttatcataaaaagattcagaaagggactaaaactactgccttttcaaactcatctctaaagtcattttatcataaaaagattcagaaagggactaaaacattgctatcctttgactttgtatgttacgcattttatcataaaaagattcagaaagggactaaaaccttatcaatctaaaaaacgcgcaatgtattattttatcataaaaagattcagaaagggactaaaacttcaatttgagttacctaaattcaactacattttatcataaaaagattcagaaagggactaaaactcccatgaatccacagaaaatttcggctttaattttatcataaaaagattcagaaagggactaaaacattgctatcctttgactttgtatgttacgcattttatcataaaaagattcagaaagggactaaaaccttatcaatctaaaaaacgcgcaatgtattattttatcataaaaagattcagaaagggactaaaacacaagagttagataaacaaactttatatcgattttatcataaaaagattcagaaagggactaaaacgattctgcaacaaaatacaagttggattgaattttatcataaaaagattcagaaagggactaaaacgcttgagtttatataacttacttcaagcgtattttatcataaaaagattcagaaagggactaaaactgttgtatcaaacattaactggttgaagttattttatcataaaaagattcagaaagggactaaaaccattgtctttacctcctttcttagatttaaattttatcataaaaagattcagaaagggactaaaacagaatgctatcacacaagatgtcacgatttattttatcataaaaagattcagaaagggactaaaacggtagtgcgttgcttggcactgctttaaacattttatcataaaaagattcagaaagggactaaaacacactcccagtttcaaatgaaattagacccattttatcataaaaagattcagaaagggactaaaacttttggtaaatcagtgtatgaaaaaccaagattttatcataaaaagattcagaaagggactaaaacttctatgaggctaaagaataaggagactaaattttatcataaaaagattcagaaagggactaaaactttacctatgcttacatcaagtgttgtaggattttatcataaaaagattcagaaagggactaaaacaaaggctgctgcacttgctactgccattttattttatcataaaaagattcagaaagggactaaaactgaagagagtgataaaagaaagaattatatattttatcataaaaagattcagaaagggactaaaaccctatccctcgataatttttcattttcctcattttatcataaaaagattcagaaagggactaaaacgtaaaagccaataactcttgatcctttgggattttatcataaaaagattcagaaatggggactaagggatacgcgattgggaggaatatagattagccaagataataagctccataaattccaataaaatcctaacatcatataggaaggtatgattttcttgttggatttcttttggtatttcatactccgccatatcaccactatcacatgcttcgtcaagaaaccctacaatgacaagtttttcatctgtattccttcgtaaattaaagatatagagattgtatcaaaacaattataaaagaaagtcttgtgcaatgtgtatgtaaatattatcgtgatagtttgtgatagttttggtgctttttgcaaaagcaaaccgcaaggataaagagagatttttaaggattgtagagaatctaactagaataaaaactatatacaggtatcgcaagaaatttgcaacacctgttttgtggtattaatgatgctcaaggtaagcgatagcttggagtgcggcggtagcaccatcaccagcagcgcacacgacttgcttggaagcttgcacacgcacatcaccagcagcaaaaagcccagggacactagttttcatagatagatctacttttatgctattccattcatcacattcacaaagcatactgccatcaggttgtttgagaatctgtgtattgacatcataacctacaaacacaaaaacaccaaacactgccaaatcttgcacggctccgctttggatatttttgattgttacacctgttacaccgctgttgtcgcctttgatttcttcgattattgtaggggtgataatctcaatttttggattttctttgacatgttggattgttacaggtgccgcacgaaacccatctcgtctatggataaggtagattttgttacagattctagagagatagattgcttcttcaagtgccgtatcgccaccgccaaggactgctacatctttacctttgtaaaaaaatccatcacaagtcgcgcaagtgcttacaccacgcccccaaaacacatcttcaccttttacaccagatcgttttggtcgcccacctgctgcaaaaattaccgctttggcttctacgactttgccatcgctttgtgtgatcgtaaaaatatcgccttgtttgctcaccatactaatttctgccatttcgtgcttcaatccgaatctaaagcattgctcctgccatggctccataaagtccaaaccgcttttgatttctttgacacctggatagttttctatttcgctactacctgtgatttgtccgccaggcattcctttttcaaataaaacaacattttttatcccacctcgtgtcgcatataatcctgcagtaagtccagcaggaccaccaccaataatcgctaaatcaatcatttgtatctcctttgttttagattagaggattatatggcaatgctttaaacaaatgataaattttgttatttattgctaccacagctgaaattctgtttttgtatttttgtataaacttcgcgatcttccacctatgtcgtattcgactgcaaagccatatttcacacttgccaagccggattttttgatttttgcaccctcataggtttcttgtggcacactaagcgcacccactgatcctccggttcttggtgcaagttttttattgacacctacttcacttatcaaatctccatcgacataaagcgcaaggtaggtgattgtaacaaattcatctgttttgttgctgatattaagacctacacttcctttgcctagattaaaggcatttgcacgcaagataatatcatcattttctatgcttactgctggcatagttttgttggcaagcactacacgcgctggtgtatcgccacgattattttgggcatacatatctgcaccattagagaggagaaggtttatcatagcggtattttttttgagcacagcatagtgcaagggcgtgttgcctaaatgttcatcggctacattgactttggcacccttttgtatgagttcttttgccatacgcacatcgcccaatgcgacaactttgagcaatgcagtttcgccgtggcacacagcattgacatcagctccacgctctatgagtaatcccacaatttcaatgttgcccttacgcgcagcatcataaagcggtgtgctaccgcgtagtcttgcttcgacatcggctcctagagaaatccctttgcggacttctgtatagttattgctaaatagcatactattgtatcgatcatttgctccaaaactcatacttccaaaacttaaacacataattaagactacaattcgcatatttttccccttagtgtagatgttttttggcaagtgtcgcgattttttcaaaaatttcatcaaaatctaccccgtatgtgcgcgcattagccacagaagtcataaagttagtatctcctatgtagcgtgggacaaaatggatatggatatgttcaggtattcctgctccaccggcttttttgatattcatacccatatttaccccactcgcaccatattcatacaagattccaaaggctttttgacttagggtttgtatgtgtatccaggctttagaatccaataactccggtgaatcacaatgtgtgtgtgggataaacataaaatgtccgggtgtgtaaggatagagattcatcacaccaaaacagacttcatcacgataaaacacgcggtttttcttatcggattgaggatcggcgctaatggcacaaaacacacaagatgtgtcttttgatccaaaatattctttgcgccatggagcgtagattctttgcatcattctcccttagatgaagtttggtgcatcattgctaaaaagaataagatcgccaggcaaagtgcaagccttaagcataccttctagggattctttactatggaggataattttttgtgcttttgaaatatgtttggaaaatatttttgtattgagagtgcctgtgataatgacaatatcaaaaactttgtcaaaatatcttgcaagttcgatgttggattcttggttgctttctacaatgcccggtgttacgacaacttttcgcccttcatataatgacgccaaacgcgcagcttctagcatacctttgagattgccattgaaactatcatcaaggataagcttttgatttgtaagaatcttttgcaaacgatgtggcactggctcaaatttgctcacactatgttggatatcgctcatacgcataccgagttctaatgccatactaacagcagcagcgatatttccgacattaaaagctcccaagatttgtgtatggaatggataccaatttcccttatattctagttcaaagcttgtgccttctagtgtggctttgacatttctgcaaccagtaggatagaaactaataagcttctttttttgtgaatctaaatcttttggcagggtattttgttcaaatacaaaggcttttctaaggcgtgaagaattgagaatctcaaactttgtatttgtgatattttctagtgttttaaaatattctaaatgttgtgcgcctacctcgccaatgattgcgtattgtggctgcaaaaattgcgtgatttcatcaatatctcccttaaggcgcgctcctgcttcagcaagataaatatctgcactataatcaagattctcattcacatctgccataatgcctgtaagcgtattgacactgcgcggtgtcgcatagacactaaaatgtgtactaagaatctgttgcaagaaatttttgatactcgtttttccaaaacttgcagtgatagcaataattttaaggcgactcatcacttctagcttgtctttggcaatttgtctgtattgcttgagtagtacgcgctcatagagattagacactaccagcgcaaacaccaacggcaagagattcataaagagattagaggtttcaaataagattcccaatccctcatcaagcaagacaaaaagcaaacacaaagcaaaaaagcgttgcacgcgtttggtaaatttgagtggcttatcttgtttaaaacgccatattccaagagctatgagcagtgcaatagcaatgagcataacatattctgtatatccttgaatctgtagcgcagtggcaagggaaagtggcaagagaaaaaaccatatatgccacataaatttatggtgcataaaaataatgcgatacaagctgtagttataccattgcaagagtgtaatcagataatacgcaaactcaaaatttagcaaaaatcttgctacgataccaataaaatattctatagtcatactttctcacttattttaaaataacaaatccgctaaattcacgcggtgctattttttgggattgtatatgcaccacatcggaacgctctggaccactttttagatactgcataaatgtatcgagcactttttgttccccttgggcatagatttctacactaccatcttcgaggttgcgcgtgcttccttgtatagagagtttgtcagcgtggtatttggcaaactttctatatcccacgccttgcacttttccaaaaactaaaatgtaatatgtttgcatttatgctccttgtgatatggcattttgataaagagattctatattgttggcttgtttgagaaaaaagaaatgatctcctttgagcacaaaaaaatggctatgatctaaaagcgaggctattttttctccactgcttagtggggtggcactatcatctttgccccaaaatatataggcttgtgccttgcattgcaaaaacaaggggctaaaatcctcatctaccacatttttaaaggtttgatacattgcttcattgaggttgttggcgtctttggatcgcaaaaaggttgcgttgataccaaggtttttgcaaagttttgcaaggaatattttggagcgcaccttaagggatttttggactactatccctgcactgcttaaaagaataagttgtgttttggcaagaatggttgcaattttgccaccaaaggaatgcccaaccataatgtattcttgtgaatctagctcactaaaatgtgtgtgtatataagaaagaaaagattctataatcttggcataatcgtgtgtgtggagaatgtgggtatttggacttgccccaaaaccgggtaaatcaatataaagatgcacataatccctaaaactttccccaaaagcaagtttcataagctccttgttgcttccccacccatgcaaaaatacaagcacaccacgaggatttgtaatgtgtagattctgtaatacataactaatgctaaaagtgttatggttataagaaatttgtgcgcttgccataattgttatttgcccttggctctttggatttgctctatatatttatagcttggcttaatgcgctttgaatgcgggagatttgcactaagtgcttggagagtgcctagaaaatctgcaaaaagataatgcgcaccagaaccagggattggattaatctcattgagatagacacgatcttgtatcacaaaaaaatcacagcgtatcagtgcgccctcaaatgcatcagtgtagatttttttgaaattttcttgcaattcttgctctagtgttggggatatatcagcgcgtagcacttgttgtgtgcgcgaaaaatctaaatatttgtcctcaaaatttaaaaattgctttttggagggctcttcaacgatagaaaatacccattcttccccaatcttgcaccctgcgagattatattctttgacattttcgataaatggttcaacaagcacacgcgtatcatattcaaatgcgctatcaagcccatagcgtaattgactttcttgcgtgactacactcacgccaatagagctaccaagtcttgcgggtttgataatcacaggatatgggattgtgagtggcggtgtgtcttgctgtgtgagtatttgggattctagagtgagcacacccctttgggctgcaaaaagctttgtgagggatttatcaaaactcaaaacacaagcttgcacacgtggcgcgatataagggattgcaaaaaattcacaaatcgcacttagtgtgccatcttcgccatcggctccgtgtatgaggctatataaaactgcaattttaagaatctttggtttattaaataagccctgtggatagtaaaagccaccattgcccaaaaacagctccttggcttttgttttatataagccttgggcaaaaaatgaggatttcatatattcgtgtggaataagccaaaagcgatgatcgccatctaagaaaatatagtgttttatgtatgtgccaaacgtttttttcagtgcgattgtgctaacaatgctaatctcatgctcataacttgctccaccaaatactat

SEQ ID NO: 3768 - DNA, 23093 bp, synthetic construct
  misc_feature 1..23093: note = Synthetic
  source 1..23093: mol_type = other DNA
aattttgacaaagagggtaggggatatgtcttgcgcagaatcttgcgcagggcgattagacacggctatttattagggcttagagaaccttttgtttatcaagtagtaggttgcgtgtgtgagaatatgggggcgcattatcgttatttgttggaaaaacaacaagctgttatgcaacaatgcaaggcagaggagttaagattctttgaaacgattgaaaatggtatgaatctttttaataaagagttagaaaaattaaaagacgaaaagccaaatcagctctttagcggtgaagtggcatttaaactctatgatacttatggctttccgcttgatttgacgcaagatatgttgcgtgaaaatggctttggcgtagatgtggatagttttgaaatctgtatgaaagcccaaaaggaacaggcaaaggcaaattggaaagggagcggagatagtgtaaaagagggagattttaaactattattaagcgaatttggagttaatgagtttgttggatatgaaaagacagaagcccaaagccgaattctcgcacttttggacgcaaatttgcaacgcgtagaaagtatcaaaaaagacgaaatgggctttatcttgcttgataggacgcccttttatccagaatccggtggtcctatgggagataaaggtgtgctaatgcataataatgacaaaattgcagagatattagacactaaaaaatattttggtttaaacattagccaagtcaaggcggtgcaggatttgagactgaaagaaggagtgcttgcaattgtggattctatccgcttagaaatcgctaaacatcatagcgcgacgcatttgttgcacaaagccttgcgagagattttgggagaacatattacacaagcaggtagccttgtagaatccaatcgtttgcgttttgactttagccattcgcaaagcctaaataaagaggaattggaaaagattgagcagaatgtaaatgcacagattctaagttcgtatccgcaaatctgtgaacaaatggatatacaaagtgcgaaagcaaaaggagctatggcactttttggtgagaaatatggaaccgaagtgagagtgattagttttggcgattccatagagttgtgtggtggaatccatgtgccaaatactgcatttattggaagtttttacatcgttaaggaatccggagtaagtagtggcgtgcgtaggattgaagcggtatgcggtaaggcagcctatgaattgggcaaaaatgcacttgacgacatagaaaaagcaaaggaaaacttaaaagcacagaatcttttgcaagggattgacaagctaaaagagcaagtgcgtgaattgaaaaataaagcaaacaaattcccaaacagcctaaaggcaatgaaatcagaaattatcaatggaacaaaacttattgtgttggagttaaaagagattgaggcaagtgaggcaaaaaagcttgtagataatgccaaaaacgaaaatgagaaagtagcaattcttttgctttcaacagaggagcaaaaagataaaattggaattactgcaggtgtaaaaggcgtggatttaaaggctggagcttgggtaaaagagattgctcagattttaggagggaatgggggcggacgcgaggattttgcaaccgcaggtggcaaagataaacttaagattccacaagctttgcaacgcgcaaaagaaatcgccaaagaggcattgaagtagcgtcaaaaaaacattgaaattcattctaagcgtgaagcttagaatttaaaaattggaataatttgtagaatctttgttttggacttcttgaattaaattgcgtgttgcttcattaatggcggaattaattgcattttgaatagtaatttggatttggttgggattgagtttggatttctctccaaaaatgactaaatattgactattttgattttgaatgcttgattttccacgaaagattctcacttcattggttctatggaaattaagttgaacttcaaaaacagcttggtcgcttgtttgcgaactccaaaaaccgccttgtttagtctgtgtattgatattgccaaagactacttctaattgataatgattcttttgtgtattggttgtttctgcgctaatttgttcagattgaataaagcaaccactctgcgcaagtgatttttctaccatttgttgcacctgcgtattaggaatcgtaaggtcattataatcaccactttttaaacccattagatgatagctcgcaatgggttcttggcaagtttttaaaacacgtgtattgggcaaatcattaaacttttgcgcacacgcgcctaaaagcaatgcgctaaaagtcagaaaacaacttttttgtattagatttgggcttagtgcttttagagagaacatagatactccttgaataatgggaatcggtgaatttgaaaggttaattttagcacaatttattgctaatttttatcaagattgatacaatacaccaataatttataaggtaaagcattgcattttttcaaaggtaaaaaaatcatcattttagaatctttattgtgtatcctcttgtgtgtcggaatcattttttatgcacaaattaacaaacgaggattgcaaaaacaagacgctttactttattatgtgaatattagtggcaagcaacgtttgcttgctcaaagaatcgtttttttatctcaaattgttgttacgaatcgtattttgaatcgcaataatcccgaaagcctaacagaacttcgcagttgtattaatcagctaaattctattcatatgattttgcaaaattttgtaatttctacaattattggcaataaaaaagcttctactttagatgaaatctattttggcgatggaaatttgaagtttaaaatggaagaatttttgaataatgcaaataaaatatttttcttgcaaactacacaagaagcctttcgcattaatcaagaacttttgcaacaactagaagaggataacggattgcttgcgagcttagagcttgcaacattaagccagcagttttatgcacaaaatatcatcaaagaatcgcaattttatcttcaaattctcctttattgcgcatttttaatttgtggcttacaagctgttttaattttatggtttttgacacgcaaattagatggataggtttatttttttaaaaaataaatgaagcctcaaggagtttttatatgctaaaaaatctttttccttttttggctttgcttgtattttttatttttcatttaagcatctattttttctttattaagaaaatcattaaattaaagattccacttttggtattaaaaacttttttgatttttaatttttttggggttgtggtttattttgtggcgcgttattgtgtagattttccacaaagtatatattttttagcttctttatccattggtataggatttgtattatttgtcgcaatgttagtttatcaatttcttgcattattgttgcgtcttataatttggttttttccaaaattctctcaagagcgcagaggattctttcaaaggactttaaatgccacaagcggaatctttgcgttaggttatctaggcacgggattggtggagggaagattatctcccaaaatagagcgcattaagatttcattaaagaatcttaaaacaccaatgagtgcggtgcaaatcagcgacttgcatattggaggattgattgaagaaaatgttgtacgccaaattgtgaatcaaaccaatgcgctaaagccggattttatcgtgctaaccggtgatattatagacacagaagtaggacgagtgcataaaactattgcagagcttggtaagtttcaagctcctttgggtgtatattttgtaacagggaatcacgaatatttccacaatatccaacccttacttgaaagtttaaaagccattggaattaagacattggaaaatgaatgcgtgcaattaatgaaaagtatcaacggacaaaaggaagtagtgttaaatttggcgggagtgtatgatttgtttggtcgcagaataggcgttttagagccaaatttggaacaagctttgcaaaatagggcagaatcccaacccttaattttattagcgcatcagccaaaatttgcccttgaggtgagagaagaacatcaagtggatttaattttgagcggacacacgcacggaggacaaattttcccctttcaattccttgtaaagctagaccaaccttatttagcaggttggtatcagcacagcctaacaacgcagatttacgttaatcgtggcacgggattttggggacctcctatgcgcattttagcgcgtgcagagataacttattttgaatttattgcagcttcaaaagactaaaagcaaatttcaaagaaaagaaagtataatttcgtatttaaaatttggaaatctatgaaaaacaagaatcacttagtatttttattgttgtttatagcaaattctttttttggattagagttttatatcaatagcggtagagaagagaatagaaactttgctgttttaaacctaatagacaatgttccgtttgcttgtgtggaatcctatgatagagcgtctgaagtcagtgagattatttgcggatttgattcccctttattatcgcgttttcaacgcagtgagactttatttttttctatcgtgccagaaagtcttgaggataatacgcagagattctttttgaaaatcaaaccaaaaaatggcaaaaaaattaaactttataatacagaatttagccttatctctaatcagcctatcccgcaagaacacaacgaaaaatccaaacgttggcaaattttaggttatgaaaataagattccatttttaaacgaccagccaagcaatggattgaattttcctattttctttgaggaacatttaccgagagtgggggcattagatgtgcaaatgcgcccaatgaataatgaagttggagcggacaaggattctttcttgcacatacaatccttaattgctgaagaatcctatactgaagctttgaatgcaatagaagaaatgcttgctctttatcctgatacaatctttaaacgtgatattttatattttaaaattgctgcattggatagcttgggtaaagaggaagattacgaagatacaatgatactagctaaagcttggctagaagcttatccaacagatgttcatgtgccacaaatcttatttatattggcaaaaacttatgctaaaatgaacttttttgaagaggcaaaatactattatgataggctttttagcgagtataagggtgataaatacgagcttcttgcgcgacttgattatggagagaatctttatattaggggggaccgcaaagttgttttaaatatgtatgaatctactttaaatgaaacgacagatttagaaatcgcttctttagcatctattttgcttggggattattatcgcaaagcagaaaacaaaacagaggcacaaaggcatcttaaaagtgtcctagacgcgaatccaaaatattttcttaaagacattccaaagtattataatttgttacaaggttgggcagaagttggaattgtagatgtgccttcgcaagtggcagaagtaatgtttgaggctttggaggataaagatgacccattgtatttgccactccttaaaagtatggcaatatggtttgacaaagcaggaaatcttaaaaaagcacaccaatattatcaacttttacttaaagaaacagaaagtgaagcggaacgacgcgaagtaaaaaatttggacgataatttgttgttgaattataatgaggataatgcgacaaaacgattagaacattatgattatgtaatggaaaattatcaaggcaaagaagaagccaaaatggcattagagaaaaaagctgaaaccttgtatgaaacagggaattatcaagaaatctttgctttaagagaggagttagagcgtcaattaggagagaaccccgctgttttattgaatgcgcttagtgcattgacgagagattctttaaaggcacaaaattgtaaagaagcagcgtattatggtagcttgtatgccgagaggattccattgcaaagcaatgaaaagttgcaaatgttggattgtttgagagaaaataaacaatacaatgcggcacaaaaaattgctcaaatagaatcccaaaatgccaaaacagctacggataaagaggattggctctatcgtttggcgtgggtagagtatgaaatgcaagattatcccaaagcagctcttgccgcaagggataccttgagcttgttaagtaatcccgcatacaacgatagtgcttggatattgtttatgtctttgagtaagcaaggaaggtgggaggaagcgtttaagattttacctatgttggaagataaattaaaagatagcaatccaatgattgaggtttataaagaagctttgcaaagatctcttgcaaacaaagacgatacagcaattaaagtgtatgcaggcaaactgatggctctccaaaagcgatatgaacgttttgaatattccccttgggttgaattgggtatgatagaggctctcaatcgtgaaggtaaatttcaagaatccttagatttgctcaaaaatgtagaatctcgtgctaattcaggaaatgagcagattcaaatttattatttacaaggttacttaaacgacaaattgggtaataaaaatgccgcaatagaatcttataatcgttgcgaggctgtccaagcagaatcgccttggaaaaatctctgtatagatgctaaaaatttattggaaactcaaaatgtatcccaaactcaaggacaaccatgagagaagaaatgcaaaaaaataaacaaaaagcaatgaaaaatcaggaaatgaactttgaagattatctcagtataatttcaaaatgcttagaaaaattagaggaggaagaacttactcttaatgagggtttagcgttctataaagagggtatggaaaatctacaaaaagcacaaagaatcttggaagatgcgcaattacaatgcgaagaactcaaaatgcaatacaaaaaggaaaaccaatgaaaatcgctgctctacaactttcaaataataaaagtcaaagtgagatagaatcttatcttaagacggctgtggaagcaaaggctaaaattattctttttggagaatatttacttaatccgttttttaaaaatttggaatctaaaagacataaaaaatcacaatggttagaacaaatcaacaaagaaaatgaaaatttgttgcagctttctagcaaatatggaatcatcattgtaacacctattttagaagtggtttcccgcaaactttataaaacgattctaatcattaataagggcaaggctttgcgttatagagcacagaaactcatgccttatgagcattggaatgaagagaaattttttgccaatacttctccaaaaatccttagaatccctccgatttttagcgtgggtggaattaaattttctgtgctttttggttatgaattgcattttgatgagttttggttaaaatttaaaaatgagaatgtagattgtgtattgctcccgagtgcttccacctttgattcctctttgcgttggcgtagtattataaaaatgagggcttttttgaatagttgttatgtattgcgtgcaaacagaattgggcaatatgaggacgcaccgacaaagacattgtggaatttttatggagattctttgtttgtctgtcctaatggggaagtgatagattgcttaggtgaccgcgaggaattactgattgccgaagtggataaaaaatatttaaaagaaattaaagaatgttggagatttcgttcttaatttaaagcttttagattcctaatttagtattattaaagtattttgaattgattcttgcatttatgttagaatctctattattttttaagattaaatttataaattttagatataattaatgttttttcattaacttaaaaataaattaagttttatctacttcttggagttttctatgtctgcaaaaaatatcaatcaacaattagacgaattgtttcaaagtgagtttaaatatgtttcttatgaaaaaattgcacaggttttgggtaaacttcctaccgctgcacaagccaaaagagtgagtgagcttgcaaaaaaatacaatagaaaattgatgtctgcttctgaagtagcaaaaattctgaatcaagacgatgcaagaaaaatcaaagaggataaaaaacggcttttagatgaagaattagaagatgaatttgactttatgaaagagcgtgaattgcttgaatggagtcgcagtgatagccctgttagaatgtatttgcgtgaaatgggacagattccacttttgacacgtgaagatgaagtggagcttagtaaaaacattgaactaggcgaaaatattatcctagacgcaatttgttctgtgccttatttgattgattttattttggattacaaagaagctttaatcaatcgtgaaagacgcgtcaaagagctttttaaaagttttgatgatgacgaggaggagggcgaagaagaggatttggaagaggaggaggaagaggagagtgaaaatgaaaaaggtgaggattccaagaaaccgattagtaaaaaagaccaaaaacgcgtagaaaaggtgttgataagctttaaggcattagaaaaagcaaagaaagattggctgaaaacttgggaacaagaaaaggacaatgagagttgtgaggatatgttgtatttgctgactttggcgcataaaaaacagcttttgaaagaaaagctgctagacttgggacctacaagcaagttaattaatgagcttgtcaaagcaatggaaaatacaattaaaagtgatgagggttttgaaaaggaattaaaacgtttagaatatcgcttgcctttatttaatgatattttgctaaataatcataaaagaatcttggataatattacggaaatgagcaaagcagacattactgctgctgcgccagaagcaacgatggtttctacttatatggagattaaaaagttgtttcaaaccaaagcagcaagtgaggggagctttgacttagaaccagaaaaacttaagcaaatcttagagcaaatcaagcgcggaaaagacattgccgataaagcaaaagcaaaaatggcaaaatccaatctacgccttgttgtaagcattgccaaaagatatacgaatcgcggattaccatttttggatttgattcaagagggcaacattggattaatgaaagcagtagataagtttgagtataaaaaaggctataaattctctacttatgctacttggtggattcgtcaggcaatttcccgcgccattgccgaccaagcacgcacgattcggattccaattcatatgattgaaacaattaatcggattaataaaattatgcgcaaatttctacaagaagagggtaaagagccggatttggaaaaaattgcagagggtgtggggctgcctgtggataaggtaaaaaatgtcatcaaaatcaccaaagaacctattagcttagaagcacctattggaaatggtgaagatggaaaatttggggattttgtagaggataaaagttctgttggaccaatggaccatatcttaaaagaggatttaaaaagtcagattgatgatgtgctagaccagctcaatgaacgcgaaaaggctgtgattcgtatgcgctttggattgcttgatgatgaatctgataggacattagaggagattggcaaagagctcaatgtaacgcgtgagcgtgtccgacaaatagaatctagtgcaattaaaaaactaaaacacccaaaagtagggcgcaagcttaagaattatattgaagattgatttgcaatttagaaagcaaaatttgtcatttgaaattatttatttttataactgattgtttgactcaaagtttaaggagttgcaatgaaaattcttggttttgatataggcattacaagcattggttgggcatatgtagagggagaagaattaaaagattgtggggtgagaatctttaccaaagcggagaatccaaaaaatggtgattcgcttgctgctccgcgtagagaagcaagaggggttagacggagattagcacggagaaaagctagactcaatgcgattaaaagactgctttgtaaagaatttgggctaaatttaagcgattatcttgcaaatgatggggaattaccaaaggcataccaaacaagcaaagaacacaaaagcccctatgagctacgcactttagctctaagtcaaaagctagattctaaagacttagcacgggtaattttacatatcgctaaacatcgcggctatgggaacaaacacgcaaaaacaggaagcgataaagattctggaaaggtgctaagtgcgattaaagtaaatgaaacagctatgaaagataagtatcaaagtgtaggtgaatatctctataaagaattttatcaaaagctaagattagaaagtgagaaaaaaggtaacaatattacaaaagagtttaaaaatgtgcgcaataaaaaagaaagttacgagcattgcgtggcacaagagcaagtaagggcagagttagagctcatctttgcaaagcaaaaagaatttgggataacttttagtgaaaattttgaatcacaaatcatagaaacagccttttaccaaaaggatttaaaaagttttgaaaataaagtcggcaaatgtgtgttttatgatgagccccgcgcaccaaaagattctttaagcgcaatagagtttgttgccctcacacgcattatcaataccctaaagaatcttgaagaaaaaagcaaaaatcttggcattggcgaagcgtatggaaaagataagattcaagagattctaaaaattgtgcttgataaaggcgagataagctataaaaaattgcgtgagattttgcaccttgatgagtgtattttatttgcgaaagattctaagcttgattataccaaaggaatgcaagaagctgaaaaggcaaaacttattgagtttaaaaatcttaaggcttttaaaaaagcaatgggcgaagatttcggcaaattttctcgtgaggagttagatagtatcgccatggatattgccctcattaaaagcaaagaaaatttagctaaaaaattgcaaaactattccgcattaagcaaggagcaagtagaagccttaagcaatttgaattttgcaaaacatattgatttaagctttaaggcacttgataagattctaccctttatgcgtgaggggttgcgctatgatgaagcagtgaaaaaggcaggattgcaagaacatagaaagcataagcaaaagggtgagtttttaatcccgctaaaagactatgaaccctatttggcaaatccagtcgttgcaagagcattaagtgagtatcgcaaggtgctcaacgcacttttaagaaaatatggaaatgtgcataagattcatttagaatttacgcgcgaagcaggcaaaaactatgatgaacgcaagaaaattgaaaaagagcaaagagagcattttgaggcgaatcaaaaagcaatacagcaatgcgagattctaggattacccattaatggcgcaaatattcttaagatgaagctttggatagaacaaaaggagctttgtgtatatagtgatagaaaaattacaagagaacatttgctagattccaaggtgttggaagttgatcatatttacccttactcacgcagttttgatgatagctatatgaataaggtgcttgtgtttgctaaggaaaatcagggcaagggcaataaaacaccttttgaagcctttggaaatgataaagagaagtgggataggattcttagccttagtgcaaaccttcctaaacaaaagcaacgtagaatcagcaataaggactttaaagataaagaacttggctttattgcacgcaacatcaatgatacaggctatattgcaaggttagcaagtcaatggacgaatcattgcctaaagtttgaaaatctaagtgaaaatgaagtaagcattgcaggagaaaagggtagcaagaatcatctagaggtgataagcggacagctcacatcaatgcttaggcattattggggcttgggtaataaagatagaaacaatcatctccaccacgcagtggatgcagttatcttagcctataccaacaatgcgatgattaaagcatttgcaaattttagaaaaaatcaagaggaaaataagaaaaaattctatgctaagcaaattgcagaatctgaatacaaagctaaaaaagcattctttgagccttgcaaaaactttaggcaaatggtgctagacaaagtggattctatctttgtctccaaacccccacgcaaaagggcaaggggagcgttgcacaaggagacattttattcttttgaaaaattatgtaatgataaagaatattctaaagataataaaatggattatggtgggcaaaaggggatagaaagagcgttagagcttggcaagattcgccaagtaggcacaaagattgtgagtaatggtgcaatggtgcgcgtggatatttttaaagacaaaaaaggcaaattctatgctgtgccaatttatacaatggattttgcacttggaatcctgcctaataaagcagtagccataggcaaagataaagacggagtgattaaggattggatagaaatggattccaactatacattctgcttctcactttttaaagatgatttaatcttagtgaagaaaaaagaaatggaaaaggcggaattgtgttattttgtaagttttgacacatcaactgcaagtattcaagtagagaaacataataataaatttgagggtttgagtgagaatgaaaagattttatactctaatgccacacaaaaagaagtggtgggtaaaagcataggaatccaaaatcttaaaacttttgaaaaataccaagtctctcctttgggtgaaatgcaaaaggcagagtttgaaccttgccaagatattgcactcaaaagcagtcctaaaagaaaaaattaagcgataagaatctaaaggagggcaaggaatgtttgatgccgcatttcgcaccttatttttaagcacacccgcgcgattaagcctagaggataaacatctttgcatagtccaaaaagacaaagaaagtgtaaagattccgcttgtagatattttgtgtgtgatgttagaatttcatcaaatcacgcttacaaatgcgctgcttaatgcatttgcacaatacaaaattatcctctttgcttgcgatgaatcgcatttgccaagtgggctatttatgccatttttggggcattttagaagctttagtgtgttgcaatctcaaatagccttaaacagacaaagaaaggcgattctttggcagcaaatagtgaaggcaaaaattaacaatcaagcccttttactaaaaatgctgcataaaaaagaaagtgaggaattagaaactttagctaaaagtgtgaatttaggagattcaagcaataacgaagctaaagccgcagcaatttatttcaaagctctttttggtaaaaacttctcccgcaaagtgcaaatttttgaagagagtaaaatgggaacgataaatgctgcactcaattatgcttatgcaattatacgaggagtgattacaagaagtctttgtgtgagcggactaaatcctgcacttgggataaatcataaaaatcagtttaatgcctttaatttggcagatgatttgatggaaccttatagaatctttgcagattctgttgtcgtgcagatggttgaagttggggaattagaggagagcttaagtttgcaaaatcgtgcgaagctggtaagtattttgcagagtgcggttatcgtagaaaataagctttatccacttactcgtgcaggcgttgtgagtgcgcaaagtgtagtgaaatgccttgagatagagaatcttaagctcaaacttccgctattttgcgaggaaaagagtaatggaagaaaaatttatgagagtgttagtgatgtttgatatgccaacttgtagcaaaaaagagcgtaaagattatgtaagattccgtaagaatcttatcaaagatggctttatgatgttgcaatatagcgtgtatatgagaatctgcaaaggtgtggcaagtgccaataattatttagataaggtgggcttgattgtgccacccaaaggacatattagggcactaattcttaccgaaaagcaatttgataatatgcgattattgcttggcaaaagaagtgagaatgaaaaagcaaatgcaccaagacagcttacgcttttttaggttaaaggatagagattctaaatgcttagattcttaaaaagatttgttaaaaggaggtatcaataagataactcggttttaaagggattgtaaccctgcggagaccgaaaactccttattttagccgctttttaaattctttgaaaggattgtatcctaagttttcttaaaatacccctttttaagatattttggacattcaaagtctttcaaacattgtaaaatagagcctttcaagcaatgtattttaccataaaagaatttagaaagcggctaaaactcttatgcaggacttatggatgttctagatattttaccataaaagaatttagaaagcggctaaaacaatcaagccattttcaaaaatatttttagaattttaccataaaagaatttagaaagcggctaaaaccggacgcgcgatgctacaaatttctgaagtattttaccataaaagaatttagaaagcggctaaaacaggtgcgagatacgaatcttttacgatgtcattttaccataaaagaatttagaaagcggctaaaacaccaaagaggggtaagtttgaacaatctctattttaccataaaagaatttagaaagcggctaaaacttgattcctgttcagtgtttggaggctgtgattttaccataaaagaatttagaaagcggctaaaacatggtattatgtcgctactagagataagaattttaccataaaagaatttaagaaatcaaaacatcttaaatcctagcaaaatacatttgtcaaaataggggaggacacacattgctttgatgtctccattaatcccaatatcacgcaaggtttcataataacgaatatcaaattgtaaatgactatttgcagtggtggagattccaactccgctttgttcattaaaataaataaaccaagaaatcttgctaaataccaatacaagtgcgtgaagtcggtttaatgcctccttttctttgggagataacaaatgatagccctcacgactgacgacgatacgatgacgaaatcgcacgaaatttcgctctaatgtttgctcatgcacttgagtataaaattggtcaaaattcataaaattaggctgtatcaacgaacttttagaatcttgtgcgcaagacaataagggaaataagagaaataggactttaaagaaaattttaagattccataatggaatcttaaaataagaattaaagcgtttcaataatattttggaattgttgataaaaaatttgatttgcattatggagtggcattgtaatgtcgccaatctggagtgtttctccaccaagtattgcgactttggttaaactcaagtttgaatttttaagcaaagaaataaccctttcaagattttgcgattctatggcaagcaaaatctgtgtcggtgcttcgccaaaaagctcatcaaagctaagcttttttgtggttgtaacaccgatatttcctcttatgcaagcttttgttaatgctaatgctagacctccttgataaatatctactgctgctttaagcaatccatattcattggcaacattgaggaaattccataggaaaagctcatcttgcaaattgatttttgcaatctcgcctttgaaagaattaccaaaatattttgcaaccaagcttgcgccaaattttggctggattccttgcgaggcaagacgatagatttctaatccggcttctttgaaatgtgaagaaaggacattattcaccgcgtcaattacgcccactcccgcaatacttggtgtaggataaatatctttgccgttggtttgattataaaggctgacattaccgctaacaacaggtgtattgagggttttacaagcctctttaatgccctcgcaagattctttaaattgccacattacttctggattctctgggctgccaaagttcaagcaatccgtgattgccaaagcacgcccgccacgcaaggaaatatcacgtccaacttttgccacagcttgctttgctccctctcttggattaagatagcataatcggctttggcacgctacactcattcctaaacctttgccattttccttgacgcgaattacgcttgcaccgcccgctccactaggaataattgtattggtttgcacggtagaatcatattgtgtataaacccaagctttgtcgcagatttctgggcttttaagcagagattcaaaaactttttgagattcctgtgtgcgcaagcttttctcatctaaagatacgatagaatccaaataatgcggatttttgctcacgggtctttctagcacaggtgctttttcactcaaaggagcaataggaatctctgcgcatttttcgttataccaaaagagttccattttgccgctattagttacttcaccgataattgcacaatctaattcccatttggaaaaaatttctataattcttgcttcacagccttttttggcacagattagcatacgctcttgagattcactaagcattagctcataaggcgtcattccctcttctcgcataggcactttatctaagtgcattaccattccgcttccactgcgtcctgccatttcaaagctagagcttgtaagtcctgctgctcccatatcttggattccaacaattaaatcttgtttaaaaagctccaaacaagcttccaaaagtaacttttcagtaaaagggtcgcccacttgcaccgttgggcgcaaggatttagaatcctcactgaaagaatcactactcattaccgccccgcccaagccatcgcgtcctgttttagagccgacataaatcacagggtttccgattccctctgctttaccataaaatatttcatcatttttaacaattccaagagaaaaggcattgacaaggatatttccttcataactaggttcaaaactcatctccccgccaatagttggcacacccatacaatttccataacctccgattccagcgacaacgccacgcaacaaatagcggtgcttcgcgcctatggaatctttcttggtaatatcgccgaagcgaatggagtttaagctcgcaacgactctagcacccattgtaaaaatatcacgcataattccacctacgcccgttgcagctcccgcatagggttcaatgaagcttgggtggttgtgagattccattttaaagactgctccatatcctcctccaatatcaatgacaccagcgttttctcctggtccttgaagaacccaaggagcgcgtgtaggaaagccattaagataaattttactagatttatagctacaatgttcgctccacatagccgaaaagataccaagttctacaagattaggttctcgtcctaagatacttaaaattttatgataatcctcttgtgctaatttatgttgcttcaagacttgggataggttttccattttgttccttacaataaaaaaatgcaattttgtgtctttggtgtgtaaaatttgcaaaatcaatgaaagtttatcaaatgacgcataaagtatagataaactaagattgagataaagttaaattcagtaaaatattcgcgttttatttttaaaacaatttttcagcaggaattttaaggagaaatctaagatgaaatacatcaagtttttcaaagagctaaacaataaagatgtccctattgttgggggaaaaaatgcaagtatcggagagatgtttcaagagcttgtgccaatgggaatcaaagttcctaatggttttgcgattacaagtgaggcatattggtatttgctagatagtgcagggattcgagagaaaatcaaagaattgcttgatgggattgatgtaacagaaattgatgtattaaatgttcgctccaaaaaaattcgcgatatgatttttggcacaccattgccagaagatttacgcaaagagattttagaagcctataaaatcttgagcgaagaatacaaaatggaagaggctgatgtggcagttagaagctctgcaaccgcggaggatttgcccgatgcgagttttgcaggacaacaagacacttatttgagtgtgcaaggtcaaacggaattaatccattatgtaaaatcttgcttcgcttcgcttttcacagatagagctgtgagttatcgtgcttcaagaggatttgaccattttaaagttgccctttctgtcggagtgcaaaaaatggtgcgttcagataaaggaagctccggtgttatgtttagtattgatacagaaacaggctttaaagacgcagttttcatcacttctagttgggggcttggagaaaatgtcgtgggtggaaccgtgaatcctgacgaattttatgtcttcaagccttctttggagctaggaaaacgaccgattctaaagcgtcagttaggatttaaaaatattaaaatggtgtatgcagccccaggcgcaaaacatccaaccaaaaacattgaaaccactgaagaagagcttaaaagcttctcgctagaagatgatgaagtgctgactctagcgcggtatgcaatgttgattgagagacattattctaaggaagcgggtgaatatcgtccaatggatatggaatgggcaaaagatggaaatagcggagaaattttcatcgtgcaagcacgtcccgaaactgtgcaaagccaaaagatgaaaaaacaaagtaatacttttgaaaaatatttccttaaagataaaggcgacaaagagattctgctaactggtaaagcagtaggcggcaagattggaatcggaaaaattcgcgtgattgataatatctctaatatgggcgaattaaaacaaggagagattcttgtaaccgataatacagaccccgattgggaacccgcaatgaaaaaagcggcagcggtaattacgaatcgcggggggcgcacttgccacgctgcgattgtcgcacgcgaaattggtgtgccagcaattgttggggcagtgggtgcaacagaaaagttagaaacaggtatggaagttaccgtctcttgtgcagaaggtgaagatggctttgtgtataatggcgtgtatgagtatgaagtagaaaaaattgacttaagcacattagagcaaccaaaaactaaaatctatatgaatatcgggaatcctgaaaaagctttttcattttctatgattccaaacaatggtgtagggcttgctagaatggaatttattattaacaattacatcaaagcacaccctttggcattgattgacttgcataatggcaataaagaatttgatggcgtagaaagcgtaagagaaattatgtcgggctatgcaaatccaaaagacttttttgttaaaaagattgcagagggcgttggaatgattgcttctgcattttatccaaaacccgtcattgtgcgcacaagcgactttaagtccaacgaatattgtcgtatggttggtggaaaagattatgagcctaacgaagagaatccaatgattggttatcgtggagcaagtcgctattattctgaacaataccgacaagcgtttgaatgggaatgcgaagcacttgctatggcgcgaaatgaaatgggattttctaatatgaaaattatgattccattcctaagaacacctgaagaagggcgcagagtgcttgatattatgcgcaaaaatggcttggtgcaaggggaaaatggtttggagatttatgtgatgtgtgaattgcctgtcaatgtggttttagcggacgagtttttgcagctctttgatggattctctatcggttctaacgacttaacacaacttactttaggagtggatagagatggtgagttagtgagccatatttttgatgaacgcaatccagcattattaaaaatgtttaaaatggcaattgaatcttgtaaaaaacacaataaatactgcggtatctgcggacaagccccgagcgattatccggaaattgcagaatttttagtagaaaatggcattacttctatttctcttaatcctgattctatgattgaaacttgggacagaattgttcagcttgaaaagaaactcggaatctcttaaaggctaaaagtagagctttaagctctacttgctttaaaaaacctaaaaaaataaattaaacttcgtttttgaaatacttttatatttttgacgttgtataatagttattattttaaaattaaggattggtttgaaacttgcagtgtttgattttgattccactttaatggacggcgaaacaattgatttgttagcacgtgctaacaacagcgaagcggaagtaagtaaaatcacaaaagaagcaatggcgggtcaattagatttttatgatagcttaaaaaaacgtgtagcgactttaaagggtatgcctttagaaaaggtttatgccgtgtgcaatcatttgcgctataatccgggcgcgaaagaattaattgcagaattaaaaacacgtgattataaaattgtggtttttagcggtggatttgatgaagcagtgagtgcaggacagaaagcattaggttatgatatgtattttagcaatattttgcatcgtaaaaataatatattgacaggagaagtaggcggagaaatgatgtttgcgtattctaaagggcgcatacttgaaaaattgcaaatcttattgaatgcgacttacgaaacaacgatagtagttggtgatggcgcaaatgatatttctatgttcaaatatgctagtaaaaaagtagcattttgcgcaaacatagttttgcaagaggctgcaaatatcattattgataaaaaagatttaatgcttatcaaaacatatttagattaaggaggataatatgcaagaaagtgcattgctttcactttggtgtgattttatagaaagagattttttggaaaatgactttattaaaatgattgagggcgatttgatagagggtgcgacaagtaacccgactattttccaacaagcttttttaagcgaaagttatcaagcgcaaaaagattctttgaaaggcaaaagcccaaaagaaatttatgaagcacttgccaaaacagatattcaacgcgccgcagagttacttaagccactttacgatgcaaatcccaatgatggttatattagcattgaggtagatcctaatctgtgtgaagatgcaaaagcaacgattgaagagggtgtgcgcttgtttaatgatattggttatcctaatgtgatgattaagattccagctacaaaagcaggctttggagcgatgggagaactcattgctcaaggaatctccgtcaatgcaactttggttttcaacaaagaacaagtagtaggttgtatggaggcatttaaaaagggttacgaacagcttaagcaaacaagcaagaaagaattaaaagactttcctcgcgcagttgtaagtatttttgtttcacgttttgaccgcaaatgtgattctatcctacaagaaaaaggaatcccaaatgcaactttggggattaaaaatgcgcaatatttatatcatatccttaatagttattctctctctggcgtgcgggcactttttgctagcacaggcgtcaaaggcgaagacttagagcctgtgtattacatcaaggagctctatcacccctatgcagtgaataccgcaccactgactgccttaaatgcttttatggaattaggagatgtagaggaagcctatttgccagatatggacgaattagaagaattttttgcgagtgtgaaagaagcgggagtggatttaaataaagtcagtaaagaactattggagcagggcttggaggattttaaagtcgcttttggaaagattttagcaagtttggaataatttaaatcaagttttaaaaaaatccgctataatggcaggcttattttaattttaaggatacacaatgttaagtggaataattagagagagtatttctaagtctgatgtcaaggctttaagaaaaaatggttatctaattgccaatatctatggaaaaggcaaagaaaatatccattgtgcttttaaacgcaatgcttttattcgtgaaataaaaagcaaaacagatttaatttttgaagtagaagttggcgcacaaaaatatcctgtcgtaattcaagaatatcaaaaagaccctattacaagcgaaattatccatgtggatttaatgcttgcacaacaaggagttgaggcaaaatattctgttaaagttcgcacggttggaactccaaaaggtctcaaaaataaaggtgttttgatgatgtctaaaaaacgtattaaagtcaaatccaaacctgaaaacctaccaaaaaattatgaaatcaatgtaacagatttagatgtaggagatgttgttcttgtaagagatttgccaacatttgaaggagtaaaaattgttgaacgcgatgatgtagcaattgttggtgtgattaaatcccgctaataaaatgtttctcattgtaggtttagggaatccgggtcaaaaatatcaaaacaacagacacaatatcggctttaaagtcgtggattccttaatctattcccttaatgccacaaagcaaagtgataaaaactttcaaggtgaagtttataaatcaaatcaaactatcctcttaaaacctcaaacttttatgaatttatcgggagaatccgtgcaaagtgttagaaatttttataaaatcagtgaatttctagtcattcacgatgagctagatttgccttttggagcagtgaaatttaaatttggtggaggaagtgggggg

SEQ ID NO: 3769 - DNA, 23081 bp, synthetic construct
  source 1..23081: mol_type = other DNA
  misc_feature 1..23081: note = Synthetic
ttgtaaatgcatataaacatttacaattattttaaaccaactaaagataggggtgaatatgaatattaaaaaaagaaaacaagcaatatgaaccaagagacattgaagtatcttactcgctatgtttggtgggaaaagcctgatgaaatcatcaaaaagaacccgctaagagtcattgcaagtgctatgcgctatgctaatagcgtggattcgtataaaaaactcctagaaataggagagtatgcactaaaagaaactctatcaaaagcgcaagctggctggtttgataaaccaagctggcattattggcattatatactttatggattaaagacgaagattccgccatttcctaagagaggatttttgcaagattctaaagattctaaagattctaaagattctaaagattctaaagattccagcgctaattcgcccttttctggcaggctgggctctgcaaaatctgctggcgaaatatcaagcaatgatagcgtgccaatgatagcagatgcagatatacacaccttgcttgctaccaagctaaaagctatttgttatgaagcgaactacaaagattatctagacattgcaaatattttaaagcacacatccgcgaatttgctagaaggcttagaaaatgtctcaaaaatttttggagaagactatccattaatccagattctaaagaggctggcattttttgaagatggcgatttgtataaattgcaacaagatgataaaattattttgctgcaagctattgaggcaaccaaaccatatttccagccaaaaacacaagaaaacgccaattgtctaaataagccccaatagcaaaataatattactataagctatctatacatataatataaatatatttatatctcaagtccatatatcttataatacaaaaaggcacaatatgacacaaatggaatgtctaaaaatgcttgattttttggaaaaaaataaagaatggttatttgatattaattttgtatgtaagtatttaagaagcgacaacacgcaggctgtaaaaatcgatttaagtagattctgcaaggctgggctaatcgagcgcgtagcaaaaggcttgtatggcaatccaagaacaaatgagcgcggagtttttcatttggaaaaaatcgcaacttatcttagaccaaaaacgacattttatttgagtcttgaatatttgcttagcgaagaaggacttatctcacagattccaaataggctaacttttatcacttcaggcagaagtcaaacatttttcacaaaatatgggattttggaatatacacatacttcacgagataaacatactttgctagataattgctattttgacaaagtaaaggggctatgggtggcgacaacagaacaggctatagatgatatttatagacacaatagagctgtagatttatatgaagaacagcaagctaaagataggggtgaatatggatattgaaagaattttgagaaaatacccgataaatgcaagagagacaatctttaaagagattatgcactatgaaatattagagagtctatttagcataaatgatattgccaatactctagtatttcaaggcggaacagctttgcgtttgtgttattatattaatagatatagtgaggatttagactttgtgataaataaaggagcggagtttagcaaagagtttatgcgtgattttgaaaacattttttgtgaaaaaattagtaataagtataatcttgagacagagataatagagccaaaagaaaataaaaatatagtccagcgatggagtgctagaatatatttgccaaaccatagcaaaaaatcaaaaatcaatctagaaatcgtgaatattccaagccacgataatagaaatgtttatctgatacctaattatgaagaagttattaataaatcaataagcctatatgcagaaagcacaaaagagatttttgcagataaattattggctttggctttgagagattatatgaaatttagagatttttgggatatagaatggttacagcgcaaaacaaagcctgattatgatttattgagattaaaaatcaaagactacaagcaaaccgaagaaagctttcttgaaaaactaaagaataaagaatttgaaataagaaataatgatttggaggagggctttttgagggagatgtcgcgctttttagagcctaatgagtttttgaaagtcaaagagcgtcatttttataggacactgcaagagcgaatacttgaggcgatagatgatataaagcaccattttaatgagagcgaagatgagggagaatctagagataagaggctaatgcaaagccacacgcgcaggcgcagatgatataaatttgcgcgtcaaaagcctttgttaaacactttgttaagatatttgacacatattttatgtataatgcaggctttatcacacaaaggagtccctatgaaaacctcgacaaatcacactgcaaaaaccctaaaatctatcgccgccatcgcgtttggtgcgacgattgccatcatgctaagcgcatgctttgatagcgagccaaaggcagagaaaaccgctgcgccagtgaatctaagctgtgcgaatatcagcgacatagaaatcgcaaagcccggcgtaaatgagctaaacatcgatgcggatgaggtcgcccaagccctctatccaaagctaaacgagctatgcgagaaaatcccagaatcctacaaagtgcaagcgagctatgaaagcaagctggatgaagccaccagcactacaaacctcaccgagcaagagacaaaaaccgcgactttggctatcgagcttgcgtttttgagcccgggcaaggagcatagcttcaaaggcagctcgtggctagaggctagcagcaaaaaggtgctagatatcggcgaaagcgtccaaatatcaccaaaagataagcaaatgatgctaaaccaagcggcaaaaacagcgataaatgaagcgctaaaggtgtttgataagaagtagattctagctgtataactagtcacataaaattttggcgcgttagcggcgcacctcaaggagcaaccatgaaaaaatctatcaagcttttatcttgcgctgtattagcatttgcgctggcttcaagcttcactgcttgtgccaaaaagccaaagccacaaggcagcttccaagcatcagaatgcaaaacggtttgtgataaaaacgagtgcaaaacgcgctgcataaacatagatggcagctacaaataatctggcgcaatctagtgcgatctagcaaatctctagcagggcaaacgcctctagtgcgcaaacatagcatgctagagtggcactaggcgcgcagccatagcacaaaccaaaataaggcaagcacaaaagggcaaaaatgcgagttcggatttattatgaggataccgattgcggcggcatcgtatatcataccaactacataaaatactgcgagcgggcgcgcagtgagctgttttttggcaagcggatgctgccttcacttgatacttgcggctttgtagtgagtgctatggaggcgaagtttttgggctttgccaagcttggcgatgtgctctttgtgcgcacggaggctatcaagctaggcaaggtgcagctggtactaaggcagcggatttatagaatccagacgcttggcgatgcggattctagcggcgctttggattctagtgatactctagattctagcaacatttgggattctagtagcgcgccaaaaacgcaggcaaatcccgcgccagaaacacaagcaaatcacgcgcaaaaagactatatagaggaaaactgcatatttgatatggtggtgcgtatgggctatgtcgatgtgacaaatcaaaaaccagcgcctataccagctaagtttttagagattttgcaaacgataaaggcggagtagaatctaaaaggcagaatccaaaaaagcagaatctaaaagcggattctacaaacttagattctgccaaacttagattctgcaatcttagattctgccaaacgcactagagcataaacaacccaaacaaaaggcaaaaaatgcaacatatagaaggcaaaccagacatcacctacccatgccaatgggaatacagaatcgtaggcgagaagcagcatcgcatcgaggagatagtgggtgacatcatgcaaaagccctattatctcgaggtcaaaaaccactccagcggcgggcgcttcgtgtcgatgcacctaagcacgatggtggatagcgaggaggagcgcaatgagattttctcaaagcttgccaatcataaagaaatcaaaatggtgatatagccgcgagaatccacatcgcaaatctgcattacaagaatctaaggcgcttcagaatccaagccgccagaatctaaactagagagaatccacccaccactttaagcgcgctttaaacacttttatcatacataccatatcccaaacaatcacaaaggacaatcatgcaacaaccacaacaaataaaggaaaaaatcaccaagctactctcccaagtgctatacccaaactttcaaaaagacatcgtaagctatggctttttaaaagaagtccgcgaaagcagcggcggcatcgaagtgatgctaagcataccttcaagcgacgccaccatcgccaaagccctgcatgacaaaatcgacaatgtcttgcaaaaagagggcataaacgccaccatcaccataaacacgccaaagctagcagaatccgcgcaagcccgccaagccccgcaggccaaaaacctgctcccccaagtcaagcattttgtcatggtgagctctggaaaaggcggcgtgggcaaatccaccgcgtccgccaacctagccgtagcactcgcgatggagggcaaaaaagtagggctgctcgatgctgacatatatggcccaaatattccgcgtatgtttggactgcaaggtgtcaagcccaagctcgacccaagcggtaagcgcctcataccgctaaacgcgtatggcgtggatatcatgagtatgggcgtgctttttgaggagggtgagagtctgatttggcgcgggccgatgcttatgcgcgcgatcacgcagatgtttagcgatgtggcgtggaaggatttggatattttggtgcttgatatgcccccgggcacgggcgatgcgcagctatctatcgcgcagagtgtgcctgtgagcgctggcatcgcggtcagcacaccccagcttgtgagccttgatgatggcgcgcgctcgctagatatgtttcaaaagctctccattccaatcgctgggatcattgagaatatgagtagcttcatctgcacatgctgtggcagcgagcaaaatatttttggcaaagataccacgctgccgctcgcgcaaaaatatggcacgcagattctggctaaaatcccgctagatatgagcgtgcgcgagggtggcgatgagggcaagccggtggtgtattttgcgccagattctgctatcgccaaatcatacaggagcgccgcactcaagctgctagaattcctagacaaagtagatagcgaaaacctcgccaccaacgcgcaaatccaaccgagataggcgtttagccaaagaaggctttaggcaaaaaagcttttggctaaaaggctttggccgaaaaagtgtgcggttactttggccaaagaagcgcgacagttgtttttagccaaaagaagcgtagtagttatttaaccaaagaggcatagcagttgtttggccgaaaagcttggcgctttgcctcgcccgtcattgcgaggaagccgcagactgacgaagcaatctacaaaagacaccaaaaaacacaaggtggatttaaatctgcgcgcaccaaatggattactaaagaaactgacgctttgcttcgcaactatgttgctcgcaatgacagaggacggtgctggattgctaaagcagtttctttggcaaagcgcaaattctttaataaggcatcagcttctttacataatgacaagcaaagcaaaattctttggtgatgataaagtataccctcgcatcttgatatttatgtgaaaagtcgccttatggattttaaattttgcgcttgccagcatttacctttttggctttttgtcagaatctgctttgctaaattcccagtttttatacttttttgagaaaaaatggcaaaatttcagctttggttaagtttattttcttataattcgttgattttgaaaatcaaaacacccaaaaggagcaaaaatgctttcaaaagaagtgatcaaaaagctaaacagtcaagtcgtcgaggaaatgtatgcctcaaacctttacctaagtatgagttcatggtgctacacacaccgatttgacggtgctggcgcatttttgtttgaccatgcgagccaagagagcgaccatgccaaaaagctcatcacctacctaaatgagacggattctgcgctgactatcacgcaaatcgataagccagaagcggattttaaatcgttactagatgtgtttgagcgcacttataagcacgagcttagcatcaccaaatccataaatgagcttgtggaatttacgctcgcgcacaaggattattcgactttcaacttcttgcaatggtatgtggcggagcagcacgaggaagaggcgcttttccgcggcatcgtggataaaatcaagcttgtcggcgatggcggcaatagcctttatctagtcgatcaatacatcaaggggttagctggaaaataagccaaaaagctggcaggcgcgggatcttagcgcggccaaacgcgcgcaaagtagggtgctcggcactgggtctagggcgcgggcgctggattctgcgcgcgcgtgtttgctatggtttttggcagaatctagctttagattctggtccgctagcatttgtgctagattttgcaaaataccgcttaggttctagttggattctggttcgcactttttcttattttgacttttgacaaagtttgccaaagtctaaacaaatcaccacaactaaacttcgctaagcctgcaaaacacgcgggcttagcaccacttacaccgactgcaaaaaccggatatacagaagcactttttgtgttataatgattgtaatatatcaagcaaaaaaaggagctagaatgattaaaattagaaaatctagccttttatggattcccgatttgtttggtggattgggcgcattggcagtattggcatgttttgttagcatccctgtttttataatcttgcctatttggtttgagtctttgaatgaaatagcagatgctgtaattatgaatattttttacgcttccatcattttgcttggcgcggtagttgttttttatatacttatgccgctatgggcgcttttgtatgttccgctcaaaattttgcaagccttttccgcgcttttcgtgcaatttgtgagtgatgaggaatatgaagaacatcaaaaaatgaagcaagaaatcaggcaaaaaataagtgctaaatatgcaaaagcgcaagaatctagaagcgcagaataaaaaaacatagaatccaaaagcgcaaaatcaaatcgctagattctgctagaatctaaatgcaaaattattttgcgcttttgtatgtaatgtatttattggcgatttttggcttgcgctttggcgcattctgcgcatacaccgataaacaccgccgatacatcagaaagctcatagcctgttttatacatcacgctgcctagaagctcgcccacatccacatgcacatcttgcaatttaccgcatttctcgcagcttacatgtatgtgcttatcgctcgcgagctcgtatttttgcttttgcgtgggggctttgacctcgcgcaggatatccgcctcgctcaaagtcgcgacatttttatacactgtggctagcgagatgctaggatgcagctttttgatgtggctataaatatcctccacgctgatatgcccgcttttttgtatttggtgcaaaatggcgatgcgctggggcgtggattttaggtttttatcgcgcagcatttctttgaatgattccgcgtgaaaagattctgcgtgcaaagatgcggtatttgcgctagaagcgatatcagacatggcatactccataaaattaaaagtgatagagatttttgtgcgaaaaatagcaaaaaaagttaaacacaaagttaaatttatgagcgataaaagcaaattggcaaaagtcaaatcgccaaaagctagaatctaaattgccttttaaagttaaatatattagaatccgcgcgtttatcgcgcttgtgagccttgccaaaagcaccttaagccaaattggctaaaacgcaagattcgcgccacaagttacaaaaatttcagacaaatttaaggagtatgcgtgtttgatactattagcaattctttgcgttctatcgcttccaaaatccgcttcaatgacgatgaaaaagccctcgcgcgcgcgcttgatgagctgaaaaaaaccctgctcaaaaacgatgtgcatcacaaggtggtgaaatccctactagaatccatatccgcgcaaaccaagcaaaatggcatcggcaagcaaagcttcatggatgcgctgcaatcaagccttttgcagattctggaaaccagcgggcattatggatttgtctatgcgcaaaagccgccaaccatcgtgctgatgtgcgggctgcaaggtagcgggaaaacgactactagcgcaaagcttgctaattacctaaaaacgcgcggcaaaaaggcgctgctggtggcgtgcgatttggcgcggctagcggcggtgagccagctaaagattctgggcgagcagatagaagtcgaggtgtttagtcatgaaaatatcggtgctagtgatgcgagcaaggctagcgtgctagatatcgccaaggctgctagggcgcatgcgatagataaaaattttgatgtgatgatagtggattctgcggggcgattggcgatagatgaggcgctgatgggcgagctaaagagcctttgtaagctgctggaaccgcatgagaagttttatgtcgcggattctttgagcgggcaagatggcatacgaagcgcgcagtctttcaaagatgcgatcgggcttagcggcgtgattttgacgaagtttgacagcgactcaaagggcggcatcgcgctaaatatcgcatatcagctgcaagtgccgctgcgcttcattgggagtggcgagaagatcccagatcttgatattttcatccctgatcgcatcgtatcaaggctcatgggtgcgggcgatatcgtctcgctggcggaaaaaacggctggcgtcatcgatgaaaaagaggcgaaaaatattagtaaaaagctgaaaaaggggcagtttgggtttgaggattttctaaatcaaatcgaaaatgtcaaaaaactaggctcaatgagctcgataatgtcgatgatcccggggctttcatcgatggcgggacagcttaaagatgtggatctggataactcgcaagagatcaaaaatatccgcgcaatggtgaattctatgacgaaaaaagagcgcgagaatccggatctgctaaatggctctaggcgcaagcgaatcgcaatgggcgcggggctagaagtggcggatataaatcgcatcatcaagcagtttgacaatgcttctaaaatggcaaagcgcttgagtcaaaagggcggtatgcaagagcttatgaatatgatggggcaaatgcggggaagggggtagggcacccagtctttttgtagccgataatgctggcgtgatgaccgcgccagatgttgatttatgatttgattttttttggtactttgacttgtgcgcagctttttagattctgggttgtttattttgcgcgcactagaatccaaatttttaatatctattcttaatactactacaaaacttcaaaaatgtttaatattatgttatatgattgtgattagatacattaccttgtaaaggggcgcgagatgagtagtattaagattttggggtttgatataggtgtggcaagtattggctgggcttttgtagagggcgatgagattagggattgtggcgttaggatttttaccaaagctgaaaatccaaaaactggggaatctctggcgcttccaaggcgcgaggcaaggggcgtgagaagaaggcttgcgcgtcgtcgagtaaggctaaacaccataaaaaagataatatgcaaagagtttgatttgcgtttgagcgattatatagcagatgatggcgagctgccaaaagcgtatcagacaaataaggacaccaagagcccttatgaattgcgatataaggcgcttaacgaacgactaagcaaagaggagctggcgcgcgtgattttacatatagcaaaacatcgtggctatggcaataagcatgcaaaagatggcgacgacaaagattctggcaaggtaaaaaaggctattggcgaaaacaaaacattgctagagcaaaaagggtatgagagtgttggtgaatattgttttagggagttttttaaaagcataaaagataaggatggcgagacgcacaatattccatctcaaaatatacgcaataaaaagggtaattatgatagatgtgtgtcgcaaaaacaactagaggatgagttgaagctaatttttgcaaaacaacgcaagcttggatttaacaaagagtttgaggatgcgattttggaagttgccttctatcaaagaccattaaaagattttgatgataaaataggtgattgtatattttttgataatgaaaaacgcgcacccaaagaaagtatcagtgctattgagtttgtggcactcactcgcatcataaatacgctaaaatatcttagcaaaaccaccggcgaagtatatgaaaaagaaataataaataaaatttggcaaaaaattctagaaaatggcaaaatgacttatgcagaactgcgcaagattttggcgctagatagttcggtattttttaaagataaagaccttgattatacgcttggcataaaagaggctgaaaaaataaaatttatagaatttaaaaagctaataaagtttaaaaaggcgcttggtagctttgatgggcttagtcgcgagattttagacaatattgctatgcaaatagccatcacaaaagataggcaaagattactagaaaaattagaagtctttccgctcaataaagaacaaaaagaaaatctaagccagctgaatttttcaaagtatatagatttgagcttaaaggcgctgaatcagattctgccctttatgcgagagggtaggcgatatgatgaggcaaaagatgatgctaagctgcaagaaaaggcaaaaaataccaaaaaagaagagtttttgccaccacttaaagaatttgatctaaatttgacaaaccctgtagtggcgcgcgcattggcagagtttcgcaaggtgctcaatgctttgttaaaaaaatatggtaaggtgcataaaatccacttggagtttgcgcgagatatgaggctggattttgatgagcgagagaggctaatatcgatacaaaatgataattttaataaaagacaacttgcagaggatttttgcaaggagcatgggcttgagccaagcaatgccaatattttaaaaataaaattatggcaggagcagcaatggcattgcatgtatagtggcgaattaataggcataccagatttaaaagaccctacaaagctacaagtcgatcatatctatccatattccagaagttttgatgatagctatacaaataaggttttggtgcgtgccgagtggaatcaggaaaaaggtaatcacacaccatttgaagcatttggtggtgataaaaataaatgggataaaattgtagcgcttgcagaaaaactcccgccatcaaaaaagctaaatcgtagtgagaagtctaaaaaagataagctattggatgaaaaatttaatgataaagagcttggatttctcgctagaaatattgtagatacaggctatatagcgcgactagtggcaaaatatattgatatgtatttggagtttttgccgctggaagaaaatgagaatacctcacttgctaggggagaaaaaggaagtaaaaagcatatcggcatagtaaatggcaggctgacttctgaggttaggcacaattgggggcttgacccaaaagatagggataatcacttgcatcatgcaatagatgccatagtgattgcctatatgaatgataaaaggataaaggcttttgcagactttaggaggttaaaggagctaaaaataaagagatatggtcgcgaaataacagaagatgaatatcaagaaaagaaaaaagagttgtcatgcgcgccatttgatgattttcgtaatcgcaccctagaaaatatagataaaatctttgtatcaagaccgcctagaaaaagagccagaggcacattgcacgaggaaactttttactccattgatgataaaaaattgctaaaggcatatggtggaaaagagggcatgcaaagggcattgtcactgggtaaaatccgccaaataggcacaaaaattgtaaaaaatggcacgatggtgcgcgtggatatttttaaagataagcggggtagattctatggggtgcctatttatacaatggattttgcactcggtgtgctgccaaataaggcagccgtgtctggtaaagacaaaaatggattaataaaggagtgggcagaaatggatagcggatatgaattttgctttagcctttttaaagatgatttgatattggtgcagagaaaagaaatgcaagagccagagctttgctattttgtaagttttgattctagcaatgcgcaaatagatgtaaggagtcataataatcatttttctgtgcttaatgaaaaccaaaagctgctttttaaaagcgctacgcaggcagaagtgatcggagaaagcatcggcatacagaatctaaaagtatttgaaaaatggcatgtatcgccgcttggggaagtgcgcaaggccgaatttagcccaagaggtgaggcaaaactcaaaacaagcaaaaagcgcaaaaagtagcgatagcatagtaaaaatagtaaaaaattagcggcgcagaatccaaagcagcagcacttaaaaagccagaatctaaaggctaaaaatgtcaatatagcacacgccagcacaaaggaagcaaaatgtttgattctgcgtttcgcacgctgtttttaagcactaaagcgcaccttagcctaaacaacaaattttagcataaaaagatttatgaagtggctaaaactgatgattttatgcgagccaaaaaacgagtattttagcataaaaagatttatgaagtggctaaaactaatagaacacacactaaaaatactactaaattttagcataaaaagatttatgaagtggctaaaactaattcgcgcgagatatgcaaacacaaaggattttagcataaaaagatttatgaagtggctaaaacataatcacgcttcctttatgcatatttgcaattttagcataaaaagatttatgaagtggctaaaacaatagtctacaatataaacacctcttccatattttagcataaaaagatttatgaagtggctaaaactaagttaaatttgtcattggctaacatttagtattttatcatataatacataaatggatggcattttatttgcattttgtgtataaaattgcttggtaatcaaactaatgagggtatataagcctagtcaggtgcatcaaaataagcataattttgtccatattgttatttaagcgctagacttgttgtaatagagcaggcaaacattattgcgacttgacatatatcaccaaaaataccaatgtaatgcgaattctgattttctgatttttgtgcggcaaatctagaactaaatagtcaaaataggcgccaagacaattgcaaaaaacataaaatacgaatgaataatctaaaaagcctttgtgcgagtagcacattgtattcgcgtataatgatgacagaatgcaaggcaatgttataataaaacatctgtaaatacttgcagcatactgcatgtaacttattggcaaattggtgtattatataaaatagtatccattgttcaatatccaaaatttcttgacaggctttcccatcttatttttttgcctgtacaaaatcatccatatgcatggatgcaaataagcgcaacgcggtttttggatcttttggagattgatggcttgatgggattgcttataccttttgttggtgtgccagagggcatggttgttagcgcaacatgtgacaagataaataaggttgcgccaacggcatcaacttttccgctttttgtcattgcgaggttttaaaaatccgaatatacgatctattaaaacattaaaatctaattttgcatttttgtctgttcttgttttgccttatcatcgtttgctttttgtgtgaggattcaatccaatgaatattggctcttgattttgtgtatctccatgatacatgtagtattttcaaggccgttgtgcttatgcataaaactttatttagctgaaagatttttgctgctttttgtagattaaaaaacctttgccttgtttttgccattttgtttcttgcaatgatgataaatctttgtacaatcaatcattttgcatcatttccccgatttagattctggggtgttttggatgagggcggcttcatagaggaagatggagggccggtagtcgatgtttttcatcgcgtcgcggctggcgtaggagaggtagaggatttctttggcgcgcgtgattgccacataaaacagccgccgctcttcttcgaggctcccgcctttggcgatgagctttaggtttgggaatctgccctgcatcaaatcaataacaaacaccatcccaaactcaagccccttgctagcgtggatgcttagcagatttacgccgcttccttgcgtgttttcgctgctgcctagcaccatcgcgtttaaaaacctgcctagattctcgtagtttttggcgatgtcttggagtagcagcattttgcgctcgattttttcgcgcgcgtctattttgcgctctgggtctatcacgccatctttgtttttggcgcgttgggtgcaaagcatctctactatatgctgataaaagtcgcttttggcgatgtttgcgatgagtgggcgcgggtgcgtgcctatatcatgcgagcgcacgatctcaaaaagcgcgcttaaaaatttcgcaccctcaaaagtaagcttgggatgtgatagtatcggattcccggcaaatcgcggatgcacgacatcatcaaactttttggtatcttgcaaggtgaaaaaatcatcaaaaagcccaagttgcgagtttttcgctcgcttttcaaaggggcggatgctagtatctggcgagagtagcccgcgcctcgcatttccttcgcctagcctgcttaagccttcatagatctctttgcctatcgagcttccgatgccagagccatagcttaacacatggatatatgccatcatatctttgtggttgtataaaagcgagcagatatctagcatgagtgccacttctttggcatcaaaaaagctcacgccacctttgcgcttggaggggatgtttagctctcttagcagtgcttcgcagccatcggctgaagagttgttgcggaaaatgatagcaatgtcatcaagcggataattcgctgtcatgattctgcgcgcgatgtcttggtattgggcaaatagctcatcatacacgagcagttttggtgggattggctcggtgtttttgatgacttctaggcgtttggggtagattctctcgtttttttctatcacgcggttagcaaggtctaggatgtatctagtcgagcggtagtttttgctaagcgtccagactcgagaatccgcataggtgctttgaaagctagagataatagagatgtctgcgccattaaacgcatagatgctttggtcatagtcgcccacgcaaaaaaggctttttggtgagagcgcgtgtatgacttggttttgcaaggggtttgtgtcttggtattcatcgcatagtatttcttgataggggcagtctatcgcgcgcatttctttggcatactcgataagcaaatcattataatccatataattatgcgcttttttgagtgcattatactcatcaaaaatgccctcatatatctcgatatacgcgctatgatcgctgcctcttgatgatagccactcttcaaagctttcgttatttctagcgtttaggaaaagtgagtagatatcaaacaaatattgtgcagaatatggcggcgtgtttgtttgattggtatatacgcgcgattgtgcgatgcttttgaaaagcacttttagctcttttggctgttttaggcttatggcgtatttttcttttagatatctgtagcacacagcatgaaaagtgccgcattctatttggtttgcgatattgccaaagcgtttggctacgcgcgagatcatctcttgggaggctttgttggtaaaggttagcagcagtatttcttgtggatttatgccactttctagcagatgtgctatgcgccccacgatagtagaggttttgcctgtgcctgcggaggcgatgatgaggttatgtcccataggcgcagtagcagcattatactgctcggtgtttaggttgctaagaggcattatctatcgacgctttttatgatttcatctattaccatatccaccggcgcaaacgcgcgctgaatgactttgagcggtgtttttagcaaatcttgtgcgaggcttatttgggttttggggtcttggagggtgccgcgcacgcttacttgcgtcgtcacacgcccatctttgcctagcagcagatagcctacgattgggattttgtttagaatcccgcttaggttttttagcgtagagatagagagccccatatccacttcttgcgtgtctatctcgataaatccattccccacgatatccatagatttgccggttaggtctatggattctagtcccacatattgcgtgtttagcgacacttttattttgcctttgcttacttcatagcctttagagctaagtgctgggcttctaaacatcacaagtgaagggattgtatcaataagccctatgatattttgcgcgatagcaaagcctacgaagcttgtattttgcatgcttatttcgccattgaaaatctcttctttgtagattccacccatctcaaacagcccgccatccacgattttgcgcccgatgacgcggtttagaaaatccccgctgaaattccccgctttaaacaaaacattgccatgaattatatcgatgtttgcgatgccatttttgtaagtggcatcagcgcttatgcgatcatcgcggattttggcgttgaaatcatcaaatggcagcgtgatatctttgaaaaatcctacgacattttcggcttctatggcgatgattttgggttttatgttgttttggcgctcatatcgccttttttgacgcaaaaactcactctctagcagaatctgctctcgagtgaaaaccgcctttttctcactagaagtgctaaacgcctcttgtatcgctggaatctcgctagaaagcaggctatcaatatccacatctatatctttgaaactcgctagcacggtattatcatacaaatctagcccgatgagttcatcctcgctttttatttgcaatttgtcattggcatagattccgcggaatgaaaaatctttgataacctgcttttgcttatcaagcaaaaatgaaggaaagtcgatgatacttacaccaaagctaaaatccttcgcccctctaatatgcacgaacgcgctgccttgcgaaagccccagatagcgcataagcggcgagtatggcgcgaatttggcaaagtttgtgatgtttgcttttatctcttcgcctagcacttgcgcttgcacatcaagagtcgggatgctgataagcaccgggtcttgcgcaaaatccacttctatgtcaatctgtggcaggctctcttgcgtggcgctaaaaatatcataggtgaatttttgctcatcttgatgtttgataagctcgatgatttttgcctgcatgacttctgggctcatgggtttggtgaaatctagctccacgccattggtgcgataggtgcttggggcttgttttttgggttttgcggcgggttgggcgtcgttgtcgcttgcttcgtttgtgtcgctcgtgttgtttgcgttgcttgtttcgctcgtgttatttgcgttgtttgtgtcgcctgcttcgcttgtgtcgccttcgtcatttttgatagcttcttggttttgcgcggattcttgggtttggctttgttcttgtgttggcgctatttcttgggcggcagaatctggcgcgctagattctggattttcttgtgtagctggcgcgttttcttgcgtgtcatttggcgcgcccttttgtgtggcggattctgcgctagaatctggatttgcttgcgcgctagattctgacatattagattctgcttcttgtggctcttgcgtggctggatttatgggcgcggttgggttatggatactgctttgctccacatcttcgccaaactcgagaatctcttcttgcggcgcttgtgaagcatcgggcgcttttggcaaaatgatagaatcttgcggattatttggcgcgctggcattcgtggtgcttggcgcagttggtgtgcttggcgtgtttgttgtgggtgtgtttatcgcgggcgcgtttggtgcggctggcttggtgtttggattagaatctagcttgacatagccatcactgccatcattatcgctactatcgctagatttagattctgcattttgagattctgggttggaatctgatttggattctggcaaagcggtagtgtttgatgcgtaatgcgcgaagtttctgataggcactctagtaaatgagccaaaaggatactcaaacgcgcgcaatgcgcttgtcaaatgcgcgctggattttgccaaatgcttggcgcgagaatctgattttgcgctagattctgcaccacttgcaccaccagcgctcgcgccaccagaatccatattttgcccgctagattctgcaccactagaatcctcgctagaatccggcgcaaaatcattttccctagattctctctctcttgattcttgtatatcttggatttcattagagatttcatcttgcattttatctagcccatcgatatgcctaaaaatctcttttggctggatgaggcgctgatttacatcggggttggtgctgacgcgcagtgcgtggatgaagaggcttgtttttatctttttgtccgcgaggctcaagcgcgatttggtatcgatgtcaaatagattctcatagcgcgtgttttgcgtccatatatccacatagctatcttgtatctgtggcgttatgttgatagcgatatttgcctgcttggtgctaaaattttgccccgagatgctgatgagcccatcttgcgcgtttatctcgcctttaagcgagacatgcgcctcctcctcaaaagcgacatttatatctagctttgccttagtttgcgcgtctatagaatctagcgggattttcacatgatatatcgctagcaaatcgcgcagtgcttgcgtatagtctagctgctcggcgcgcgcttgtatgctaagggttggcacatcttttggaagcgtgaaaataagccttgagccagcaaggctagtggtgtcaaacttgatatcatctggctcaagcaccgcttgcatattggcgacttttatctgcgctgatttggcggcaaagggctgcaggctcgggtctagcttgtagtttggcttgcttactagaagcgtcattttggcgttttccataagcgttttgaaaaactttttgtcatttagcgtgatgtcaaagctagcggtttttatctccatagtatcaaagctaagcgcgtcaaaaagccatttatcaagtgcgggcagcacatttggcgcgctttgagccaaactttcgcgcaagaagtcgagattttttattttggaggtttgtgcttttagcacgaggcgcttgagatcgcttgtgccttgcagaaatattttgatgccagaatttttgagatcttggcttttggattctgcatttttggcgctagaatccgcgctagaatccacgccagaatctctagaatctagctttttagattctgcatttgcgcttgatagaaatggactgatagccagcccaaagccgatttgcccgctagagctagcatacaaaatccgccccgctacttccatatttggctcgatgatatggagttttttgatgtttagctcgattttattatcttggctttggacatcaaacaccgcttcaagcttaggaaaatgcagcaaataatgctcgccatcatacaaaatcgacgcgacataatcatcgctcaaaatgatgcgctccacgcccagctgctcgaaatacgccagcccccaaagggcgtattgtatgtagctgccgatttgtttgaaatctagcttagaatcctttttgccagatttttcactctttttcatttgctcgcgcagatccacttcttgtgcttgcaaaataaactttttattgagttttaggtagaatcctttgatttgtatgtcagatatttttagattctcgattttgatgccatctgaaagtatcttgagaccactaaaaagggcgacaatggttacaaagaggatgataaatacgcttaataatcttttggatggggtttttctcataatcttagctatctttttttatttgggattgcctatacaaagcacgccgatagtcaatgtgccacaaggttcgatagccagcattatagcatatctatcaaaaaatggatttgatattaaccaattcgacaaaaacattttgcgccttttgggcaaaccgcaaagcggcgcgatagatatgagccaagcgatacaaatctacaccaaagcagattctgccaaaggctatgctatcgccaaaggcgacttcctctactatctcaccgccgccaaagcagcgcagcagagtatcacgctgataccaggtgagacgatgtattttttcatccaaaatatcgctagcgagctaaacctaaacgaagccaagctctgggaagcgtatcacaaatacgcgccctatgatgatggcgtgatactgccaaacacctacaaaatcccttcacaaatagatgaagacaaactcatctcaaacctcatcgcgcgctcgatgcaaatacatgagaatctagccacaaagcatttggggcgatacgagcaaaatgagtggtttagatatgtctctatggcttctatcgtgcaaaaagaggcggcaaatatacaagagatgccaatagtcgctgctgtgatttataatcgcataaatatcggtatgcctttgcaaatggatggctcgctaaactatggcaaatactcgcatctaaaaatcacgccagagcgcataagaaacgacgcctcgccttataacacctatcgcaacaaaggcgtgccaccagcaccggtgggaagtgctagcatcgaggcgatagaggcggtgctaaatccggctagcgtggattatctctacttcgtgcgtaacaaaaacggcacgcattcatttagcaagacatttaaagagcaccgagagaattttaataagtaggggaaaattgacaagtaggggattttgataagtggagattaataagcggaggggatttgataaatagcttataaaggagccaaaatgataatgcagaatcttaggaaaactacaaaacgcgagcaaaatgcagaatctaaaaatgccaaaaaacttttttcgtcattactaaagaagctgcgctttactgaagaaactcacttcgttcgttttgcgaggagcgaagcgacgaagcaatccattttggtaaaatgacgacgacaaaacttaaaaggagccaaaaatgaaacacataaatcagaatctaaaaaacctagcatttatcgccatagccacgcttggcttgatgtttagcgcttgctttgacccaaagattaataccaaattagattctagcccgagcctcaaaaacacaaaccctttgaccgacaaatcaaagcacatttaccacccaaaaaatcgcgatgaactcgtgcagctgctaaaagatgaaagcataaagctagacacgatagatacgagcaaaattactaatatgggttgtttgtttgcgaatatgtttcatgttagttattgccctgaattaaaggcaatagaagaaatagagcactatgcaagacaatgtcaaaataccgctgaatatagaaaggattttggcgggattgagacttgggatgtgagtaaggttacagatatgagttttatgtttgcttcagtaaaatccttcaaccagccgcttaattcttggaatgtcggtaatgtaaaagatatgagcagtatgttttgtgaagcatattcatttaatcaaccgcttgataaatggaatgttggcaaggtagaaaatatgagcggtatgttttttggcgcaacatcctttaaccaaccacttgataagtgggatgcaagtaaagtaaaagatatggctcatatgtttagcgatacaatactctttaaccaaccgcttaataagtggaatgtgagcaatgtaaaaaatatgagcggtatgtttcttagagcggatttatttaaccagccgctagacaaatgggatgttagcaatgtggaggatatgggtgctatgttttggggcgcaataccatttaaccagcctttaaattcttgggatgtaagtaatgtaaaaaatatgagcggtatgtttgcttatacaaaatcttttaatcaaccactagataaatggaatgtcagcaatgtggagaatatgggtgaagtgtttcggggcgcaaaatcatttaaccagccgctagataaatgggatgtaagtagcgttacaaatatgagtcatatgtttagcgatacaatactct

SEQ ID NO: 3770 - DNA, 23078 bp, synthetic construct
  misc_feature 1..23078: note = Synthetic
  source 1..23078: mol_type = other DNA
gggttaagatctgacactgccccaccaaagtcgatagatgcactatataatggatttacaagtgcgaacactacaagcacaatgccccatttcatacatactttcattttgtttcctcctgcgtatggcttatgggataatctttataacaaatctcccccttttctagtgattctataactttgctctcacgcaacgaatccaaaatctcctcttgatccttatcaaaataagtatttgccaaaaatgtataaagtcctgtggcgacaatacataacgcgataagaaagatacctacaataataccaagcgtaatggaactaggtcccaaacgataccctaacacttctgggaataatcccacaccaagcacaaatatataataagcacaaagaatgacaaccgacataacaagtgcaattttatttctaaatgatacaaattgcctaaaagctgaaagggctttttcttgttgttgagagagtttcatcacaatacctcctttatttgaactatattgctattttaaagcaatatgatacttaaggtatcaataaaaattttatattcaaagaatatgtaacaaaatcatcatataactttttaaatatagtaaaaatgtaacacttaaaaatatatggaagataagagacatttagattctgaacccaaatataaaaaatgagttaaataagctacacacaaatgacagcagcaatagcaaatccaccatcgtggctaatacttaaagcaagagagttaaagccaaaatatgccttttttttgtcgctaatgaaaatataaggggcatttttgctattcttattgatacatatatccaaaaatcctaactctcgcccgatacctacacccaatgcttttgcgcaagcttctttcgctgcccaaaaaccagctatacgggcaatattaatagattgcatatcaatagaagtgtgatggtaaggaagaacagattctaaacaaattttagaatctggtatgtcattatcaatctttacttgagattgtccagattgcttaaggcaaagtgcaatttcatcatttgatagaaaacgtcttaatgccttaatcccaaatttttctacaaaagtgcgcatacgcgcaatacttacaatatcaatacctatcaatctaactcactacaaattcaacaaaaaacacatcactcacttgcccatcaatcaaaaattcattaatacgcttaactatttcatcttttacgcggtttttaccttttgtagccgccacatcttctaaggatttagaagaaagaatctcaataattgtatccttcaccataggtagttttttatcaagctccatttttgtggcatttgcttttatttcatctttatcaagctcaaactgcatacttgttttgagataccttttacctgtttgtgtcataagattcacagtaaaattaataggaccttccgcaggataaattaaaccaggtgcaaatttatcagtgcttcgcacagaaacggtattacctacgataatttttgttgcttgctgttgtgaaacaggttgcatttgcacttgttgtggtgcttcttctttatgctcctcttcatcgtgcccacctgtcattagtaatgccaatacaatgcccaccaaaagaaccaacactactacaatgccgataatcacaaataaaattgctttactttttttctctccaccgctatctgctgctttttcttcttctgccatttcaatcctttactacataataagtcagcgtagttttgccaaactgacgcattttgagtttcttatatctcccaatgatgtgaggcatattatacccactccaatgttcaaaaacaattaaacttatgctacttttacctgttttatccaaattgcatatttttgtaatcaatcgctcataaatattagccttacctgctcgtatgcaaaaaggtgggtcgagatataaaactacttgagattcacttctcatatactcctctaaaggctgtataaaaaaatcggtattaaaactacgaaattgtaaagtttttactcttttttgcgcaagacaaagattacgcgataaaatctcataagcttttttgtctatctcataaaaaattgcttcacgcgctccacgagagagtgcttcaatccccatcgaaccgcagccaccaaaagcttctataaacacacttcctataatatctgcacccaaagtatcaaaaaatgacccacgcacaattgattttgtaggacgcgtattttcttcgggattaaaaataagttggagatgcttaagcgtcccagcctgtatagaaaaatgcaccattataaaatcccctgaatgctcattctaccttattaagattctaaatttgcctttattttatcaagttttgctcttttaataaggcaaaaatcttattactaagctcctttgcgtgttcatcacatactgcccttatgagtgattgtatatcttgcgcattgctatgggcataaactggtggctcaacggaggggacaaaagattcataaggtgtttcatttgtggtagattctatttttttactactataacgaatcttctcatcaaaagcttgcaaatcatcattcaaactctgtgcgctaaaaggcttacgaatatgagagtatggctcatcaagcactaaacacaaaggtttagcactctgtcttttttcatcatcactaatcacaaaatcgcattcttcctcgctaactagcatatcttttaaaaaatgttccaagctactttgcaccaatggtgatacacaagatatagcaattttcatctttacattccttttttatcttattatagcttataaagttcctatattatacttagagggtcaatatcaatatcaaatgtgccacgcaacttttcattatgtgctaaagtatgaagtaactctaaaagtgcgcgagtagagtgcgaacgaagcaagagcataaaacgatatttattgtgcagtcgccctaataatgctctactctcacccacaatctctacttctttatgctgatttttttccaaaaatgtccgcacttggcaaagatacaaaagagctttttgctcactcttatgtgcaaaatgtaacacaacaagtctctgatagggtggataaatatgcggtctattggataattcatagattaaaaaatcttcataattatttaaaaactgctccaaaaatacaccattagcactctgaacatacacttcaccatcgtatttacgcccactacgccctgcaatttggtgcaataaactcactgcacgctcattacaacgataatcactgctttttaaaatataatcaatccctaacactatggcaagattcacacgatgataatcgtgccctttacttaacatttgtgtgcctacaagcacatcaatttctcctgcattaaaagattgtaatatatttttaagttttttatgcgtggtgatattatctctatcaaaaagtgcaatttttgcttttggcagagattcttccaactcttttgcaacttgagccgtgcctatgcgatgagaacgcaaagaatctttatgacattgcggacaaagtgtaggaataggcttagaaaaatggcaataatggcaaacaagtgcatttttatcaaggtgtaaagacatatttaccgagcaaaaatcgcattcacaaccactaccacacgcactacacacaagcattttataatgtgcgcgagtgggaagaaaaacaataacttgctgttttttattgagattctcacgaatcttctctaaaatatcaagagacaatgaggcagattccttacaatctacgctattatctccattctccattgtaggcataatttttatatgtttttttgagccaaaataccgccccttaagacgatagagactattatgctttgtcgcataataataacttatcacgcttggtgtcgccgagcctaaaataactttaatctgtgttttgttccccaaataaagtgccaaatctctagcattataatgcggcacactttgtgatttatacgcatcatcgtgctcttcatcgataatgataagcccaagagagcgcatcggcaaaaataatgcactccttgccccagctaccacacgaatacgcccatcatatatatcatttaaaatctgcttttttgattttgtgcttattttagaatgccaaatccccaccatatcaccaaaaaccgctttaagacgcaattcaatctgtggagtaagtgcaatttcaggcattaaaaaaagcgcgttttgccctaaggagagaatctgtgtgataagatgtatatatacttctgtttttccactgcctgtatcaccaaaaagcaaaggattcttatgagtagcgcaaaaattaagagccatagtttgttccctatttaatgtatggaggggttctatatgaatgcgctctaaaggtaaagattctccactttgtgggagaaaaagcccataagactcacctaatcccacacaataatattgcgcaataaatgaagctaaaatatgttgataaggcaagaaaaaatcactgctcaaagtagcatttttgcattcaaaggagggtttttccaaagcgcgcaatacaacgcccttatatactctattccttaaaggaatattacaaatatcacccacatcacatttttgttcacattcataagtaagagatgggctttttaaaccaagtggggcgataagataatacaagcaaaaaactcatctcttaaagtggctgaatctgcacatctgtttgagtaacaggtgtatcaatgttttcaaggcttttgtagagattttcaagtgattgacaagtgagagcatattcttgagcttttgtaatatagagcttaagaagcgcaataggttcaacctcttgtgcaaaaactgccctaagctcatctttcacatcattatgtaagggtgtcaatgaaatagaataatactttccatttaaagcaatctctaaattttcatctcccattatttcaagccctcatcaattctggcaaagagattttcaaaacctctatcttttgaagcaatttcttcatacaaattagaaatttggctatcttttgcctcattttgcgctttaagtgatgaaatttcaagttgcaaagattctatctcatctttttgatgtgcgatttttgcaatcatttcttcgattttttcagaaagccgctccattacattattcatcttgcaatcctttggtgaaaataaagtataattttaacacaaataacacaaatagtaaaaaggagtaggtgcaaaatgtcgcattttattttagattctcaatatgccccagcaggagaccaacctcaagctattgagcaaatcacacaatttattcgcaatggcgcaaaatacagcacacttgttggcgttacaggtagcggcaaaacctatacaatggcaaacattatcgccaatcttaatattcccacacttattatgacacataacaaaacccttgcagcccagctttatagtgagtttaaaggattttttcctaagaatcacgtagaatatttcatctcacactttgattattatcagccagaagcttacattccccgccgagatttgtttatagaaaaagattcaagtattaatgaagacttggaacgattaagattatccgctaccacttcactcttagcctatgatgatgtgattgttgtagcaagtgtttcggcaaattatggtttagggaatcctgcagaatatctcacaatgatagaaaaactagaaattggtgcgcaatatcaacaaaaggctctacttgttaagcttattgatatgggctacacgcgtaatgacacgatttttgaacgcgggaatttccgagtaaatggtgaggtgattgatatttttcccgcatataatgaaaatgaatttatccgcattgaattttttggtgatgaaattgaacgtattggagtatttgacgcattagagcgcatctctcttacacaattagaatcttttgtcctctatgcagcaaatcaatttatcgtaagtgcgcaaagactacaagaagccctttataacatagaatccgaattgcaaatgcgcttaagtgagtttgaaaatgcagacaaacaaattgaatatcaacgcttaaaggggcgcacagaatttgatttagaaatgataagagaatctggtatttgtaaaggtattgaaaactatgcgcgccatttgacaggtaaaaaagcgggtgagacaccttactcacttttagattactttgagcaaaagaaaaaaccttatttaattattgtcgatgaatcccacgtgagtttgccacaatttggtggtatgtatgcaggagataggagtcgtaaagaagtgcttgtggagtatggttttagactaccaagtgcgcttgataatcgcccattacgatttgatgaatttattaataaagccccacattttctttttgtctctgcaactcccgcccaaaaagaattagagctaagtcaaaaacatattgccgagcagattatccgccctacaggattacttgacccactctatgaagtgcgggattctgataatgcagtgcttaatttatatgatgagattaaacttagaatctcaaaaaatcaacgcgtgcttatcactacacttacaaaaaaaatggcagaagagctcagcaaatactatgcagagcttggcattaaagtgcgctatatgcatagcgatattgacgctattgaacgcaatcatcttattcgttccttgcgattgggagaatttgatgtgcttataggtataaatctcttgcgtgaagggcttgacttacctgaagtgagcctcattgccattatggacgcagataaagagggatttttacgcagtgaaacaagccttatacaaacgatgggaagggcggcgcgtaatgtcgagggaaaagttattttatatgccaaaaaaatcacaggttcaatgcaaagggcatttgagattacagattatcgccgaaaaaagcaagaagaatttaatcgtttgcataacattacacccacatcggtgcaaagaaatgtagaacaagagcttaaaatagaatcaagcggactaagcaaactctatgaaaaaaatgctaagaagattccaaaaggtgagcgcaatgcgattataaaagagctaagcctcaaaatgcaccaagctgctaaatctttagagtttgaagaagctgctagaatccgcgatgaaatcgctagaatccgcaatatgtagatttattgagaggcgacaacagcaaggtttattttaagagaaacacaaaaagatttactatacaatacttaagctattttgcaaatctttataaaacttaaaatataaggagagataatgattttttctctagattctttcttgcgcatactgcgatttttacctttaatagaatctgtgcttaataggcgattttggtatgtgatttgtgtcaatactcttgtttggagtatcggtttttggcttctaacgggggggggggcagtatgaaacagattctatcagttattacacaatcaaaaatatcctcgctaattttatgctatggtattgcgttttttatgttattcaatttattccctttagtgttattttagagtattttcttgttacttgttttttcctcataggtctttgtgatatttttttaagtcttgcttttaatgcccagcttaatactatattttttaccatagtcctttcaagcaatttgttagaggcaaaggaatttttacaattttatgcttcgtcaaaggtaatttttgcccttagtggatttattcttgcaagttttatttttttatatcctcaatacacattacgctttattcaatacaaacctaagccctatattcatcgcatatacggtgcattgctgtttcttgtatgtctttttctttttacatctaaactttattccgtagattcacaaaatgcgtggcttgaagaaaaaaatgcactctttcgttatgctaatattattatagaatctatcacagagcatacctcatatatcactcaatacaaaaatctcacccaaaccttagaccaaaatcttacactaagacaagaagatgagattctagacaacacacttcatcttcctaccattgtgctcattattggagaatctacccagcgcaactatatgtcgctttataattatgctctgccaaccactcctcaacttgatgcacttttacaaagtggcaatcttattgtatttagcgatgtagtatctcctcactcacatacaaacgaatccttgcaaaaaatacttacttttagcaactatgaaaatgctcaaactccgtggtttatgcaacaaaaccttattgatatcttaaatcttgcaggatataaaacccattggttaagcaatcaagaagccatttctatttatggaaatgtccctgaagtcttatcgcaaagagctaaatatactcattttagctccataaacgatagttataatgcaggcaaagcagctgatggtatattaattcctctattagagcaaactttgatgtcatttaaccagaaagaaaaaaacttttacaccattcatcttatgggaacacatttagactataagcatcgttacccaaaagcattttcacacttttctccacaagatttaaaaacacatcaacttgatactttttttcactcacaagagaagcttaataattctcaacttgaaacaaaatctcactatctcaacgcaattttatacaatgattatgtcgtaagatctatcatagaatcttttgcagacaaagaagctttggtaatttatctaagcgaccacggcgatgaagtttatgactttcgcgattttgtcgggcatactgaaacaatgggttcgcgctttatgatagaagtgccttttatggtgtatatgagtgaatctttcaagaaaaaatatcctgatatttttgcaaaagtgcatcaagcaaaagataaaccctttatgagtgatgattttattcactctttccttgatttactcggcattgtaagcaaagattctataagttcccgctctatttttagcccaagctataatcaaaatcgagcgagaatctttagtggaagagattatgataaagatttaaaatttgaacactataaaccctttgtcccatctcgcttatggcttcatcgtgtcgatgaggtggaaaaatttgaggatttcaaagaaaaatatcgtggttttgaaattgatgtgcattttttattgaatcctagcccacattttgatgtcggacacgatggcgtagattcaagcatagggcttaatcttgcagatatgttctctctcgtgcaaaagcagaatatggagcatttaatgggggggggggatataataaaactttggattgattttaagaatctcagtgaagaaaacaaacaccttgcccttacacaaatgcaacatctttgcttaacttatgacatctcaccttcaaatcttatcattgaaagccataattacaaatctcttgatgtttttaaacaacaaggattctttacaagttattatgtgccttattatgaacctaaacatttaaaatctcaagcccaaacaatccgtgatgaaattaatacaattattcaaagtggcaatgtgagtgctttaagcttccccttttatctctatgactttattatagattcgcattttcaatattatcaagataatgaatggatagatatgccattactcacttggaatgagggagcaaattggaaagaaaatatacaaacaaaagctttcttcaatccccaaataaaagctattcttgtgggagaaaaaggctcatatagataatattgctggaattgttataaatttttaggttttttatattaatattgaagacaattgcaaaattgggggagcaaataatgaaaattttaagttttgatataggcattacaagcattggttgggcttttgtagagggagaggagctaagagattgtggggtgagaatctttaccaaagcagagaatccaaaaaatggcgattcacttgctgcaccgcgcagagaagcacgaagcacaaggcgcagactagcaaggagaaaggctaggctgaatgcgattaaaagattgctttgtaaagagtttgggctaaatttaagtgattattttgcaaatgatggggaattaccaaaggcatatgagacaaccaaagataccaaaagcccctatgaattgcgcactttagctttggagcaaaagttagagcctaaagagttagcaagagtgattttacacattgccaagcatcgtggctatgggaacaaacacgcaaaaacaggaggcgataaagattctggcaaggtgttaagcgcgattaaaaccaatgaagcaacgatgaatgcgaagaattataaaagtgtgggcgaatatctctataaagaattttatcaaaagctaagattagaaagtgagaaaaaaggtaacaatactacaaaagaatttaaaaatgtgcgcaataagggcgaaaattatgagcattgcgtggcacaagaacaggtaagggcagagttagagctgatttttaaaaagcaaaaagactttggggcaacttttagcgaaaattttgaatcccaaattttggaaacagccttttaccaaagagatttaaagagttttgaagataaagtcggcaaatgtgtgttttatgaaaatgaaaatcgcgcacccaaagattccttaagtgctatggagtttgtcgcactcacgcgcattatcaacaccttaaaaaaccttgaggaaaaaagtaagaatcttggtattggtgaaacctatggcaaagataagattcaagagattctaaaaatcgtgctagataaaggtgagatgagttataaaaaattgcgtgatattttgcgccttgatatgctatcgtctgcggattctaagcttgatgagaaggtaaagtttattgagccaaaaaggctaaagaatcttaaagattttagaaaagcaatgggtggagactttagcaagtttgatcgtgaagagctagataaaatcgctaccgatattaccctcattaaaagcaaagaaagtttagctaaaaaattgcaagattatcccgcattaagcaaggagcaagtagaagccctaagcaatcttagcttctctcaacatatcaacttaagccttaaagcactctacgagattctaccctttatgcgtgaggggttgcgctatgatgaggcggtgcaaaaggcaggattgcaagagcatagaaagtataagcaaaagggcgagtttttaatcccactaaaagagtatgaaccctatttggcaaatccggttgtggcaagggcattaagcgaatatcgcaaggtgctcaacgcgcttttaaaaaaatatggagcagtgcataagattcatttagaatttacgcgtgaggcaaaactaagcgcaaaagagaggcaaaagtatgaaaaagaacaaaaagagcattttgaggcgaatgaagaggcaagaaaaagatgtgaagactttgggttagaagcaaatgggacaaatatccttaaattaaaactttggcaagagcaaaaaggtgtttgtgtttatagtgagcaaaacatcacaagaggacatttgctagattccaatgccttacaaattgaccatatttacccttactcacgcagttttgatgatagctatatgaataaggtgcttgttttttcaaaagaaaatcaaaacaagcttaataaaacaccctttgaagcctttggaagcaataaagagaaatgggataggattctaagctttagtgcaaaacttcccaagcaaaagcaacgcagaatcagcaatacaaactttaaggataaagagggcggatttcttgcaaggaatcttaatgacacaggttatattgcacgacttgctagtcaatggagcaaggattgtttggagtttttgccactaagcgaaaatgaagtaagcattgcaggagaaaaaggtagcaagaagcatatagaggtaataagcggaagcttgactgcaactttgcggcattattggggcttaggtgataaggatagaaacaatcacctccaccacgcagttgatgcaatcatcttagcctacgcgaatgcaaaaactattcaagcgtttgcggattttaggaaaaatcaagaacaaaataaagcaaaattctatgctaagcaaattgcagaatcggaatacaaggctaaaagagcattttttgagccttgtaagaattttaggcaaagagttgaagaaaaaattaaagaaatctttgtctccaagcctcctagaaaaagggttagaggggctttgcaccaagaaactttttatccttttgaaaaattatgcaacgataaagaatattctgaaaaattaaaaatggattatggcggggaaaagggtatgcaaaaggcgattgctcttgggaaaatccgccaaattggcacaaagattgtgaaaaatggtgcaatggtgcgcgtagatatttttaaagacaaaaaaggcaaattctatggtgtgccaatctatacaatggattttgcgctgggaatcctgcctaataaggcagtagccacaggcaaggataaagacggagtgattaaggattggatagaaatggattccaattatgacttttgcttctcactttttaaagatgatttaatcttggtgcggaaaaaagaaatgaaagaaccggagttgtgctattttgtaagttttggtgtttcaaccgcaagtattcaagtagaaaagcacaacaataaatttgaaggcttaagtgagaatgaaaagattctctattctaatgctacacaaaaagaggtagcgggcaaaagcataggaatccaaaatctcaaaatctttgaaaaatggcaagtctcgcctttaggagaaaagcaaaaggcagagtttgaaacccgccaagagattaaactcaaaagcagtcctaaaagaaaaggctaagattttataaggagggtaggaatgtttgatgctgcctttcgcaccttatttttaagcacacctgcttacttaagcctacaagacaaacatctttgcatagcccaaaaggacaaagaaagcgtaaagattccacttgtggatattctctgcgtgatgttagaatctcatcaaatcacgcttactaatgcgctgctaaatgcgtttgctctgcataaaatcgttgtttttacctgcgatgaatcccacctaccaagtgggctatttatgccatttttggggcattttagaagttttagtgtgctgcaatcccaaattaacttaagcaaacaaagaaaggcgattttgtggcagcaaatagtgaaagcaaaaattcacaaccaagcccttttgctaaaaatgctgcataaaaaagaaagtgaagaattagaaactttagctaaaagtgtgaatttaggagatttaagcaataacgaagctaaagccgcagcaatttatttcaaagctctttttggtaaaaacttctcccgcaaagtgcaaatctttgaaaatggcaaaatgggaacgataaatgctgcactaaattacgcttatgcaattatgcgaggagtgattacaagaagcctttgtgtgagcggactaaatcctgcacttggggtaaatcataaaaatcagtttaatgcttttaatctagcagatgatttgatagaaccttatagaatctttgcggattctgttgtcgtgcagatggttgaagttggggaattagaggagagcttaagtttgcaaaaccgcgtgaagctcgtaagtattttgcagagtgcggttatcgtagaaaataagctttatccacttactcgcgcgggtgtggtgagtgcgcaaagtgtagtgaaatgccttgagagagaaaatcttaagcttaaactgccgctattttgcgaggaaaagagtaatggaagagaaatttatgagagtgttagtgatgtttgatatgccaacttgcagcaaaaaagagcgtaaagattatgcgagatttcgtaagaatcttatcaaagatggctttatgatgttgcaatatagcgtgtatatgagaatctgcaaaggtgtagcaagtgccaataattatttggataaggtgggtttgattgtgcctcccaaagggcatattcgggcattaatccttactgaaaaacaatttgataatatgcgattattgctaggcagtagaagtgagaatgaaaaagctaatgcgccaagacaacttacgcttttttagagtatcgccaagctataagaacaaagattctaaagattcaatcgttaaaatgtttgaaaatgtttgttagaaaaggtttaagtagattcggttttgagggattgtaaccctgcggagaccgaaaactccttattttagccgcttgttaaattccttaaatgggattatatcttagattttcttaaaaatcactcatttaggatattttacgcccttaaagcctttcaaataccgcaaaatacgataatttggaaagtggattttaccataaaagaatttaacaagcggctaaaaccggtcattacaacaatactctctaatgtccattttaccataaaagaatttaacaagcggctaaaaccaacaagaagctttagaaggtgctcgtttgattttaccataaaagaatttaacaagcggctaaaactttcataagattaaagagacttgcgcgactattttaccataaaagaatttaacaagcggctaaaaccccctcagtcaagcagtggttttggacttgattttaccataaaagaatttaacaagcggctaaaaccttttgtgaataacaaccctactgcgttttattttaccataaaagaatttaacaagcggctaaaactcatccgcaaacctaatcttaatcaaatttattttaccataaaagaatttaacaagcggctaaaacctcgcaagtctctttaatcttaatcttatgattttaccataaaagaatttaacaagcggctaaaacttgtattctgaggataatcgtattctttgcattttaccataaaagaatttaacaagcggctaaaacaagtatgcgctccgggcaataccaatattgattttaccataaaagaatttaacaagcggctaaaacttggatgagaatgatgctactggtaaaaatattttaccataaaagaatttaacaagcggctaaaacttcataagcatcaatgatacctttatttaaattttaccataaaagaatttaacaagcggctaaaaccttggtagctggtttggctcaaaagagcaaattttaccataaaagaatttaacaagcggctaaaacctccccaatctagtagtggttttggacttgattttaccataaaagaatttaacaagcggctaaaacgcgcccggagtttcattagagctcaacctaattttaccataaaagaatttaacaagcggctaaaacattgcgttgcaaatgctacacataataatgattttaccataaaagaatttaacaagcggctaaaacagctgcgtgagccgccttttcatcgatgctattttaccataaaagaatttaacaagcggctaaaactaaaaataagatgacacaagatgaaatgaaattttaccataaaagaatttaacaagcggctaaaacttcaacattaggaacttccaggcgaggcttaattttaccataaaagaatttaacaagcggctaaaacaatgaagcgcttgaggagattatgcttaaaattttaccataaaagaatttaacaagcggctaaaacaatctttctcaagccacgcatatgcaacgtattttaccataaaagaatttaacaagcggctaaaaccaagctagtggcgatgaggctcaatattatattttaccataaaagaatttaacaagcggctaaaacttgcgccgctatatgcgcggaattgacataattttaccataaaagaatttaacaagcggctaaaactggaatatggttcaaaagtttagctctccgattttaccataaaagaatttaacaagcggctaaaacacctctaacaatgataatattctttttggtattttaccataaaagaatttaacaagcggctaaaaccagctggttactctaataccgcgctctctcattttaccataaaagaatttaacaagcggctaaaaccgacacattctacattagtgctaggagtttattttaccataaaagaatttaacaagcggctaaaacctgggtatgtcggcaagaagctccctcctaattttaccataaaagaatttaacaagcggctaaaactattcactaggtctaagtttcaattcttgcattttaccataaaagaatttaacaagcggctaaaacgaattgtttttctcccttttttgcacgtgtattttaccataaaagaatttaacaagcggctaaaacaaggaattgacagagcttggtcgcgtgaaaattttaccataaaagaatttaacaagcctaaattgctattgatgcttgagcttacctcttctcataccctgctctattccgtgagccaaacgcattgttatagggtgcgtcctgccaattacaaaaatcaagtgaatgattcattctacaatccgcatagggctctttagtagggcttaacccacaagcacaaaacaaaagagaaacaaaaaagataaatatcctcattgcttatctcccaaaattaaagattatgctatcaatcttacatcacaaatcataaaaataacttaaagaaaaaactatgcttaaactcttaattctcaaataattatttatattttagtaattattcctataataaattttattttaagttttatttatctataatcccatttcacacataattcacacttaaaaaggaaacaaaatgagaacaataagtagaatactaatggggggggggattacttgctgtttatctcttctcggatatgctgatgaaacacaaaaaaatgaggatattcaaagccaaaatgttacgcgcaatgtaaaattacaggcttcagtcgttactgccgcttcaggcagtgaaaaaaatgtagttgatgctcctgcttctgttaatattgttaccaaagaagaattagagcaaaaaccttttagggatttgggcgaggcactcaaagaagtgcccggggttagccttgatgaaacttctaacaaactcggtgcttctgctatttctattcgcggtatgccatcaggttatacactttttttggttgatggcttaaggcaaaaccctagtggcgatgtcgccactgcaaatttaggtgctggtgtatataatacttttatccctcctatgggtgcgattgagcgtatagaggttattaaaggacctatgagcacactctatggaagtgatgcgataggtggtgttgtcaatatcgttactaaacctatcacagataaatggcatacctcatttcaatctcaaatcattgtgcctgaatcttctacttttggcaacacttatcaaaactcactttggacgcaaggcaaacttacagaacatttaggattgactttaagaatgcgtcagattcatagaaacccaagtgatagacctaaaaatgacttagggcaagatgtcaatactttttttggcacaaaatttgacttactcaatgtaggcacaaggctcacttggttgcctaatagtaaaaatatgctctatgccgatgtagattatacaacctcaacttatgataatcgcaaagcagaaataggcacacttggtgtagatcttaatggaagaggaggatatgaaaaagatgtaggtgtagataagattcttggggctattgggcataagggttcttatgattttgggacttggaaaaataccttgcaatttatgcgaacaaataatacaggacgacttgtagcagggaatattgcttccccaaatcttggtaaaaatagagatattgcttctaatgatgtcattgctgatacgcgacttttacttcctttgggtgatagcaatattctcaatataggcgcagaatatcgctttgaaaattatcacgacttagctgcaactccggcaagtcataatcgcaacactttcgcactctttgctgaagatgaatacaatatctttgaaccacttacattcactcttggggcaagatataattataatgataaatttggttcaaatgtaagtcctcgcgcatatcttgtatatgagattcttgatggctttgctttaaaaggcggagtagccacaggatacaaagccccttatgctaatcaactcattgatgctgtctatggctacggaagtcaaggcacacttgcctttctaggaaatccaaatcttaaaccagaaacttcagtaagctatgaaataggcacaatctttgatgggcaatatattgatttttctttaatgtttttccgctcaaattttaaagacaaaattgaaagcacaagggtgagcaaaactaacactgacccaaattatagctatacttgtgccacctatggagggagtaatcctcaatgtagtctcgctattaatgcaaatactgcattttctcaaggtatagaatctagctttggtataaaaccaatttatggcgtaggctttgatgtggcttatacctttatagattctgaaattacttcaggaagtaataaaggcagaccgctttcaagtgtagcaaagcataatgttgtctctaaactctcttacacacataagaaattccatatttacttgcaagggcaacacaaagcaggtttattaaatacaagtgcattaggcgatactgccgccgcagtagccattagaaatacgcttggaggcacatattataaaccatacacgattatcaatcttggtttaggttataaaattacagaatctatccgcttaaatggtggtgtgtataatctctttgatacaaattttattgattttagaaattatacatatggtaatcaaaatggcaatgtcaatatgcacggagcgcatattcaagagggacgcagatattgggcaaatatcacacttgatttttaatggcttaaattcttatctatgtttcctctctcccacgccaagtgttacactcattgtgtattccttgcttggcttttttagctctttttctatgctttttatcgtggatattgccacttcatcaatctgtgaattttgagaacttttgcgtatgtaaatattctttatcattccttgcgtatcaatgctaaagataaggctcacttctccctttattgtcgcattttttaaagcactttggcgcatagaagcttgagttataagcgtatagacatatttcatataggaatctacctccgccacattacttgagcgagattgcacactttgagtttgattgatagcagattcttgcgcactctctagcaaagtctcatctttgctttcaagtttctttgatagagttttgctctgtgcctttttggtatctaatgctttgcttttgtctttttgctttttatctactgccttagaatcctcgcctgcgtcattattaaaatattgtaaggagagtaaatacatcttttgcacctctccagcagcattaaaatacgcacgcgcatagttataccctagaaacataagtgcataaagcacactgcaaaagcaaaagcttacaatcatagaaaagcgatttgaggggatttgtttctctatatttttgggcaaaaatatactccgccattaggcaaaggcacctttaaagattctatgccatataatgccttgataccactttcatttagcacatctgcataatccccataagataaaagtcgcgcgtcttttagcagcgcaattttatcggcgatatagcactgctctgggtgatgagaagtgaggataatgctctttttaagattttttattacattcagtaacgcaaagctatgcgacatatcaagcgcacttgtcatctcatcaagtaaaattatctcacttttttgtgcaagagctcttgctataagcacaagctgcttttgtccgccacttagctcactataagacttttggcttaaatactctatgtcaagaagcgctaaagattctaacgccttttgcttatcatcttttgaataaaaaaaccgatgatgtgcaaatctccccataagcaccacttcaagcacactaaaaggaaaactaatgtgataattttgcgggacataactacatatttttgcccgatgtcgcacactaagattctttgcattttgcccctctaaatagagctccccgctataatcaaaatagcctaaaatcattttgagtaatgtgcttttgccactgccatttggacccaaaacacacaaaatctcgccctttgccatttcaaagcttatatcttgaagtaatggtagcaaaggtggcttaggaaagtgcaaggtgatatttttacaactaagaataattgaggagtttttaagagacactttttgcccttttgattaaaagtgcggcaaatataggaataccaataaccgcactcacaatgcctagcggaatttccacattaaaactacttcgtgctatactatcgcacacaagcaaaaagaatgcaccaaatatcacacaaaaaggcagcataaggcgatgatttgctcccatcacaaaacgcgcaatatgcggcactacaagacctacccagcctataagtccgcccacagccacagaagcacttgctaaaagtgtggctacaagcacaaaaaaaagacgcatatatttaatgtgaatcccaagcgattgcgcactttcctcatcaagattgagcacatcaatataagaagacaaaagcacagagacaatagcacttaacacaaaaatcacacaaagcaatgctaaaggtgcatcttgcgtgaaagcaagagaacccataagccaaaaaacaatatttggcaaggtattataagggtctgctaaaagctttaagcaactcacaagcgcaccaaaaagagctgcacttatcataccaccaaggataagcattaagatactcattctcttatcaaacgcataggctaaggctatggaaacgcccatagcgatgattccaaagataaaacataagccttcaatgcctaagatagataaacctagcaccattccaagagctgcgccaaaactcgctccatttaacacgccaagtatgctagggcttactaaaggattgccgataatgccttgatacaagccaccacttagtgctaatgccccacccacacatagagctgcgataatacgctttagtcgctcctctacaaaaatgatagaatctatgcttttactcacactattaaaatattcattcacaagggcaaacatatcgctataggcaatatcaaatcgcccaagccctaaagcaatgataaaagcacacacaagaagtgcaaatacgccacaaagaaaaaatatcttttttctcattttacacccacatcacttaagtcatcacctaaatatgtatgctttaaatgcgtgggataaagcaaatccctacttcgcgcttttgctcatagctcacatatccattgacttgctttttatccacataggctttgattttctcctcatctggctcaccttgatgcatactaatatgccattttatgtcatttatggctttttgtatgtctgatttataggtatatcctgcctctttataacaatatgtaggctctttatatcctagctctttaagccattgcaaagcttgaggcaaccccacaggaagctcaaccttgatattgtgtgctgcaaaaatctcatctaaaaacgagctttctctcactctgccccagcctatatagcatagcccctctttgcctacacctaaagcctttttgaatcctgcaagattattgagtgcgggagtcatagaagcaaaggcaatatcaatctctcccaaagattctatattgaactcttcccacgagcttacaaatgtagtgatattctctaatcccaaacctcttgcatcttcttgcaaatgtgaaagcattgtttgggaaatatctgtggcataaatgtgctttgtttcaaaagcaagttgcaaggcaaatcgcccatttcctgcaccaatatcaagcaaagttttatccttaaatgccacattttgggcacgaaagaaatctaagatttctaaagtatcctctgtatctttttgaaagcgcggaaaagtctgtgcctttttatcccatagctgcttactcaattgttgctcctttttgcaaaatctaaactcataaaccttgcaatctgtaatactcctcatcacttaatggctcaagaaatatctcataaaatttttgtgcgtgtgtctttgccacctcatcactaataagttcagggtgaatcttgctatacgcccacactaaacccacactttgcattatacttggcggacgcataagccaattactcggcgttgaaggcgcataaaataccttcttattttgcaacgcgtttaaggcttgccatttttcatttggattttcaagcaattccttaaataatggaatctcacgtacaaaaatcacttgtagattgactttagccaaaagctcaaaatcaatttgagtttgttgctctgtgcttatcatatcacagcttatagcatttaccccgccgatttgataggctaagtcttttttatcttcacttgcactacattgtgttttaagcccatcaaagccttgtgcaaaatatatactcgggcgcacagaatgagaatcttgtgttgaatgtgcttcttgtgtttcattagattctaaagcgtgttgcgcattatgcaaaagctcattgctttgtgctagaaaatcgagtaatctttcacctcttggcttgataagctcactacaagcttcatttttacttaaagattgtgtaatt

SEQ ID NO: 3771 - DNA, 23072 bp, synthetic construct
  misc_feature 1..23072: note = Synthetic
  source 1..23072: mol_type = other DNA
tattgatacaggtatggggttagagcgcgtagtagcacttttagagggtaaaaggagcaattttgattcctcgctttttatgcctctgattgcaaaagtagaagagattacaaagcaaacttatttttatgagagtggagcgagttttcgcgtgatagctgaccacgctagaagtgtggcatttttgcttgcacaaggtgtgaattttgataaagagggcagaggatatgtgttgcgcagaatcttgcgcagagccattaggcacggctacttattggggcttagagagccttttgtgtatcaagttgtgcaaagtgtatgcgagaatatgggcgcacattatcattatttggttgagaaacaacaagggattatggcgcaatgcaaggcagaagagctaagattctttgaaaccattgaaaatggaatgaatctttttaataaggaattaaaaaaactaaaagaggaaaaagcaaaccaactctttagcggtgaaatagcatttaggttatacgatacttatggttttccgcttgatttgacgcaagatatgctacgagaaaatggatttggcgtagatgtagatagttttgaaacttgcatgaaagcacaaaaagaacaagcaaaagcaaattggaagggcagtggcgatagcgcaaaagagggagattttaaattattgctaagtgaatttgggttaaatgagtttgtcggctatgaaacaatggaagcacaaggtagaatcctagcacttttagatgagaatttccaacgcatagaaagaatcaaaaaaggcgatattggatttgtaatgttggataagacacccttttatccagaatcaggaggtccagtaggagataaagggagtttattgcacaatgacgatagaattgcagaagtgctagatactaaaaaatattttggtttaaatattagcaaagttcaggcaattcaagatttaaggcttaaagagggtgtattagcagtcgtggattctgcgcgtttagagattgcaaaacaccatagcgcaacacatctgctacacaaagcattgcgtgagattcttggcgttcatattgcgcaagcaggaagccttgttgaagagaatcgtttgcgttttgattttagccacccaagcgcactgagctatgaagagatagagagaatcgaacagcgcgtaaatgagcagattttaagcgcaaatccacaaatttgtgagcaaatggatatacaaagcgcaaaggcaaaaggtgcaatggcactttttggtgaaaaatatggaaaagaagtgcgcgtgattagctttggggattctattgagttgtgtggcggaatccatgtgccaaacactgcttttattggaagtttttatatcacaaaagaatctggtgttagcagtggtgtgcgcagaattgaagcggtatgtggtaaagcagcgtatgaatggggaaaaaatgcgcttttaagtgttgagagcgcaaaggagagtttgaaagcccaaaacctattgcaaggaatacaaaagcttaaagaacaggtgcgagaattaaagagtaaaataaacagcggagtgagtagtcttaaggaaatggaatctgaaacaattgagggcgtgaaactcattgttttagaatttaaagaaatggaatccaatgaggcaaaaataattgtagataatgttaaaaacgagaatgataaagtagcaattttacttcttacaacagatagccaaaaaggaaaaataggaatcacagcaggagtaaaaggtgtagatatcaaagcgggtgcttgggtaaaggagattgctcaacttctaggaggcaatggcggaggaagagacgactttgcaactgctggaggtaaggatttagataagattccacaagctttaaagagggcaaaagagattgtgaaagaggcattaaaataaaacaaagcccctcgcaggggagctagtttagaagttgtaagggtttgtaggatttctgttttgatcttgcgtgaaaatgcggactgcttcattcacagcagaattgaccgcattttggagtgtgatttgaatttgatttgggttaagtttggaatcatcaccaaaaaccactaaatattggctgttttgattttgaatacttgatttccctctaaaaattttcatttcattgggtttgctaaaattaagttgcacttcaaaaattgcttgatcgcttgtctgggaataccaaaagcctctttgttggttttgggtattgatattgccgaaaatcacctctaattgataatctgtattgttttcttctgtttgtggggaagattggaagcaaccgctttgtgtgagtgatttttccaccatttgttgcacatctgcatttgcaagagttaagtcattgtagtccccgctttttatatcaacaagatgataagtagcaatagggcttggacaagtttttaaaacacggatatttggtgtatcgttaaatttttgcgcacacgcactcaagagtaatgcacctatggttatacaacagcttttgatgacaaaagttttaaataaggtttgatgaacgcccataaacattcctttggcaagattttggtgaatttgaagcttattttaacataatttattgctaatttttagcaagattgatacaatacataaacaattttaaaggtaaatgctttgcatatttttaaagagaaaaaatttataatttcagaatttttcttatgttttatcttgggttttggaatcattttttatgcacaaaacacgaaagagggattacaaaagcaagacacactactttataatgtcaatatgagtggaaagcaaagtttgttggcacaaagaatcgtttttctttctcaaatagtggttacaaatcgcattttaaatcgtagtaatccagagagcttaaccgagcttcgcagttgcatagagcaactaaattctattcacaggattctacaaagttttgtagtttctaccattgttggcaatgaaaagcgttctacattggacgaaatgtattttggcggtggaaatctgaattttaaaatggaagaatttttaaatagtgcaaataaaatcttttttttacaatctgcgcaagatgcgtttcgtattaatcaagaacttctacatcagttggaagatgatgatggattgttggctagtcttgaacttgcaacacttagccatcaattttatgcacaaaatatcattaaagaatcgcaactttatttgcagattcttctctatgctatattgtcgatttgtggtttgcagattctgctgtttttatgggctttgacatataaatataaagattgattttaaacttgcaagaggagtttatcttgaaaagttttttcccacttttggctttaatggtatttttgatttttcatttaagcatttactttttctttatcagacaaataattcagccaaagattccacgtttagtgcttaaatattttttgatttttaatttttttggcgtgatagcttattttgcagcacgatattttgtggattttccgcaaagtctatattttttggtttctctctctattggtgtaggttttgtattgtttgttgtaatgctagtttatcagattttaaagcttgttttatggcttttgttttggttatttcctagcttttctaaggagcgcagaggattctttcaaagagttttgaatctctcaagcggaatttttgctttaggatatttaggtgtagggcttgtagagggcagattgcaaccaaaaatagagagagtaaagattccattgaagaatcttaaaaactcaatgaatgcggtgcaaattagcgatttacatattggaggattgattgaagaaaatgttgtgcgtcaaattgttcaacaaatcaatgcgctaaagccagattttatcgtgctaacaggggatattgtagatacagaaattacaaaagtgtcacgagccattgcagaactggctaaactcaatgcgcctttaggggtatattttattgcggggaatcacgagtatttccatagtattcaacccttgtttgaaggattgaaatccattggaatccgtgtattggaaaatgaatgtgtgcaacttgttaaaaatcaaggaacaaatgaagaagcaatagtgaatttagcaggtgtgtatgatttgtttggacgcagaatcggggtattagagccaaatttagagcaagctttgcaagataggatagaatcgcaacctttgattttgttggcacaccaacccaaatttgcccttgaagtaaaagagcatcatcgggtggatttaatattaagcggacatacgcacggagggcaaatctttccttttcgattccttgtgaagttggaccagccctatttagcaggtttatatcaacacagcccaacaacgcagatttatgtgaatcgtggcacaggtttttggggtcctcctatgaggattttgtcacgtgcggaaattacattctttgaatttgttgtaggcgaataaaatactacaagtaaatttcaaacaaaagtaaagtataattcaatatttgaaatttggaatgatatgaaaaataagaattgttgggtatttttaatcttgtttatgacaaattcccttttaggattggaattttatattaatagcggaagggaagaaaatagtaattttgctatcttaactttattggataatcaaccttttgaatgtgcggaatcttatgatagagaatcagaagttagtgaaatttcttgtaaatttgattctgctttgctttctcgttttcagcgaagtgaaacattgtttttttctatttctccagagagttttgaggataacacgcaaggtttttttctcaaaataaaaccaaagaatggtaaaaaaatcaaactttataatacagaatttaatctcatttcaggaaaaatgattccagaggagcataatcaaaaatccaaacattggcaggttttaggctatgaaaataagcttccattttttaatagtcagcctagcaatggattgaattttcctatttcttttgggaatgatttgccaagcattggtgtgctagatgtgcaaatgcgcccaatgaataatgaagtaggagcggataaggatcattttttgcgcatacaatctttggtattaaatgagtcgtataatgaagctttgaatgccatagatgaaatgttgggaatttatcctgaaacaattttcaaacgcgatgcgttgtattttaaaattgttgcacttgatggtttaggtaaagaggagaattatgaggatacaatgatgcttgctaaagcttggttggaagcttatcctacggatattcacgtgcctcaagttttatttgttttagcaagaacctatgcaaaaatgaacttctttgaggaagcaaaatattattacgataggcttttcaatgaacataaaggcgataaatatgaacttttagccagacttgattatggagagaatctttatcttaggggagatcgcaaagttgttttaacaatgtatgaatctactttaaacgagacaaccgatttagatgtcgcctctttagcatctgttttattgggagattattatcgtaaggcgggaaataaagcagaagcagaaaagtatcttaaaaatgttttagaagctaataaaaagtattttttaaaagatattccaaaacattataatatgcttcaagcttgggcggaagctggaatcgtagatgttcctgctcaagtagcagaagcaatgtttgaaacattagaggacgaggacgatcctctttatttgccaatccttaaaagtatggcaatgtggtttgataaggcggggaatcttgaaaaagcacatcaatattatcaactccttctaaaaatagtagagagtgatgcggagaaacgagagattcaaaatttagatgatagtttattgctaaattataacgaaaacaatgcaacaaagagattggagcattatgattatgtattacagaattatcagggcaaagaggaagccaaaaaagcattagagaaaaaagcgcagactttgtatgatttacaaaattatcaagctatttttgatatgagggaggaattagaaagggaattaggggagaatcctgcagttttacttaactctcttggggcattaagcagaaatgcgctccaaactcaaaattgcaaggaagcagcatattatggtagtttatatcaagagaggattccactagaaagcgatgaaagattgcaaatggtggattgtttgagggaaaatagacaatatactgccgcccaaaaaattgctcaagtagaatcacagaatgcaaaaactccaacagataaagaaaagtggctttatcgcttagcgtgggtgcaatacgaaatgcaagattatcccaaagcttccctcgcggcaagggatactttgagtttgttgagtaatcctgcatataatgatagtgcttgggtattatttatgtctttaagtaagcaaggaaggaaagaggaagcctttgagatcctgccaattttagaggataaattaaaagaggataataaaatgattgaggtttataaagaagtattgcaaaatgcacttgctagtagagaggatacagcaattaaggtgtatgcaaacaagcttatagcacttcaaaaaaaatatcaacgttttgaatattctccttgggtggaattgggtttggtggaggctcttaatcgcgagagtaaattccaagaatccctagatttgctaaaagacgcagaatctcacattagcaatggaaaagagcagatacagatttattatctgcaggggtatttaaatgataagttgggcaataaaaatgcagcaatagaatcttatagccaatgcgaatcagtccaagcagaatctccttggaaaaatttatgcaccgatgccaagaaattgctagaagataaaaatgcaacccaaacgcaaggacaacaatgaaaaaaataaacaatacagaaagcaaacaagaagtaagctttgaggaatatttgagtattatttcacaatgtttagaaaaattagaacaagaggagattacattaaatgaaggcttggaaatctataaaaagggtatggaaaatttgcaaaaagcacaaaaaatcctagaaaacgcacaattacaatgcgatgaacttaaaatgcaatacaaaaaggaaaatcaatgaaaattgccgctttacaactctcaaacacaaaaagtcaaaccgaaatagaatcctatcttaaggctgctgtacagacaaaagttaagattattttgtttggagaatatttgctaaacccattttttaaaaatttagaatccaaaaagagtaaaacagcgcaatggctagagcaaatcaacaaagaaaatgaaaaccttttgcaactttctgccaaatatggaattatcattgtaacacctattttagaggttgttgctcataaaatttataaaacaattttgattatcaataagggtaaagcattgcattatagggcgcagaagttaatgccttatgagcattggaatgaagcaaagtttttttctaatactatgccaaaaaatcttaaaaccccacccatttttagtgtgggcggatttaaattctctgttctttttggctatgaattgcattttgatgagttttggttaaaatttaagaatgaaaatgtagattgtgttttgttaccaagtgcttctacttttgattcctccttgcgttggcgcagtattattaaaatgagggcatttttgaatagttgttatattttgcgcgctaacaggatagggcaatacgaggacgctccaaccaagactttatggaatttttatggggattctttgtttgtttgccccaatggagaagtgatagattgtttgggtgatcgtgaggaattattgattgccgaaatggacaagaaatacttaaaagatattaaagaatgttggaggtttcgtctttaaaaatgataaaattttaagtttttatttaggaattttagatataatcaaggcttttcaattagcttaaaaatagtttaaattttatctacttttggagttttctatgtctgcaaaaaatgtcaatcagcaattagatgagttgtttcaaagggaatcccaatatgtttcttatgaaaagattgcgcaagttttgggtaagcttcctactgcagcccaagcaaaaagggtaagtgatcttgcaaaaaaatataatagaaaattaatgtctgcttcagaaattgcaaagattctaaaccaagatgaagcaagaaaaatcaaagaagataaaaagcgtcttttagatgaagagttagaagatgaatttgattttatgaaagagagagaactcctagagtggagtcgcagtgatagccctgtccgaatgtatttgcgtgaaatggggcagattccgcttttaacgcgcgaagatgaagtggagcttagcaaaaacattgaactaggcgagaatattattttagatgcaatctgttctgtgccttatctcattgatttcattttggattacaaagaagccttgattaatcgtgaaagacgcgttaaagagctttttaaaagttttgatgatgaggaggaggaaaacgaagaggaattagatgagagtgaagaatatgagaatgaaagcggagagggtgaagaatccaaaaaacccatcagtaaaaaagatcaaaagcgcgtagaaaaagtgcttatcagtttcaaggcattagaaaaggctaaaaaagattggctcaaaacttgggaacaagaaaaagataatgaaaattgtgaggatatgctttatttattgactttagcccataaaaagcaactcttaaaagaaaaattacttgatttaggtcctacaagcaaattgattaatgaattagtaaaagcaatggagaatacgattaaaagtgatgagggttttgacaaagaattaaaacgtttagagtatcgtttgcctctgtttaatgatattttactagcaaatcataaaaaaattttagataatattaccgagatgagtaaagcagatattattgctgctgtgccagaagcaacaatggtttcaacctatatggaaataaaaaaattgttccaaaccaaagcagcaagtgagggaagttttgatttagagccagagaaattgaagcaaattttagagcaaatcaaaagaggaaaggatatagccgataaggcaaaaaccaaaatggcaaaatccaatttgcgtcttgtagttagtattgccaaaagatacacaaaccgcggattgccgtttttagatcttattcaagagggcaatattggattaatgaaagcggtggataagtttgaatacaaaaaaggttacaaattttccacctatgcaacttggtggattcgtcaagcaatctctcgtgcaatcgcagaccaagctcgcactattaggattccaatccatatgattgaaacgattaatcgtatcaataaaattatgcgcaagtttttacaagaggagggcaaagagccagatttagaaaaaattgccgagggtgtagggttgcctgtggataaagttaaaaatgttattaaaatcactaaagaacctatcagtttagaagcacctattggtaatggagaagatggaaaatttggcgattttgtggaggataaaacctctgttggaccaatggatcatatcttaaaagaagatttaaagagccaaattgatgatgtgctagaccagctcaatgagcgcgaaaaagccgtgattcgtatgcgttttgggttacttgatgatgaatctgatcgtacattagaggaaataggcaaggaactcaatgtaacgcgtgagcgtgtgcgacaaatagaatctagtgcaattaagaaattaaaacacccaaaagtgggacgcaaactcaaaaactacattgaggattgaaaataaatttgcaaaattgggggcaaataatgaaaattctaggttttgacataggcgttacaagtattggttgggcttttgtagagggagaggaattaaaagattgtggggtgagaatattcaccaaagcagagaatccaaaaaatggtgattcactcgccgcaccgcgtagagaagcacgaagcacaaggcgcagattagcacggagaaaagctagactaaatacaattaaaaggctactttgtgaagagtttgggctaaacttaagcgattatcttgcaaatgatggggaattgccaaaggcatatgagacaaccaaagataccaaaagcccctatgaattacgcaccttagctttagagcaaaagttagagcctaaagagttagcacgggtaattttacacattgcaaaacatcgtggctatgggaataaacacgcaaaaacaggaagcgataaagattccggaaaggtgttaagcgcgattaaagttaatgaagcaacaatgaatgcgaagcgttataaaagtgtgggcgaatatctctataaagaattttatcaaaaagaaagatatgagaaaaaaggtaacactctcacaaaagaatttaaaaatgtgcgcaataagggcgaaaattacgagcattgcgtggcgcaagaacaggtaagggcagagttagagctgatttttcaaaagcaaaaagactttggagcaacttttagcgaaaattttgaatcccaaattttggaaacagccttttaccaaagagatttaaaaagttttgcggataaagtgggagaatgtgtgttttataagggtgaaaatcgcgcacccaaagattccttaagtgctatggaatttgttacactcacacgcattatcaacaccctaaaaaaccttgaagaaaagagcaagaatctcggcattggtgaaacctatggcaaagataagattcaagagattctaaaggtggtgctagataaaggcgagatgagttataaaaaattgcgtgagattttgcatttagatgagcggattttatttgctaaggatcccaagcttgactatactaaaggagtgcaagaagcggaaaaagcaaagtttattgagctaaagaatcttaaaacctttaaaaaggcaatgggtggagactttggcaagtttgctcgtgaggagttagataatattgctacggagattaccctcattaaaagcaaagaaaatttagcgaaaaaattacaaaactatcccgcattaagcaaggagcaagtagaagccttaagcaatttaaattttgcaaagcatattgatttaagccttaaggcacttcataggattctgccctttatgtatgaggggttgcgctatgatgaggcggtgcaaaaggcaggattgcaagagcataaaaaacatttacaaaagggcgagtttttaatcccgctaaaagagtatgaaccctatttggcaaatccggttgttgcaagggcattaagtgagtatcgcaaggtgctaaacgcgcttttaagaaaatatggagcagtgcataagattcatttagaatttacgcgtgaggcaaaactaagcgcaaaagagaggcaaaagtatgaaaaggaacaaagagggcattttgaagcaaaccaaaacgcaatcaaacaatgcgagattctaggactgcctctaaatggcgcaaatattcttaaaatgaagctttggatagagcaaggggaatgttgtgtatatagtggagataagattactgaaagtgatttaaaggattccaatgccttacaaattgaccatatttatccttactcacgcagttttgatgatagctatatgaataaagtgcttgtgttttcaaaagaaaatcaaaataagcttaataaaacaccttatgaagcctttggggacgataaagaaaaatgggataggattctaagctttagcacaaaacttcccaagcaaaagcagcgcagaatcagcaatacaaactttaaggataaagagggcggatttcttgctaggaatcttaatgacacaggttatattgcacgacttgctagtcaatggagcaaggattgtttggagtttttgccactaagcgaaaatgaagtgaatattgcaggagaaaaaggtagcaagaagcatatagaggtgataagtggaagcttgactacaactttgcggcattattggggattaggcgataaggatagaaacaatcacctccaccacgcagtggatgcaatcatcttagcctacacgaatgcaaaaactattaaagcatttgcagattttaggaaaaatcaagaacaaaataaagcaaaattctatgctaagcaaattgcagaatcggaatatgaggaacaaaaagcttttcataaagctcaagtaaaagtttttaggcaaagagttgaagaaaaaattaatgaaatatttgtctctaaacctcctaaaaaaagggctagaggggcattgcacgaggagacattctattcttttgaggacgaaaaacttttaaaaagttatggtgggaagcaaggtatagaaaaggcaattagccttggaaaaatccgccaagtaggcacaaagattgtgagcaatggcataatggtgcgcgtagatatttttaaagataaaaagggcaaattctatggtgtgccaatctatacaatggattttgcgctgggaatcctgcccaataaagcggtagccataggcaaagataaagagggggtgattaaagattggatagaaatggattctaactatgatttttgcttctcactttttaaagacgatttgatcttggtgcagaaaaaagaaatgaaaaaggcggagttgtgctattttgtgagctttggttctgccaatgcgcaaattaatgtagaaaagcacaacaataaatttgaaggcttaagcgaaaatgaaaagattctttattctaatgctacacaaaaggaggtggcgggtaaaagcataggaatccaaaacctcaaaacctttgagaaataccaagtctcgcctttgggagaagtgcaaaaggcagagtttgaatcccgccaagagattaagctcaaaagcagtcctaaaagaaaaggctaagattctaaaggagggcgagaaatgtttgattcagcctttcgcaccttatttttaagcacacccgcgcgattaagcctagaggataaacatctttgcatagcccaaaagggcaaagaaagcgtaaagattccgcttgtagatattttatgtgtgatgttagaatcgcatcaaatcacgctgaccaatgcactgctaaatgtgtttgcacaatataaaatcgttgtttttacctgcgatgaatcccatttgccaagtgggctatttatgccatttttagggcattttagaagttttagcgtgttgcaatcccagattaacttgagcaaacaaagaaaggcgattttgtggcagcaaatcgtgaaagcaaaaattaataaccaagcccttttgctaaaaatgctccataaaaaagaaagtgaggaattagaattcttagctaaaagtgtgaatctaggggattcaagcaataatgaagctaaagcggcggcaatttactttaaagctctttttggcaaaaatttctcccgcaaagtgcaaatttttgaagagagtaaaatgggaacgataaatgctgcactcaattatgcttatacgattctgcgaggagtgattacaagaagcctttgtgtaagcggactaaatcctgcacttgggataaatcataaaaatcagtttaatgcttttaatctagcagatgatttgatagaaccttatagaatctttgcagatcctgttgttgtgcagatggttgaagttggggaattagaggagggcttaagtttgcaaaatcgcgtgaagcttgcaggtattttgcagagtgcggttatcgtagaaaataagctttatccactcacacgtgcgggtgtggtgagtgcgcaaagtgtagtgaaatgccttgagagaaaatcttaagctaaaactgccgctattttgcgaggaaaagagcaatggaagagaaatttatgagagtgctagtgatgtttgatatgccaacttgtagtaaaaaagagcgtaaggattatgcgaaattccgcaagaatcttatcaaagatggctttatgatgttgcaatatagtgtttatatgagaatctgcaaaggtgtagcaagtgccaataattatttggataaagtgggtttgattgttccgccaaagggacatattcgggcattaatccttactgaaaagcaatttgacaatatgcgattattgcttggaaaaagaagtgagaatgaaaaaagccaatgcgccaaggcaacttacgcttttttgaaggttggttttgacactaaaagatttgcaattaaagaatgttttagagacaataaatcaactttttaagtaggagataatctttagctaaaaaataaaatgggtgagcttagggattgactaggctaacacccttgtgttagcttaaccctgcgggaagctcacttcccttattttagctgcttgttaaattccttagtgggattatatcttagattttcttaaaaatcactcatttaggatattttacacccttaaagcttttcaaataccgcaaaataggataatttggaaagtgtattttaccataaaagaatttaacaagcggctaaaaccttgaaatagatgagattgatgcaagtttattttaccataaaagaatttaacaagcggctaaaacaactcattcattttttgcctcctaatttttattttaccataaaagaatttaacaagcggctaaaacctaaaccccatatctttacaatttgaggaaattttaccataaaagaatttaacaagcggctaaaactaagcggaagagtttgcagtataggtataaaaaaatatttagcattaatggctaattaatatttagtcttatagactaagatttaatgaatttttttactaaatgtattgacaaggtataaaatttagattataattccgcgttttaaaaatatattttgaatcggaggtaattcttatgaatttcaaaccacttggagaaagagttctagtagaaagactagaagaagacacaaaaacagcttcaggtattattatccctgataatgcaaaagaaaaaccactagaaggaatcgtgaaggcaatcggttcggaagttaaagaagtaaaagtgaacgacaaagttgtttttggaaaatattctggcactgaagtgaaattagacggaaaagaatatttgattttaaaacttgaagatgttttgggcgtcattgcttagacagaaaattttagagattttaataaaaggataaaaaatggcaagtaaagaaattaatttttcagatagcgcaagaaatagattgtatgagggcgttaaacaactcaatgacgcggtaaaagtaacaatgggaccaagaggacgcaatgtgttgattcaaaaaagctttggtgcgccaagtatcacaaaagacggcgtttcagtagcaaaagagattgaattagcagacccaatcgcaaatatgggagcgcaacttgtaaaagaagttgcaagtaaaaccgcagacgcagcaggagatgggacaacaaccgcaacggttcttgcgtatagtatctttaaagaaggtttaagaaatatcacagcaggtgcgaatcctgtacaagtcaagcgtggaatggataaagcagcagaagcaatcacagaggaattgaaaaaaatcgctaagcctgttgcaggcaaaaaagaaattgcgcaagttgcaacaatctctgcaaattctgattccaaagtgggcgaactcattgcagaagctatggagaaagtcggtaaagacggcgtcatcaccgtagaggaagcaaaaggaatcaatgatgaactaagcgtggtagagggaatgcaatttgatagaggttatttaagcccttattttgtaaccaatagcgataaaatggaagcagaattggaacacccttatattctattgacagataaaaaaatcacttctatgaaagacattttaccgcttttggaatccacaatgaaaagtggcaagcctttacttatcatcgcagaggacattgagggagaggcactcacgactttggttgtgaataaattgcgtggcgtgttgaatgttgcggcagtgaaagctcccggatttggcgatagaagaaaagaaatgctaaaagacattgcgaccttaacaggtggtgaagtaattagcgaggaattaggcaaaacactagaggctgcaacaattgcagatttaggacaagctgctagaatcgtgattgataaagacaatacaaccattgtagatggagcaggtcaaaaagatgctgtgaatgctagaatcgcacagattaagacacaaatccaaagcactacaagtgattacgataaagaaaaattgcaagagagattagcaaagcttagcggtggagttgcagtcattaaagtgggtgcagcaagtgaagtagagatgaaagagaaaaaagaccgcgtagatgacgcgctaagtgcaacaaaagcagcggttgaagagggcattatcatcggtggtggtgcggcactcgtgcgtgcagcagcaaaagttagcctaaagttagagggcgatgagaaaatcggttatgaaattatcaaacgcgctatttctgctccgattaaacaaatctctacaaatgcaggttttgatgatggcgtagttgtgaataatgtagagaaagattccaatgcaaatcacggatttgacgcttctaatggcacttatgtggatatgtttgaagctggaatcattgacccgctaaaagttgcaagaatcgcattgcaaaacgctgtgtctgtttctagtctattgcttacaacagaagcaacagtgcacgaaatcaaagaagataaacccgcaatgccagatatgagcggtatgggcggaatgggaggtatgggcggaatgatgtaatttcgctcctctttagggattctttaaggaatccttaaaggctctctccttttaatttgtgtaattttatccctcttgtattaaattgataaaataatgattagaattttaagcccactctttttcttgtttgctttattaaatgctgacgatgtagtattggaaagagtttttaaagattttaatattaagggaactttggttattgcaacgcttaagagcgacaaattatatgtttataaccaaaaaagagcaaatatgcgattctgtgccgcttcaacttttaaaataccccatactttaattgcgttgaatgaaaatattgttatatcaaaaaacgataggataaaatgggacggaatcgtaaggggatatgcgctttgggacaagaatcaaacattgcaatccgcaattcaaacaagctgtgtttggtgttatcagaaattttcacaaaaaatctccaaagaaaagtatgtcagttatctttcaaaatttaactatggaaacaaaagggtggggaaagataaatctgctttttggctgaatgatgatttgaaaatatccgcctttgaacagatagaatttttaaaaaagttttatagtgaaaatctcccaatccctaaaagcaatattgacatagttaaggatatgctaattatagagaaaaatgaacttttcacgcttagggctaagagtggttggaatggaatccttggttggtatgtaggttatgtggaaacaagcaaggaagtttatttctttgccttaaatgcggatgttaaaaaagaggggttgcatttaagaaaagagattgtttatcaagcattaaagtctaagaatattttataaaacaaagtgacctctttatattttttatatgtttggatacttttcttttagatgctttatgccattgttttttaaacacgcagggcaagttttagccacttatcaaaagcttttatggtaaaattccaaaaatttaaaggaaatatgatgtctaatacacaagatttatggaatctcaccgcactatttaaaaataaagaatccttgcaaaatgcgattgcagagagtatagagaaagcaaaagcctttgaggaaagctataaagataaaattgctagtctgacgcctacaaacttttaccaaagtctgcaaaactatgaaaagatttgcgaggagctttcgcgcgtgatgacttatgcctttctttgttttgcttccaataccaaagagggggcattttatgcagaatgtgaaatgcaaatcaataaggcacaagaatcgcttttgttttttgatttggagtttaatgcgctagattcagcattgcaagagtgctttatccaaaatgccaaagaatatcggtattatttggagcttttaagcaaggattctaagcaccaattaagcttacaagaggaaactattttgctaaaaatgcaacctgtgggtgtggatagcttcaaacggctttttgatgagcatttaagccatttgcgttttaatatttctttgaatggcgcacaaaaggaagtaggggaggaggaagtcttaagcctcttgtatgataaggaaagagaagtgcgcaaaatggcgcaagaatccttaagtgcaggattaaggcagaatcttgatttattaacttatgtttataatgtcgtgcgcaaagatttaaaaatcaccacgcagctaagaaaatacgcaaacttggaggaatcccgacatttagataaccaaactacacaaaaaagtgtggattctatggtgaatacgattaatgcaaatgttggaatcgtggaggagtattacaccctaaaggcgaaaattttgggcttagaaacgctttatgattacgaccgctatgcgcctttaccttgcaaggaggaggtggaatttaattatcaagattccaaagcaatcgtcttgaaaacctttgaggatttttcacccaagttttatgcaatcgcacaacgcgccttcaaagagggttgggtggattctcacccaagagaaaacaaacgcggcggggcttttagccatagcgcagtgccgagtgctcacccttatttaatgcttaatcacaccaatcgcagacgcgatgtctttacgatggcgcacgaattggggcatacgattcatcaaactctttcttatagggttgggtatctcaatgccgatacgcctttaacaaccgcagaaaccgcttcagtgtttgcggaaatgctattgtttgagaaaatgaaagaaaatctaagcaaggaacaaaaaattgagctttatgcagggaagctagaagatgtgtttgcgacactttttaggcaaaatgtctttacgaattttgaacgtttggtgcatcaaaaagagggtgaattaagtagcgaggagcttagcaatctttggcaggaggagaatcaaaagatgtttggcaaaagcgtagttttgacgccgaattatcgcctttggtggtcgtatattccacattttattcacacgcctttttattgctatgcgtatagctatgggcaacttttggtttttgcgctttttggagtttatcgccacaataaagcagattttgtggcaaaatacgaggagtttttaagtcttggcggtagcaagtctcccaaagagttggtggggatttttggcttagatattgagagtgatgatttttggaatattggtatgaatgaagtgcggctgttactagagggcttaaaggggcttttataaggaggagaaatggaagttttgctgaaggataagaagtttagagaattattgcaagggcattgttacgctatcttagaatacttaattcacaaaaaaattaatttttctattgtgtgtaatgtatcccgtgttaaatttgaacccgagcttccggattctattaggggttcttttagtgatttgacattgtttatcttggcgggttatacttttgagagtttggagttagattctaaaaacttatattttgaagcaggatttggcgaggagaatttgggcagttttgtaacaacacctctaaattctattgtgcaaattttattacccaatgatgaggatttacgtgcagatttttgcgtctatataaatcttttagcaacttttatgggggcagaatctagtaaggaatatgaagaagaggggattcatagttcaatgaaagcacttttagccaatccaaaaaataaaaggtttaaaaaataatttgctatacttcaaaatttagcatttgagtaatggagaaaaaatggataaaaagattaatttagagttattccgatttgatataaaaacagactatctaccttattttgcaaaattaattgtaaaaatcaatccgcaaaagtcattattggatttgcttaaaatcattcaagaaaatgtaatggaatatggttataatgcctatgggttcaaaattaatggtgtagtagtctttgattttgctttaaaaattgaggatttggttaagaattttggttctgattggaaaatagagccgctgaatccacatcttgcactaaaggatttaatcatcaatgttgagccatttttgcaaaaaatagaatcactaagagaggttgggcttgatgagttagcacaagatgaagtgcaaagcgtcctaaaggatatagaatttagaggattggaatctttagaaatagaaacacaaaagattaaaaatgtctttttactttcttttttgccttttgcttatgctacgcctttgagcgttgagaatccagaatatttgggtgaagcttattttattttagcagcttctttgtatgcaaaacataaaacacaaaatattttagaggcagtatgtgatttaaagaatggaatcttgaatgcacaaagtttgcaaacttatttgtttcctcaaaatgcaaagtttgatagatgcatcaatgaattaaagatgattatttttgaaatgagtgaaaatccagagattcaatcttttaaatcaaaattactcaaaaaagctaatttttaaggagagaaagtggaatcgcttatcttattgcataataacttatatccgaagtcttcatatattttaatgcaaaacattcaagagcttttgcagaaattacaagtccctgtggaaaaatcctataatctcacattggaggagaaatttttaccttttatggagagggtaaaatattataaaaaattatttcttttgtttttggaagcggagaatcataaaatcttagtgtgcgattctcaaagtttgttagaaattggacgattttttcaaaccctttatgaggaaacagaattaagagagattctcttaaaagagtgtggagcagaagtagatattctatccttagaaaatcgttttatttttgccccagaaattatctttaatgcactcaaaacattcaattttaaaagacgttgggaaggattcagatgtgcttttttgatagatagaaagcttgaaaaattagtaatagaatcccaaattattccaacattagaggatataacaggtttaaaaatcctgccattttttaaagaaagttatgcgtatttgctgcaaaccaatccgcaattagcctacaaaatgggtggaatggattattatgaaatgatggatagcggtgtggattttattttaaccccaaatattggaaactttgaattaatggatagacatatcaaaaacttgcaagattctatgggcagggatactgcagagattccgttgttatttatcccacaagtgattttagccttattcaatgaaacgacaaaagataccttgcgttttggagagcatattattttacctagaatgctttaaggattaaaatggttatagcactaaaagtgattgtttcacttgtcattgcgatggcttggtataaactaacctcaaaccaagaaacttccattttcttttttgtgttaatgttgattatattttttatccgccctatcgcttatcaaagcccaaccgaacgcgaagagtatttagaaaaatttaaacgctccaaagagcgtcaaatgaatttggaaagaatgcgccgtgatgaaaagaaaaaatccgcagaagagaaaaaaaagagaatgggtgtgaaagatgagtaacaaaaagcaattaatgttgcttcaaacaactaccacgcgatcaaatgctactctattaattcaagttgctttggaatccagactttgcgcttgtgtccaagaaaccaatatccaaagccattatttttggcataatgcacagaatccaaaattattagaaatttgcaatgaagaagagattttgcttacttttaaagtgtttgagaaagattttaaaagtttgcgtaggcttattttgcaaaatcataactatgagattccagaaattattggaattaaactttctaaagttttgaaatcctataaaaagtggtgtgaagaaataaaagttaaataataatttggtggagctgtggggaatcaaaccccagtccaaaactcaaatctgcaataattgatttacatacttgcttggattttaaatctttctttattaaagagaacttccaaaaacactttaacaaaggcaacctaaatcttaaccttgcgtttggtagcacaaagcgcatctagctagaatgatgttcttaagagagtagctagaatcctaactaagaacagctccaaaagctaattaaacttacgcaactttagcgtaagcaggagcgtaattcgcgttgtttgcgtttatatttatgaaccagttttacgacttagcacaagtcggtatgcaactaaagaaattcaaatcctgtcgaaattctaatcagccccaaaaattaaaggtttggattataccataaaaaaagaaaatatagtaaaattagctaaaaattttaatggaatgaaaatgagcatacaaaacacaataaaatctatgacaacaacacagattctcaaaaaaaagggcgtggaaaaaatcacaatgcttaccgcttacgatgcgttaatggcaaaaatctttgatggtgaagtggatatgattttggtgggcgatagtttgcagatgagttt

SEQ ID NO: 3772 - DNA, 23072 bp, synthetic construct
  misc_feature 1..23072: note = Synthetic
  source 1..23072: mol_type = other DNA
agaagaagaggatttttataagcctgaaattgcagaaaaaaagcaaacatatcctcctagcattaatgtaatgttaggttttattaaagataaggaccttttaagcataggcattagcgggacattcacacatagcttgccatttggctttaggattcgcgcacattctttccatacgcctaaaagtgctttaatgtaggcattataatcattgattccacccaaaagccatttttggcatagtctttgatattaaaatacggcggacttgtgataatcaaatccacgcactattatcgctcacttcacgcatatcggtgcttgagtggtgtatatttgttttgggggattgcttgtgttgtttataaatcaagcctgtgtgcatccgataggctttttgccgtgctttttgataaaatctgtgatgatgatattttctacttttttgctcggcgggtagctatcctcaaatacttgcccaaagatttcatatcgtggcttttgtgggaaaaaggcatacacaaacacttctaagtttagatttaataaactttgcaacacaaaataattcgttgtcccgcaagtgccgtttttacgatattgagccttgccacaattataactttgtatgcgtttaatgatatttgtcgtagattgtccaattttaaatattttttcatttacaacaaacacatacacaaacccttcctcatcacatttgcttttgtctaaaacctctatatcaagcctttctttatccatattttgttagttcaaagctcccaaattttgggaaattttgcaagattctaatgttgttaaaattcccatagcgcgtaatgttgttgagaaatttatagattggcttatctagctcagcttttatgcgctttgcttcggtgagatttttgcaccgcgctttgcccttgattcaaagttttattagtaactctctactataatgcaagatttatttttgattttagaaggacaaaataattatgttagatagattccacgcgcttaaagagtattttccgcagtgctttgacaaaaacggcgatttaatgccacacaaacttcaagaggcgattttggatttggcgcaagaaaataacgcacaagcaaacacagcaacgcaggatttagaaaatgaagcggcgttttcactctcaaaagagtcatatagcctaaattggcttggcaagtcttatgctaaactcttgcgtcatttgcctacacacacgctgattgcgcaagatagcgcgcacaacgcacagccacaaaatgcaaattctaaaaatgtccttatcaaaggcgacaatttagaagtgctaaaacacctaaaaaacgcttattaccgcaaagtaaagatgatttatatcgacccgccttacaacacgggcaatggagactttatctacaatgacgagcgaagtttcacgccgcagagtttggcgcaaatggcaaatatagagcttgaagaggcaggcagcatacttaatcttacgctgaaaaattctagcacgcatagtgcgtggcttagctttatgtatccgcgtttatatatcgctaggcagcttttgcgtgatgatggcgtgattttcattagcattgacgataacgaacaggcaaatttaaaacttttatgcgatgaaattttcggggaagataattttgtaagttgttttgtgtggcagaaaaaatcgggtggagggcaagcaaagtatttttacgaaggacacgagtatgttttgatttattgtaaaaataaagatttattacaaggtttatttaaaattaaagaaaaaggtaaaattgaaacagactttttgagaaaaatacacggcaaatatacaaataatttaaaactaaaaaatgtttatgaaaaatatccaaatcaacttatagagcatagaaatttaatgtttgaagaaatggatatatttttacaagaaaaactaatcacacaagaaaaatatgatgaaatcaaacaaaatttgactaatggcatttattttttaaaaccttacaatgataaatttaatttagtttgtcgtaataacgaaaataatcaagccttaatgtattctattgtatctggtgtctggacttctgatggcaatactgaaaatgaacaattgtttggaaaacttgtatttaacgacccgaaacctgtaaatttacttaaacaacttatacaaagtgctacaatgcaaggaaactcaaacgatattattttagacttttttgcaggaagcggaacgacagcccaagcggttatggagttaaacgcacaggacaatggcaatagagagtttattttggtgcaattagatgaagctatcgacaaaagcaaatcaaaaacggcttatgagttttgtaaaaatgagctaggaagcgaaaatcctacgatttttgacattaccaaagagcgcattaaacgcgcaagcgcaaaaatcgcgcaaaattcaaatttggatttaggatttaaaatctatgaattgcgtgaaaatgattttgactcacaaaatggtgctttgtttaaagaagttgataaaaacgcattgttagaaagttttagactccaagactccacgcccttgagtgtagaaaatcaaacaatcgatttgggcggatacaaagcgataagggcaggggaaaagctgtatttactcaacagtggctttgaaatgaaacatttgcaaaaactaatatcactaattgacgcgcaaaaagactttgtgataaaagagataagttatcttaatgacgcctttgaaagtgctagaatccgcgaaatagaagagggaatcaaatcttacagcaacaaaaaagggcttaaaatccttgtgcgagggagatttatctaatgggatttagctatgagagaaatttaccccaccaaataaaagcgatagagtgcgtcctaaacgcactagaaaatgcgcgtgtgaatccaaatctcaataacgcttataatccgcttgtagagattagcaatatagatttaggcaaaaatctaaacgcattgcaacgctcccaaagtatcgaatctgccccgataaatccgcaaaatcgcatatttgatatatcaatggaaacaggcacgggcaaaacttatacttacacgaaaatggcattagcattatcacagcaatttaatatgcgtaaatttatcataatcgttccaagtcttgcgattaaggcaaatgcgctaaattttttgtgcgatagtgcgacaaaggagcattttagcgcggagtatggatttgatatagtcgctagtgcgatagaatctaaaaaatctaatagcaagtcaaagaaaaagctaatgccaagtgccttgcgtgagtttgtcgaaaatgatagcccaaaagaagtgcattttttaatcataaacgcccaaatgcttacggcggcttcgatgaatgaggattatgaacaaaacttgtgtgatgaatttagcaatccttttgacgcgcttaatgcggtaaatcctgtgtgtattatcgatgagccacatagatttggcgaggataataaggcgtggaaaaagattgtagatagcacaaaagattctaaagcgataaatccgcaaatgatttttcgctatggcgcgacttttaaggaaaataaaaaagggcaaaaatatcataatttgatttataaattaagcgcgattgaagcatttaataataatcttgtcaaaggcgtggaagtcagcgtgtgtgaagcaaatggcagtgaaaatcaagcatatatagaatttatcggcatagaaaacaatcaagcaacattcgcgctaaaagagcagggcaaaagcaaagcgataaaagaagtggcattaggcgtaggcgaatctttgggcgtgataaatagcaatttatcgcatttgcgcgtaagtataaaatatgatagcaaaacccccaaagcacagctaaataatcaagatgaaaatgagtggctaaaaaagggcgataggattaacttgaatgcgtatttgccacaaatgcaaacacaaatgcttaccgaagcactgcaagcacatttcgcgctagaaaaggtgctaatgcaaagcgagacaaagataaagccgctcacgctattttttatcgaggatattgcaagctatcgtagcgaaaataagcaaaatgagattttacgaatcgagtttgaaaaaatcgcgcaaaatttaatgcaagaaaatctaaaagaagcacacggattttataaagaatatttggaaaaatcattgcataatttgcgaggcattagcggtgggtatttttccaaagataactcaaataaagaagagtatgtcgtaagtgagataaatgaaattttacacgacaaagaaaagctgttaagctgtgagaatataaggcgttttatcttttctaaatggactttgcgtgagggctgggacaatccaaatgtctttgtgatatgcaaactgcggtctagcggaagcgagataagcaaactccaagaggttgggcgtgggcttaggctgcctgtgaatgaatatatgtcgcgcgtggggaatgatagccatttggggacgcattatttgcattatatagtcaatgatagtgagcgagactttgcacaaagccttataagcgatataaacgctcaaagtggcgtgatatttagcgagaatgctacaaagctagatgaaaaaatgaggcaaaaaatatgcgaagtgtatgaaatagccgagtttgatttgctaagcgaattagtgtcaagtgggattgtcgataaaaagtttgattttttagaaaatggtatgttaaagctaaaagaactttatccaaacgcttttgataaagaaaacttgaaagatggtaaagtgcgacaaagtggcaaaacacaaacaaaggcgcatatccgccgtgataattacaaaatcttacgagaactttgggagactatcaaccaaaaagtgattttagagtataaaatcaaaagcgagggagaatttagcgcattgcttgaagtatttttgcgtgaatttatgcaaaatcaagctgtgcaatcaaatatcaccacgacaaccaaacgactagaaatgagggacaatagcgcgagtttgcaagaaattttgcgacaagaaaatgctcttgatagcaaaagtatgcaatatcaagcaatgggtaagagcgagtttttacagcagagcgcaaacgcacttttagtaaatgtggggacattacgcgaagtgctagaatctgtgggctttgaatcgcaattttttaatgcacgaaatattgctttgctaaaaagtgaatttaatagatttttgtttgaaaatgcgataagcggctttgaagtgggctttgctaaaatctctagtgcgacacagccaaacttgcaccctacggctttcacagatacaaatggcaaaccctatgaggcgatagaatcaagcaatttagggatagaatctagcgatgaaatcacgccaaaaaattatctttttgatgagttgttttatgattctgctattgagagagaaaatatcttacaaaatgttgatagagttttggttttcaccaagattcctaaaaatgcgttaaaaatccctgtggcaggtgggataagctacacaccagattttgcttatgttttgaagtgcgaaaatggcgagcagatatattgcataattgagagcaagggcaaagatttgcgtgatttaagcaaggtagaaaatctaaaaatatcccgtgccgaacagtttttggaaaaaagtgggatttttggcgcaaagatacaatttagggcgcaatttgaaagcgaagcaatcacaaagattttgcaagaatttttaaataaaaatgatatttaacagaatcctttttgcttacgaatcgcaaagatatttaaagaaaaatttagattttaggcaaggatatttttttgagagttgaggcgtttagtagatttgtgcaaattagcattgaggaatacaatcccgcacttacgcagattcttaactatgcaaaaaagcattttcagcagatttcacacctgaacttcaaaaagatatgtatataaaaggattcaaaaatgagtaatatttacttctttggtgatacacacggaagccttgatatagataagatttttatgcctagttatcaagcagatgattatattattgtctgtggagattttggcgtattatggagtgatgaaacgggtgtgtttaagcaagatgatatgctagaaaaagaagccaagctaaaaaaacgcattcaaaccttgccttgcactcttttgtttatagatggtaaccacgagaattttaatcgcctaaacactcttaagcaagttgagagatttgaatctattgtgggtgaatatataaaagataaatgctatcatctcaaaagagggaatatttataatataacaggacatactattttcactatgggtggagctttaagcatagataaggcgtggagggctgaaaggctaagctggtggaggcaagaagccattactcaaatggaacttgagaatgctttacacaatatacaaaactataagggaaaaatagagcttgtagtaacccacacttgcccccaaagctttttaagccctttaagcgaacttatcaatatagaccataagattcacgatgagaatccatacaagctagaaaagattaaaaacgctttgattgataatcatcaaaaaccacaattttggatatttggtcattggcatagagatgtgaattttacaagcgatgagatagaggcaaataccttgtatttgcattgcttgaagttagataagcataaaaactttgagcgatttgattttagaaaagagattttttatgccaaaacgagaaatagacataaggagtgattaaatgataaaaataaaactttctactatattatttattattgcaataattgtaagtaatgctaatgcggttttctgtgttgattttgcaacacttaatgtatatgaacaaatgacaaatagtaaatatactcaaggagataatgaaattggaaatgaaataagaaatattacaaatacgataaaaagtgaaattaagcaaatagaaaacaataacaaaacactattaaaaaacttaaagagagcaaaagaggccgaatcaattttggctttgaaaaaaagctttttgcttaaacaaaacaacgagttacaaagcataaataacaatataaaggcaaactagaatgaaaattgaatctgcaaaagttaatttatacaaaccataccaaaataatctttgtatttttttacaagaagaagaggttttgcaaaaattaattttatttggtggaattttaggctgtattcttgctttcttaacttctttttttactattggagaaaatattgccataggactctatatgctaggagtcatatatgcaggaataatgataggactttattttgtaagcgaaacaaaagatacaaaagaagctgttattccaaatgaagcagataaagagtatttactttcacttggatatgaagtgaaaaagttttatggagacgctgttaaaagtggtagagtaaaaaacaataaaactcgtcctttgcttataaatgcagaaacaatgaaacggcactttcttgtaatggcaaccattggagcaggaaaatcagttctaatgaaaggattgatagaacaatatgccgtattgggcggaggttgttttattattgatggtaaggggacagatgagtttgcaaaggaaatatatggagtagttgcaagtgtggggagagaagatgattttgtatatcttaattttttagatatggataatactcacacaatcaatccattattgagcggaggggcgttaagtatatatgaaattcttattgctttattgataggagaagaaaacgaatggaaagaaaaacaaaaagaatttatgaaatgtatcctcaaacttatggtgtataaaagagataatgaaaaagactttgtttttgacttttcatcacttacaaatatgatgagtcttgtaacgctagtaaaaactgcaatagaatataaacatttggcaagatataatgttggaataatggattttgttaaatatgtaagttctaccattgaagtggatataaatgattttttacaaggagataaagaaaataaaaaatgggtagatgaaatgattaaaaaaacaagtggagaggggcaaggcatttatgatgtttctgtatgcgttggagcttggagaaatgttttgacaaatttaagctcagactatggtaggatttttaacgctccaaaccctgatatttctttatgggaagctacacaaagaaataaaattatatttgtaacattgcctacaatggattctgatactactccaaaagagcttggaagattgttgctaggacttattaaaggagtcgccgcccaaaaagcaaaatttgcaaaagaatctaaaattccttttgcttgtttttgtgatgagttgggaagctatgttattgagggatttggaagattagaatctaaaagtagaagtttgggtattagcgttgttccattttttcaaagtcccgcacaaattgatgttgttgcaaaaaatgattatgaaagaaaagaaatcattgatgttacaggcgttcatatattaatgaaaaatatgcaccctgaaacaacagaattttatgcaaaaatggttgaaaaaattaaaacaatgagcagagactatcttaaaaggcgtgatggagctaaaggttctggagcgacagaagatacttttagaatagaagagaaagaagccatagaacataatgaagtagtaaatatgaataatggcgagatgatgatatttgctaatggcaaactacatagagccatagcacaaacggaaacttctttaatggcacttggtaaaaaaacgacttatcaaggaatgagtagcgagaaaattccattagttcaatatgttagcaaaagaatattttttaaaaagactaatgaaattgttagaaaactaggactaagttatacaaatgcagaagcaatgagtaattgaatttatcatcttttgcgtatttttatagaatctgtattcttgcttttgttatttgttaaagttaaatcctgtgtaatgctatctttgagctgtaaagtataatcaatcattacaggctggtcatagcctcgtatgcttttaacacaatgaggtagccaagtgagttgtctgcccattttttcaatcaagtcccctaattcatcatcgctaaatttcgtagtagaatcatagactgaaccctgcatacgcataaaatcatactttgcaagaaaacttcctatatcattataagcattatgccaatcactttcagtgtaatactcttgcagagctttagtatctaaatcaaaggctatggttttaagttttttattgtctattttgccaaatttcattgtctttatctttttgaaagagtgcaatcaaatcgcccacatagtttggattattgctatcgcctagccaatcccaacttttaacattcttagcaaaccaatcgcaatgttttagacaattaaatactaaaatccctaaatgtgcttgtgcgtttttctcgcctctaaactcataatgatttttagatacttttgtaagccctgctcttttagtagccaactcttctatctttgcatacatttcatctaagtcgtagatgtcctctcttagaatcttttcttcatctaattcaaatcgtgtgccaaacatagttaatcctttgtgaaatttacaaaagaaacaaaggggagggcgacaactgccaccttccccctttgcgagtgtgattataacattgtattctattaggaatcttaaagaaaaaatgaagtgtagaagtgcatatgaatacaacgaaaattagcacctatttaataaaattttcaataaaagttgttatcatatacgacaagtaataaagaggtgtgtgtatgaaaatatatagctttgacatcggtgtagcgagcattggctgggcgtttatagaaaatgaagtgctacaagattgtggtattagaatctttaccaaagcagaaaatccaaaaaatggagcctccctagctttgcctaggcgagaggcacgaggagtgcgaaaaagattagctaggaggagagggagattaaacaccataaaacaattactttgtaaagaatttggattgcaattagaagattatttgagtaatgatggtgaattgccaaaagcctacactgcttctaaagctaaccctttgaaatccccttatgagctacgcacacttgccctaagtcaaaagctagattctaaagatttggtgcgtgtgattttacacattgcaaagcaccgtggctatggtaataaacacgccaaagacagcaaagacacagaatctggcaaggttaaaaaggcaatagaatttaatcgcaagactctagcagaaaagggttataggagtgttggagaatatctatatagagaatttttccaacaaagcagaatctcacaaaataacggtgcaacagaatttatcaatgtgcgaaacaaggctggaaattacgagcattgcgtagcacaagatatgctaaaagaggaacttgagagcatattgaatgcacaaaggcagtttggattcagtttaaaacaagattttgaaaataaattgctaacaaagatttttgaacaacgcccattaaaaagctttgctgataaagttggaaattgctgtttcatcgctggggaaaaacgcgcaccaaaagactcgcctagtgcaatagagtttatcgctctatctcgcactatcaatactcttataaatctctcaaaagaaagtggtgaaatatacaatagagcgataattttacaaatcgtagaatccacactcaaaaagggcgaaataagctacaaagagctacgagaaataataagactagatgagcgtttaagatttaaagatcctagactagattatagtagagagataaaagaagcagaaaaggtaaaattcttagaatttaaacaattgaaaggattcaaaaaagccctaggagagagttttaccacacttgcaatatcacagctagatgagatagcagagcatattgcattgattaaagatcgtgtgaaattaaacgagaagctagaatcttatgcgctcacaaaagagcaaagagaagccttaagtaatcttagcttttctgcacatatcaatctaagccttcaagccttgaaacagattctaccctttatgcgtggagataatggagagcagtgcttggactatgatgagtctgtagaaaaagcagggttaaaagctctaagcaaagatactttaaaagggcagatgctcccaccgcttaatgagtttgaaccatatctctcaaaccccgttgtagcaagggcattagccgagtatagaaaggtgttaaacgtgctgcttaagcaatatggtagcccccataaaatccacatagaatacgccagagaagccaagctaagtagcacagagcgacaaaagtatgaaaaagagcagaaagataattacgccgctaatcaagctgcccacaagaaatgccaagagttagggcttgagccaagtagcaccaatctcttaaagctaaagctttggcaagagcaaggagggttgtgtctatatagtggggcaaaaatcacaatctcctacttgcaagatcccaccgcattgcaagtggatcatatctatccctactcgcgtagctttgatgatagctatatgaataagtgtctagtccttacaaaagcaaaccaagaaaagggcaaccgcacgccttttgaagcctttggaacagactctgccaagtggggagttatcacaaccctagcccaaaagctcccacacaaaaaacgccgtagaatcctaaacacagcctttaacgataaggaagcaggatttaagctccgtaaccttaatgacacaagctatatcgcacgccttgtagcagattatactgaaacatatttggagtttttgcccctagttgagagtgagaacaccacgcttagcaaagggcaaaaggggagcaaaaagcacattgccattgtcaatggtgtgcttactagcacgatgagatattatctaggctttgctagcaaagatagggataatcacttacaccacgctcttgatgcggtgattattggctttatgaatgatagtgtgataaaggcttttagcgatttcaaaaagacgcaagagacaagcaaagccgcctactatgcccacactctaagtaagcaggagtataaaaaacaacgagcttttatccaactcccaagcggcgaaaatttccgcgtaagcgtgctagaaaaagtagaatctgtctttgtttccaaaccaccaagaaaaagagtgagaggggcattgcacgaggctaccttctactcgccaaatgaccccaaactgcttaaaaactatggtgggacaaagggcgtggaaagggcattagccctaggtaagatgagaaaagttggcgcaaagattgtaagcaatggcgcgatggtgcgggtggatatttttagacataaaagtagcgggaaattctacggcgtgcctgtttatacaatggacttcgcgctagggattttgccaaataaggcagtagttgttggcaaggatcaaaatggtgtgattaaagattggctagagatggattctagctatgaatttatattttcactctataaagatgatgtgatcttagtgcagaaaaaggagatgcaaagaccagagctatgctactttgtgagttttgatactagtggtgcgagcatcaaagtagcaaaacacgataataacttctccacactcacagagaatcaaaaactccttttcagcaatgctacaaaagaggaagtggtgggtaaaagcattggaatccaaaatctcaaagtttttgaaaaatggcaagtctcagttttaggtgaagtaaaacgcacacaatcatacccacgcgaaaacatatctcttgcctctaaagcaaagaaataaaatgagttttgatgaagcctttagaagtgtcttggttagctctgaagcaaagcttagtttgcaggcaaatcacttggtgctaaagcaaacaaataaagaggcaaaactttttctcaaagatattcattttgtgattttagaatctccacaaattcttattacttccgccttattaagtgcctttgcaaaacacaatatcgttcttttgacttgtgatgaaagtcatcatatcaatggcattatgcactcatatttggggcattttcagcacgctaaaattgccaaggaacaaatgatggtcagcactcataaaaaagcgattgtatggcaaaaaatcgttaaaaataaaattacaaatcaagcccatatcttaaaattacaccacaaatctaaagaaagtgatgaactcttaagttttgctaaaaatgtttcactgggggattctagaaatttagaggcagttgcagcagcaatatattttaaggccttatttggcaaagaatttcacagagatgaaataaactttatcaattctgcacttaactatggctatgcgattcttagggcttgtatcgtgcgaaatgtctgtatcagtgggcttattacttggctaggaattaaacacgacaatatgtataatagttttaatctttgtgatgatttaatagaagtatttcgcccgtgggtagatctatgtgtgcttaaactgaatacgctagataaagaagcaaccttacggccaaacgacaaacgagagcttattaatattttacaacaagcagccttaatagatggccaaaaacatcctttgagccgagccattggacgctatattcaaagttttagatcggcgttattgggagatcaaacattaatggttgtaagttttgaaagttgaagataaatttatgcgcatactcttaatgtttgatgtgccaacaaaaacaaaaaaagaacaaaaacaagctacaagatttcgaaatgaactcatcaagcttggcttttttatgatgcaatttagcgtgtatatgaaaatatgcaaagggttaagctcggcaaaaagctctctaaatgttgtaaaaaaggtgcttccaccttatggtaatgtccgcgcacttatcatcacagaaagacaattcgacaatatagaaatattattaggaaacccatcatttaatgagaatgttaatgaagataaaaatcttgtgctatttgactttgacgaaaatgcgggtgattaccgctatggtatggagtatcaaaaacaagaagaattgaatacaactactacacaaccaaaacaaaaaatcaaaaataggcaaccaagcctatttgaattctagggttttgatagggatatgatttaccctgcggaagaccccttactcccttattttagtcccttcttaaacttctatgtcgcgaattataaaggatttcaggtaatttccagcttaaaatcctttgaaatccctatctataggcaccaacagagagcctattctagcatatagaagtttaagaagggactaaaacttaaaactttatttgaaatatagaattactattctagcatatagaagtttaagaagggactaaaacattagaaaaagaaaactacgaacgacttttattctagcatatagaagtttaagaagggactaaaacgcttagcatacttgctccaatcaccgctccattctagcatatagaagtttaagaagggactaaaacataagaaacagcattccattacactttagaattctagcatatagaagtttaagaagggactaaaactaaaaatttcaaaaaggagaatctaaattatattctagcatatagaagtttaagaagggactaaaactaaaaatttcaaaaaggagaatctaaattatattctagcatatagaagtttaagaagggactaaaacgatgaagttatcgacaaaagcaaatcaaaaattctagcatatagaagtttaagaagggactaaaacaggaagcggtatatatccccacgaaatgtaattctagcatatagaagtttaagaagggactaaaacgatacactcacacattccacacctagaatcattctagcatatagaagtttaagaagggactaaaaccttccaagaaaatgaaaagattctccaattattctagcatatagaagtttaagaagggactaaaacagcgacatcggggattgcaccgagtccaagattctagcatatagaagtttaagaagggactaaaactttagacatccgcgacctccgccttgcttctattctagcatatagaagtttaagaagggactaaaacatgcaaaacaacattaactctttgatcagaattctagcatatagaagtttaagaagggactaaaacgaggttctttttgcaaaaaaacaaatcggcattctagcatatagaagtttaagaagggactaaaacaagcgcaggcattgtatctgcccttaatttattctagcatatagaagtttaagaagggactaaaacgctagtgattgtttgactcgcaggactcccattctagcatatagaagtttaagaagggactaaaacacgtacgactacgacttggacattgacaatattctagcatatagaagtttaagaagggactaaaacgtcccacctgtattttttagtagtaacatagattctagcatatagaagtttaagaagggactaaaacacaaagttactataatgcttatcaaaaggaattctagcatatagaagtttaagaagggactaaaacaaatcattctgatggcacattaaagcttagattctagcatatagaagtttaagaagggactaaaaccaaaatccccgctgatgtcctcccatatctcattctagcatatagaagtttaagaagggactaaaacataggagcaagagactcaaataaatcctctattctagcatatagaagtttaagaagggactaaaacctatttgagaattctactcgtaatgattttattctagcatatagaagtttaagaagggactaaaacatatgtctcatcatttataaatgtgcgtatattctagcatatagaagtttaagaagggactaaaacatgacacaaataattataatagcgggattaattctagcatatagaagtttaagaagggactaaaaccacaacatcggggatagcaccaagtccaaaaattctagcatatagaagtttaagaagggactaaaacgccgaaatcgctcatcttattggaatttgtattctagcatatagaagtttaagaagggactaaaaccaagagctttatgctacaaaagacaacaaaattctagcatatagaagtttaagaagggactaaaactatcgccgccgaaggcgtcgtttttcttttattctagcatatagaagtttaagaagggactaaaaccatcattggttcgtcccttatcgtcttttaattctagcatatagaagtttaagaagggactaaaacccaccgacacttccattaccggcttttctaattctagcatatagaagtttaagaagggactaaaattagtgagattgaagccaattggatacgaataatggcagagctagagacacaagatggcgatagtaacacttcatagagtgtggttgagtcaaagcagaattttaatgccctaaatgactttaaaagttatgctgatgaaaatcaaaagcaaacaacaaatggcttttcatttggctctgcgttttctaaattgaaagaaaagggcattgaagcaaaagaagccattgaaaaaaagcagaatgctagataaggttaaagaaaaaacaagtgagctgacaaacaaaggacttgaaaaaggcaaaggattgattgaatctcaaaaacaaaaaggggctaacaatgagcgagattaagaataaaacatttgaagataagtacaatttgttgggcaatacactgctaaaagttaatgatattttatctagtgattttaggagagagctagaatctttgagtccttcttctatgagtatggataaaaaacttttattgttttcgctgtatcatcttatgaatgatgattatcttttttacaactttaaaatgttgcttaaagaaaaggtagcccaaattgctgaatgttactattttaattttggtcttactgattttggactttgcgacctgccgccgcaagatttaccgcgagatttataagataaaacactagacaacaaaaacaaagcggtagataggatagacaataagaaattgcaattttagaatctcaattagaagacatacaaaaaagcataagaaatttacaactaagtttagattctacaaagaaaacattgcaaaatctcaaagatattgcgtgggatagagattctaaaaaagaaagtagcaagatgtataaagtgctagagaatgataagcctagcactattgtaagaagcaatgtgggagatgtggttgtagatagagagtttatggaaaaagaaatccaaaaacaccttgataatcctgcactaaggggaatggtaaccacagaagaaatgctctcttatcctaagatagctaagaatgtggaagcggaatataatgcagaaatcaatgaccacacctggaaagtaaaagcaaacgatgaaagtgttttggcttatggaagtagagaatatgtcaaagatgataaagaaatcaataggcttttaaccgcccatagcaaaacagaaagaggggaaagaacgcagaggcaagcagacagggtcagctctgctacctattttaacgaccccgattttcgtggctctgcttccgctattataccacaatcttccaacaatgatgaagaaacatatatgattcctaatcaaaatacttctcatacacattttattacacaagattctatttctaatctttcattagaagaacaaatatctctggccaaagaaaatcaaaaaacactcaatgctatgccaaaagcaagtgatatagataaagatataaataaagacaacacacaagagaatacacaaacacaagatactacacaaagagtagaaactcaatctcaaaaatcaacattaaggagaaaatgatgaaacaaaaaacacttctagcaactttcattgttgcattaataggattaaacaatgctaatgcttttagtttatttggaatggagataaaatctcaagccgaacttgctaaagaacaacaagaaaaagctcaacaaaagataatggagctaaaagcaaaagaattgcaagaacaggcaaatagggaagcaagggaagctcttgaaaagcaatatcaaaatcaacaagcacaaaccccacaaaacaatcaagcaataagccaacaagcaagtaacactcgtggattgggagacattatagggggaggaaatataggaaatattgtagatggagctttaaatggcaacttaaatggtgctttaggaggagttttagattctgttctaggaaaactagactctcaattttcaaatatttttagcaattccttaaatttcataaacgcttgttatgaaactgatttaaaacttgatatagacttaggtatagatacaactgatgtatgtgctatggcttcaaaacttgatgaaattaaagttaatatatgctctcttgtcggaggaagtggcactatgaataaaggtgtaagcggttttcaaagtctgtgtgaagccaaacaaaaagaatttaaagattatgttagcagacaagcaaataactttgctgaatgggctacgcttcaaaatggagaaaaaactactgattataatgcaaaatttgcaagtggattatctgtggcagattttgattctaaatgggatattaacaatcttttgaaaaaagatagcaccataagcaaaatgcttaaagatggaaaaatgaaagagatagaaatgtttatggattatacaaaaagttatggagctaaaaaagatatagaatcaatcaatatggaagatattaaagcaccaagcagtatgaatgattatcgtagaggcatagacgatggcattaaaaataatagaactattatcaaaaatgccaatccaagtcaaagtgcctctttggctcgtgcaaaattaagtaaaaacaacaaagaagatatgcaaaaattatcaaatcaacttaaaagcgattacaataatgcaaaaatagcagaaataggcaatgcattagctacaagtgattataaaaaaattgcaattcctacacaagactatgtcaaactcttaagaaaagacttgcaacctggagctatcgcacaaataagaagacaacaagcacaagaagtatcactgatttcacaaattgaagaaaaatgggagagaaaatataacctcgcaaaattacttattgataaagaggtgattttatctcaaaaatttgatgaaacagaagcgagaaaagaagttaatcgcattgtaaatagcaattaaaagggtttaaaatgaatgaaattgaaaacaaagaaatagctactatctctccgcaagaagagactatacaaaaggaaacaataactaacaaaaataatgttgaagaaaaaactaaagacaaaaataaaaagcaaaatgaaaaatccaaaaagaatgcagtagcaaaagacccacacaaagaatcactcaattttcactgcgaacaattttttggaaaaaattggaaatatatcgcttcattcttaggtattgctatactgatttttgcatatgagctaaatcatatcagcacaaaaatgaatgatttagagcaagtagtcttagaaaacaactcaaaggttgttttaacaacaagcgatggaagagcaattaaagtaacaaaagagccattaaaagccgaatatttaaaacaatttgccataagcacttatgtcaataatcttattgtgtctcgttcgcaactaacgaataattttcaagcctcacaatttaaagattatggagaagtaatggataatgttccacaaattagaaatattcttacaaattttatggattataaagaagatgaagagaaaggcattcaagtcaatcaagtagcagttggagacttaagagcttatgttcaatggttaatctctgctaccgcacaagataaactgcctgaatatattgccattaaagattatagtgtagaaaaatacgaatacacaggcaataaatttagcactgaaattatcattaaagttgtagcacaaagttatattcttagcgaaaataattacaaacaacaaaatggtaattttaaaattatcagtgagggaagttttgacctaaacaaatcaagcgatattaatccttacggattaagaattgaacgcattaaaatagagcctattgttaaatcaaaaactagctaaggaaacaagatgaataaagaacaacaaggaatctatgatgtaacatttggcgacaaagaaatgacgccaatatttaaagatattgaagctattgaagacgcagtaattgaatatatcacaatgtatgttaagggatttcacgataaacgaagagacaaaggactcggagcggaacatattaaattacatttggataaaggctctcaaggcgaaattactttagaagagcttgtaaatcttgggtattcaataagagaatatctaaaaaaatttgaaaatccatttttggaagaaaatggtgcgaaaatttatgaatgggaaaacgaagaacatacgagatttagagtaatcactgatattcaaaggggagggcgacaactgccactttccccctctgaacaccaaattataacattctattctgatagaaatcttaacgaaagaatggaatttaaaaatccacttgtaaaagaatattatgacaatttgcaagatgagaatgaaaataatcaatctcacattgcaaaaataaagaaaagaagatgattaaaatcaaacaaggagtttaaaatggaacaagaatataaagacaaaatagaaaaacttaatagcgacttaacaaaactcacacttgatttacaaaaggaagtcaaagagcttaaggaagacacacttgttaatggacatattgataatactgcaaatatgagctttgccttagcagaaattagtgaagaacaagaaagtagtaattatgaaaaattcttgaaaacactattagaatctgattttaaagccctgcaacaagaaatgattgaagaaacaaaaagagaacttttaaccaaaaaagtttcaaaaaatcagcaaggtggatttaaaattggaatgatttttaatctctttggacttttaagctttttattaactctatggatttgtgcgaaatataagcttttgttttttgcataaggaaaaaaaatgaaaagttttaagaaagaatataaaaatatcaattatggagcatataatatacttattgcaatagtagatgatgaaatttactttaagacagaagacattaagaaaacactaaatcttgatacatacaaagaatagatgtcaaataaaacaaaattctgtggcattaattctgcattagaattaacaaaatctagctccgtatattataaaaatggctttgcactttggctggagtatgaatataatcttatgaaacacgatattttataactgaaaagggagttgttattaatgtatgaaacacaatattcttgttatgaagacaaaacatataaggattaggtatgagccatatttcaagcataaattttaaaaagtcaaaagattttcaagtattccataacgcaaatattcgccctaattatgcaataggaacggaattatcctacaatcgcaaaggctatgaagccctaaaaatcaaacaagagttaatacaaaatgccatagaagcctataatcgcacaaaaccccccaaaagctccaaatttcaaagctaaaagttacgagtggagtagtgcagtttgcaatatcaagcctgataccacaatgcaagatttagaaagacttgcaaagcattttgaaactaagtatggattccaatgctaccaaatcgccatacatagagatgaagggcatattgatgataatggagagaaagttatcaatcatcacgcccatttggagtttataacgcttgataaagaaagtggcaagagcttatttcgtgcagaattgcaaaaacctaaagctctgcgacaaatccaaaccgaagttgccgagattctacaaatggagtggggacaagacaaacgcatcagcaaaagagaacgcatagagccacgcaaatatggagctatgaaagaaaaagagcgtgaagctctgcggaaacttttagacttttatgatgagattctaggaattgatacaaaaggattgtctatcactgaagcacaacaggcacataaaaatcttgtaaagaaaacacaagaaaaaaacatattaaaaggcatagataatatataatattatagtagaacatataatattatatactttgctatatttatctatcttatattatatatatcaaataaatgttataatgataaaaatctcttacatcaaaggagtttcaaatgacagccatatctacacaacacacacaaagacgctcattattaggcactagaattgtattagatgaagaaaagattctaagagaaaacaaatacgacttagatagaatgtatgagattattgatgaattggctaaagaatctggacttataaagatagataaacacacctatcattgcaaaggcaatgataaagacttggcgtgtttaggcatatttgtatataacaatcttattgattgcaaatggttcactttgaatgttaaagaatgggattggataagtgaaaaagaggggaacgagactcttattggcgatgatatgggcgtttggcaatgaagaatcgtaaagccctaaactttgatttatctacaaatgaacttaaaaagcatttt

SEQ ID NO: 3773 - DNA, 23024 bp, synthetic construct
  source 1..23024: mol_type = other DNA
  misc_feature 1..23024: note = Synthetic
tagaagtgagttctccaggtattgaacgcacattaaaaaccaaagaacattactgcgatgccattggagaattactaaaagtaaaaacttttgctaaagaagagtttaaaggtaagcttttagctgtcaatagcgacaatctcgaacttgaaaataacatcatcattccccttgattctattaaaaaagcgcaaacttattttatatggtagatgataatttttatttagaacttgctatcaaggaggcttggaaaactcaatgccaaaccctacccaatccagctgttggtgctttaatcttagatcataatggcaggattctagccctacaagcacaccaagaagcaggaaagcctcacgctgaagtcttagcgcttaaagaggcttactttaatctcacacaagattccaatatactccctttagaacaatccattcaaatacacgaatatttaaaacaaaaagctcatagcttattccataatgccactctttatgttactttagaaccctgcatgcacgaaggcaaaacgccctcgtgtgccgcactactagaatcattaggaattaaaaaacttattattggcacaaaagatcctaacccaaaagcacagggtggagcagaatatttacaacaaaggggatgtaaaattatcaaagcttgggaaaataaagaacttcaaaaaagctcaattttagctaatgatttattgttaccctttaattccttacaaaaaaaagggaattttatactttttaaatacgcctgtagattaaatggcagtatcaatggagggcaaattagctccaaagaaacacaaatttttatgcataatctgcgttgcaaacttgatgaactcgttatttcaggtaaaagtgtgttaattgataacccaatacttgattcgcgtttcaattccctacaaagccaaaaaaatcccaatataaccattcttacacgcaaaaacgattttcctcagactgcgccacttttttctatcccaaatcgccaagttagaatactacattctattccaaatttttcaggctttataatgtgtgaggggggaataaatcttctccaaaacctcctacctcaaatagatatgttacttgtctttttaagccctactctatccacctatgatctagcacctcatttcaatgcaaattttaaactccttcatagtcagccaatcagaaatgatctagccctatggcttttaccaaagaaagagtgctaattcatcccctaaaaaataatccttagcatagattctccctgcccttttttcaacctttttttcttttaataaaatctctaattccttttttttggtaattctatcctctagcaccccaatacaagatcgaaatccaagaaacaaatgctctaagtctaaatccctttgacttaaagtctcttgcgtatattccgccccttttaaataatcttcaatcccacaaactccatagcttctcacacccgctatgcaacccacaccccctgctccaacgcccaaataatccttttgttcccaataagctaaattatgtttagattgataaccgcgtgaataattactcacttcatattgcaagaatcctgcctgtcttaattcctctcttacaaaatgccccatacttgcaaatcctgcaaactcgccactaaattcttgtttcttttgggtaaaaaatcggcttccctcatcaatgcttagttgataggcagaaatatgattaataggcaacttggaagccatttgtatttcttgttttaaaagatcttgattgcaaaaaggtgtcccataaattaaatcaatactaagattctctaagcccactttggttgcattatcaatagcttcaaacacagaatctactctatgattacgctccaaaaatcgtaatttatcaacaaaaaaactctgcactccaagacttaagcgattaacccccatttgttttaattctctaatccactctaagcttagtgaattaggattagcttcaatattaatctctatatcttgagtgaaataaggctctagaatcttaaaaatgctacgatattggcgcgattctaccacgcttggagtgcctccgccaatataaagagaagtaactttagaaacaccaaaatgaagcaacttattctgcaaatccctaacaagtgtctgcatatattgctctttgagatgatttttatttgtttttgaattaaacgcacaatatccacatttgctatcacaaaaaggaatgtgcaaataaactgcgacttccaaatatattcctaaagcatcatattaaaaatttcatcaccacaatttcactcaatatcacttggttaagtttcaaaataaaaatattaatattaaaaatgtaaaaatatatgaaaatgatagtgttgcagtaatggcagagaggaagggattcgaaccctcgaaggcttgcaccttacacgcgttccaggcgtgctccttcaaccactcggacacctctctaaaaataaaagcagaattttacactattaaaaataagaaagcattgaatcccacaaagggattctaaaagttatttagttgttgccatttttctacgcaagtaagcaatcttactttgtaagggtagatttttagggcaaacatcgtggcatgcaagtaagctcatacaaccaaacacgccattatcatctcccactagctcgtaataatccgcatcggtgcgttgatcgtgtggatcaagcataaaacgcaccacgcgatttaatcctgccgcacccacaaaatcttcacgcattagctttgttccacacgcggcaatacaacaaccacattcaatacatcgatcaagctcaaaaatctcttgtgctacttctggctcaacacgatcttcaatctgactcatatgttcttcacttttttcttgtgcgtgaatccaactctcaacgcgtttgctcataccattaaaccaatttcctgtatccaccgataaatctttgataagtttaaaagcagggagtggcataagtgtgattacgccatctggaaaatcttttgtcaaggttctacaagcaagtctagggcgaccatttatcatcattccacaacttccacaaatacctgcacgacaaacaaaatcaaaactcaaatcaggatcatattgctctctaatcatatttaagacaatgaaaattgtcatcgaatgtgcttcttgcaatttgtattctgcaaaatgtggttttgaaactgcactatttggattaaatttcaaaacccgaatagttaaggttctgttgctactttctactgctccactcattgtttatctcctattctttgattgcgtgctttgtaatatggttgcaattcaaatggcattaatgcctcttgaatctcatagcgatctttgccttctgcttccatttttgtgcggatattgtcgatttcttcttgtcgtctcaaactctctggattttcaataatcattcccttggctccatatccacggaatcctggtgcaatttccattgtggcaatatctaatggctcataagtaacggttggcaaagtttgatcaggattttcccaagaagtcaaagttctcttaagccaattcaaatcatcgcgttttggaaaatcttctcggctatgtgctcctctagattctgtcctatctaaagcaccttttgcaacacaaagtgcgatttttaacatttttggcacacgataagcttcttctaattctggattagcgtgcattctcttagttttaatgctaatgtttttagagcgaatataaagtttttctaattcattaacagcttcttgcaaatgcgatccatctcggaaaataccaactttatcacccataatttgtttcattttgtctttaatttcaaaaacattttctccattttctcttgccaaaattgattcaaggtaagcttgttgttttttcaaaaattcttcaacaaattctgtttgaatatccacataagtttgctgacaactctctgcaaaataatctccaataatcataccgctcaccaccgcttcactcaccgagtttccgcctaatcggttaaatccgtgtaaatcccaacaagctgcttctcccgcagaaaaaagcccttttaaagcactttctcccttatgattagtgcggattccacccatacaataatgttgcattggcttaactggagcccatttttcggctggatcaatacctgcaaaacattcacaaatctcttttacatctcttagattagtttcaatatgctttctacccaaaatagaaatatctagccataaatgttcgccataaggagattttacacccttaccttcgcgtattctttggagcattcttcgagcaaccacatcgcgacttgcaagttcttttttctcaggctcataatctggcataaagcggtatccatccacatcacgcaatactccaccatctccacggcaaccttcggttaataagattccacttgggaaaagtcctgttgggtgaaattgcactgcttccatattaccaagctttgcaatccctgtttcaagcgctatggcacttcctgttccttcgcagattactgcgttagttgtgtctttatagattctaccatatccacctgttgcaatcagcgttcctcttgaaacataggcaatgagttctccagtaataagatctctcacgattgctccatagcatctaccatctttatggataatagcaatcgcttcttttctatcgtgaatatcaacattatgtttcaaagcttcattagctacagcaaataacattgaatgccctgtagcatcagctgtgtagcaagttctccattttttagttccaccaaaatctcttgaatggattaatccatggcggaattcttcttctgtaatagttgttttttgtgcgttaataactgcggttctatcgccttttttaattcttgtccaaggcaccccccaagcagctaattgccgaatggcttttggtgcagtggttacaaacattcttgctaccttttgatcacaaccccaatcgcttccttttaccgtgtctgcaaaatgtaagtcttcattatctccatcactcatttttgagttaccaagactagcttgcatacccccttgtgctgcggcagaatggcttcgcttaacagggacaagacttaaaacaatagtactcaaacctctttcttgacaggcaactgcagatctaagtccagctaatcctccgccaattaccaatgaatcacaatatattattttcatctaaaaactcctataaactttttccaagcgcaatccaagtgaaatccgcgataaaagcaataactccaagaataataaaaattgaaaatatcgcaattttaatgttgcgtcttttgatattgctttgtgctgttgttggcgcttcaagtggaacccatttgataatcacgcgatacaatccaatacttgcgtgcaaaaccataaccacaagcaaaacaagataaaactctgctaaattaccttgaacaaatcttgctgctgaattaatcgcattaatttctgtagaattaaataaaatagttactaaatgcgcacttcccaagaaaaacaaaataaagcctgtgagaaattgaatccaccaaagtgttgtatcgcaatgtttcattaagcttttatgtgttttaaaaagcataagttgttgaaaattcgctgggaattttctcattgccaaaaaggcgtgtgttacaaaaaatgcactaattataatcacaacaaaagtagtgattataggaataccttttccaaaaatcaaagatccttcgctaaaagcaactaccgcatcaaatgcttcaaccccaaaaagaatcgacgatgtaaaacacatatgaaacaagataaacaccgccaaaactagacctgtgatactttgccatttatcccaacgcgccggattctttcttttttttctttctgaagttattttaagataactttgaataacgacttcatcattttgcataaaatcctcctaaaagtagtgaatatgccaagtgccaacaagcacaaccgccccttattttataaacctaactaattataaaacaaaaaatgaaaaaattccataaatattttactttttatgaatttgcaaaaatgcttcaatcacaaatcaaacaaaaagtatcactcttgcttaaaactaataaaagattaagtttttatagaatataaagagattaaaaattacttaggagaaaaaatgcttccctttagcgatcaaaaattattaaagccagtagaaattgtgattgacaaagttcgtccgatgcttattaatgatggcggaaatgtaactttgcttaaaattgaaaatggtaaagtttatgtgcgtttagaaggtgcttgtaaaggctgtccaagcagctcaaaaacacttaaatttgggattgagagtgcgctaaaaaatgaaattcatcccgatattgaattaattaatgtaggctaatatgcgcttaacccaacaatgctcaaaatatttaaaaaaagctcaagaatcttttaaaaaaggaaaatatccagaatgcctaggattttgttctttagctagtgggattctctctgaaattcaagataatcctagttttattgccaaaaataaagtttttttacaaatgctgacaatgttagctgatatggcattagaccataaagatgaagcaacaagtttatttgattattaccaaattattaaagattccaaaactcccaatgcacaacaagaaattattacaatgatagaaaattttgacaagaatatttttgcacttaatcttgccattcaaagtattcaagaatctgatattgataaaaatgacggaatcttgtataaggattttcaaaaaatagctgatgatattggtttcaaagaagcttttgaagatttaatgtttagcacgaaaattatttttacacacaaaggcgattttttattttttatgcaaaatctcgttgattatggcttcaaagaagttgcaatgaattattttgaaaatattggcaatattctctttttggataaagattttctaagaatctacaaacagattcttaaaacaggagattatcaatgaaaattgtgttagaggattctaaagattttaaatttttaagcgatgattcaagagaagtctctaaagattgtgccttttttgttacacaaagctccaaaaaatatctcaaagaagctcaagaaaaaggctgtaagttttttgttacccctaaagaattatcaagctatttaaaattaaatttgcaatgcattggcatcacaggaacaaacggaaaaactaccaccgctgcaatgatttattctatccttttagatatgggctataaagttggtttgcttggaacgcgaggattttttattaatggaatccaaaaacgcccaaaagggcttacaactccctccacactagaaatttacactgctatcaatgaagccaaacaagagggttgtgaattttttgttatggaagtaagctcccacgctattacccaaaaccgaatcgagggcttagagtttgcactaaaaatcctaactaatatcacaagcgatcatttagattatcacaaaaccctagaaaattatatcgcaactaaaaactccttttttagcaacccaaatgacaaaaaacttatcaacaaagatgaaaaaaacgcccaatatccactacaaaataccctgacttatggaatcgaatcaacctccacttttagcatcaaagcctatagcctaaaaggtggaatcaccgcacaaataacctatggtagccaagtagccactttggattcgccactccttggcaagcacaatctctataatgcacttgccgccattggcgcagtgcaaatgctaacccaaaaacccctgcaagaaattgccaatcaattagaaaattttgggggagttatggggcgtatgcaaattatcaaccaaaagcctcttattgtcgttgattttgcacacaccgaagatggaatggagcaaatttttcaatcttttctacatcaaaaaatcgcagtactttttggagcaggtggcgatagggacaaaacaaaacgcccaaaaatgggattttgtgcaagtaaatacgcacaaaaaatttatatcacaagcgataatccacgcaatgaagatccaaaaaccattatgcaagagattctaagtggaatcccacaaagcaaacgctcaagagttattttagaagaaaatcgtgctttggctatccaaaaagccattgccgaactcaaagaagatgaagtgctgcttgtgcttggaaaaggcgatgaaacttatcaaattattggtgatcgcaccttacactttgatgattcagaagagataaaaaaagcgctcaaagccaaataagactaatccaaaaactctataattccgcgttttaagataattttattttgcttttctaaatcttttaaaactcttgaaacagcctctctagcacttcctagtgcattggcaatttctccgtgcgtgatataaagtctctttttattatccccattagctttaagtgcatcaagcaaaaagttaaagactctttgatttaaagattcaaaagccaaagaactaagcgaatcaactaccttgcttaatctctgcgacaccaaatccaagtgaaattgctttgccttagggtattttaagctcaattgatcaaatactttactaggcagaatccacacgctagaagtctctacaaattctaaattcacttcaaaagtgatatttttaaaaatacaagaagccgaaagaatgcaataatcgcccttatggagtgtaaaaagattaatttcttttgcataagaagaaataatataagccctaagtgcgccatattcaatcaaaactaacccgcgacactcatcttctccactagcgattctctgtccttttgcgaaactcttagaataaactctcttgcaataaatctccctatcttctttggagacttcccatttttccattaattccaatattgtttgttgcaaattttccctttagagactttgaaattctatattttgtcaaaattcgccttacaattcactaaacagttaaacaaagacaaactaatcaatttcacattcacaaaccaaccaagcaaaaaggacttaggctattagttttatatggattttaaatgagtctttatctaaaaagcatcaaaagatataaaactgctataaagaatctttgaagtttcacttgatagaagcagaatcttaaaaaatacaaatcttaaatttctttatggtaaaatattacagagcttagagtagaaaaagtctatgttttagtcccttcttaaatttctttatggtaaaataaaaactgcttttagaatggcattgcaagggttttagtcccttcttaaatttctttatggtaaaattttaaatccgatagcaatgcattaatttacgttttagtcccttcttaaatttctttatggtaaaattttaaatccgatagcaatgcattaatttacgttttagtcccttcttaaatttctttatggtaaaatttatacctaaaaaaccaagaaatttagggatttaagtagaaaaattagtgaaaaatatgctaaaatttttctaaagaaatttaaaaagggactaaaataagtggttttcggtaagccacgcaggattaaaattccttttaaaaccgaatcttttaagcttattttattagcaatagccattaaatcaaaaatattttaatagcttttgcattcaaagaataaaattaatcactctacaaactacacaaaaatatcaaatgtgcaaaatcaacaaagtttttattacttttaaacaaatataatcctaattgcttttttcttttaaattttatgttaatatctaaaaagacagaaattgcaaaacaaaaaaggattaataatgaaagttttggggtttgatattggtattaattccattggttgggcatttgtagaaaacaatgaactaaaagattgcggtgttaggctattcactaaggcagaaaatccaaaaaccaaagaatctctagcacttccacgcagaaatgcaagaagcagtcgtgtgcgattaaggaggagaagaagtcggcttctttctttaaagcatattatttctaaagaatttggattgcactatgaagattacatagccttagatgggaatttacccaaggcttatacaggaaagatagaaagcatttataaactaagatatgaagccctaagccaagcaattagcaaagaagatttagcaagagttattttacacatcgccaaacatcgtggttatatgaataaaaatcaaaagacatcacaagatagtgaaaaaggtgctattttaagtgccataaaagaaaattcaaacaagattaaacactaccaaacggctggggaatatttctacaaagaactttttgaaaacctaagagatggaactaaggaattcaaaaatatccgcaacaaagcaatgaaaaacgaaaaaacaggcaatatggaatcaacttattacaataccattttagcaagtgatttagaaaaagaattgaagctgattttagagaagcaacaagcttatcataactatagcgatacatttatcaaagaagtcttggagatagctttttatcaaagaccgctaaaggatttttcacacttggtaggatcttgcactttttatgaaaacgaaaaaagggcttgtaagaattcatatagtgcttgggagtttattgccttaggaaaaatcatcaacactttagaaagcatcaaaaaagacacaggagaaatattttccaatgaaattattacacagattctaaaggaagttctagacaaaggaagtctaagctacacaaaacttagaaaaatgatcaatttagatgaaaaagtgaaattcaaagggcttaaatatgacaaagaaggcgtagaaaaaactaatctaatagaatttaaaaaactaaaagaatttaaaaaagcattaggagagcacaacttagagagaaaaactctcgatgaaattgcaacacacataacactcacaaaagatgagaatcaactcaaaaaacaactagaacaatacgcactatcacaaaaccaaattgacgctcttgcagaacttgattttaacgatcatattaatcttagctttaaagcactctatgaaatcctgcctttaatggaaaagggaaaaagatatgatgaagcttgtaatgaattaggcttaaaggctaaaactagcaatcaaaaaagtgaatttttaccagccttttgtgattctatttttgctcaagaactcacaaatcctattgtcaatcgtgcaattagtgaatacagaaaagttttaaataggcttttaaaaaaatatgggaaaatgcataaaatccacattgagttagcaagagatgcgggtttaagcaaagaagcaagaaataagatagaaaaagaacaaaaagaaaacaaagacatcaatgacaaagcagaaaaaacctgcaaagaatttggcttaaaacccaatgcaaaaaatatcctaaaaatcaaactttggagagaacaaggtgaaatttgtgcctatagtggcaaaaaaattaccattgatgatttaaaagaagataaggcattagaagtcgatcatatttatccttattcaagaagctatgatgattcttataacaacaaagtcttagtttttataaaagagaatcaactcaaattaaatcaaaccccttatgaagcttttggatctaatcaagaaaaatggagcaagattcaagtcttagctcaaaaacttccctacaaaaagaaaaacagaatcttagatgaaaattttaaaaacaaagatcaaattgaatttatcagcagaaatttaaatgatacaagatacgccacttcccttattgctaaatacacaaaagagtatttagagtttttacccctaagtgatgatgaagatataagcttaaaaagtggagaaaaaggaagcaaaacacatgtgcaaactatgaatggaatgcttacttctgtgctaagacacgcttggggattttcacaaaaagatagaaacaaccaccttcatcacgccttagatgccatcattattgcttatagcacaaactccattatcaaagcattttcagactttaagaaaaatcaagaaatcctaaaagcaaaattgtatgccaaaaagcttacaagcgaagaatacaaaaatcaatccaaatttactggatttgaaaaatatcgctccaagatactagaaaagcttgattcaatctttgtctccaaaccgcctaataaaaacacaaaaggtgcattgcatgaacaaactttttatagttatcaggatattttagaggaatacaaaacacaagaaggactaaaaagagccttagaatgtggcaaagtaagaaaaatagggacaaaatatgtcgttaatgacagaatggtaaggctagatattttcaaaaaggataataaattctatggaatacctatctacacaatggactttgctttaggagtgttacccaataaggtagttaccattggaacagacaaagacaaaatcaaaaaagaatggaaaaccatagatgaaacctatgaattttgcttttctttatacaaaggagatttggtattgattcaaaaaaaggaaatgcaagagtcagaatttgcttattataatggttttgatatttcaagtgcaagtatctccctagaaaaacacgacaataaatttgaaaatttaacagaaaatcaaaaactcctattcccaaaagccaaagaaggggatgtcgaagtaagaggtataggaatacaaggcttaaaagtctttaaaaaatatatggtaacaccgctaggagagattcaagaaacaagaactgaagcaagacaaaatatccaaccaagaaaaaaacatggcttacgatgaggcttttaagagcattttggtttcaagcaaggttaaattgagccttgaacttgaacatcttgtgattcaacaagataaaaatatagccaaaatttttcttaaagatattaatttcattatattagaatcactccaagcaacccttacttcaaaactacttagcactttagcaaaacataaaattatccttttaacttgtgatgaatttcatcatataaatgggatattttctccatttttaggacattttatgagtgcaaaaatcgccaagatgcaaatacaagtcagtttgcagagaaaagcgattttatggcaaaaaattatcaaaaataaaatctccaatcaagcccatatcctaagacaagctcatcacacaacagaatctaatgatctttttaaactagcaaaagatgttactctaaatgatgctaagaatacagaagcaaaagctgcaattttatattttaaaactttatttggaaaagactttacaagagaaaagatatgttttattaattttgcacttaattatggttacgccattgtaagggctaatattattagagcagtttgtataagtgggcttctaccttggtatggaataaaacacgataatatctataatgattttaatctttgtgatgatttaattgaagtttttagaccattggtagatttttatgtattgcatttaaaagccccaaaagattgtgaatttttagacaaagaaaataagcaaaaactaatcaacatattgcaaaaagaagtaatattagaaaataaaacctacccattaaatagagctataaatttctatgttcaaaattttaaaaatgctttattagaaaatgaaaatctcataaaggttaaattctaatggtgaaggataaatttatgcggatattactaatgtttgatatgccaacaaaaagcaaaaaagatcaaaaaaatgctacaaaatttagaaacgcattaataaagcttggtttttttatgatgcaatttagcgtttatgtaagaatctgcaaagggctaatgtctgccaaaagcaccataaaatctatagaaaagattttaccaccttgtggaaatataagggttttaataataacagagaagcaatttgataatatgcaaatacttttgggagaagcatcctttaatgaacagataaataatagcaagaatttaacactttttgaatggagtgaaaatacacaagattataaatattccaaagaaagcataaaataaagattcggttttaaaaggaattttaatcctgcgtggcttaccgaaaaccacttattttagtccctttttaaatttctttagaaaaattttagcatatttttcactaatttttctacttaaatccctaaatttcttggttttttaggtataaattttaccataaagaaatttaagaagggactaaaactccttgatagcaggttttagaatatctttaattttaccataaagaaatttaagaagggactaaaaccattcatagacctacttataacaatgtttaattttaccataaagaaatttaagaagggactaaaaccaaaagcgttagcatttgtagctacaaagagtaacctcgccctaagtataattatagcaaaaattcatcttttttaggatttaaaccttaaaccattttcccttgtttaatatagattcttgtttaatatatcttgtttagaaaaaaatcgatgtcgtattttagggcatttgagaggtgtaaaaatggctaaaggtaacttttttaatgtgaaaaaccttaaacgactatttcaacgctattgataagccttttttgagaaaaaataaggctctctagattcgtaaaataggagttgctcgttttcaaaacacttatttagctacaattttagattatgtgttactgattcatacaaaatattcaatctataaataaattttggtaaaacaaggaatataataaaaaactaaataaaaaattagtatttatctgtaattgctggtcttttaagcaatgcttttgctattgatttaatttctgtggctactaatggaaaatctaatgaaaattctttgggtgttaaaacactcaataatcaagagatgagtgagattttgggcggagcttatgcacaacaagcaattagaaagcaatatggagttgtagataattttggaaataatatttattacactgcatattatgaagttagattggaaacgggagattctgcttattttaatcttggttcagattattacgctgctattgccacaacttataatttcaaaactaacaaaattacatcggaagtggtaaaaattaacaaaaataatcctagcaatgttaaaactttagattttcaaaataatgtaataggcagaattaaaaattataaagcggttgaaagctggataaaacaagataaaatcaatattaaatatttcaaataacttggaattatttttgcttacctttttataaaaatgatttgatgcaaaatcccaaacaaattgcagtagaatcatcaaaggtaagctatgcaaattaacacctctaattacttgaacctttattctaattcctataatatcaattctaaagaatctacgcaatccataagtcaaaattttaataccacagaaaatttatcacagaataataaaaataatgtagaaagagataccaaacaaataatatccgaaattctttccaacaaagaggaattgccagcttatataagtcattcttatcatcaaaatattgacaatatagaaaaattacagaatctagcacaagctcatcttcaatttattgaaacatataatggagtgcttccaacagaattggaagccaaacaatcaatacaattccttatgcaagaagcagaagaaattttaagcgttgcttataacaaacaacctaatagcgaggaatttagaaatttacttggaattttttcattcgcacaagattctattaatgattttagtaacaataaacaaaaattgttaaacctgttaaaacaagggcaaagtagcctagaatatgccacaagcgatgagttttatcataagctttttacaaaagctaatggttctaacacacaaaccttagaagagattgatagactttcaaaaattaatgaagagcaaggttttttgagagattataatgtcaatgccactctaatatctagctatttacaagactttttcactatggctaatgattttggatttatctccaaagacaaagaaaacaagatttatcaagaattacaaacaagtgctatctatctaggctctcagggtggcaatattggaaattcttttaaaattgaaaatttcactatttcttgggagggtaatagcactctatttaatgcttacctcaatggctctaaaatctctattgcttcacaatccacatctaatgatttccttgcctctcttacctctaactttgatactacccaaagcatttttgatatactcaatcaaaaagaaaaactagaaaaggaaaatcaagacttgaaaaacaaacaagccatagaggcatatagttatggcaatggatattctagcactttaacttctaaaacttctaaagaaatagatagtttcattaatcaaatgatcaaggaagcaaaagcataatgcaaaaaatgcttttattgcgcatttttttgcttgtttttataacaaactttgcttttgcttttagcgttaaatctctacaagaactccacaatcaaaatgttataaggcagcaatatgaggaatcttgtggggcttctgctttagctactttacttaatttctttgaatttagacaatatagcgaacaagatatacttgcttttttaaatcaaaaaaccgatatgttaagcttcaaagaattgcaagaagtggcaaatactctaggttatgcaactaaaggctttcaactccaaagagaaatattagaacaaacttcttatcctttgcttgtaagaatagaaaatgaccctagattccctcattttgttgtaattatcaatcacaaaggcgattttattcaagtttttgaccctaattttggacaatataaagcaaccaaaaaagagttttattctgtatgggataggaatcatacaggtggatttgctcttgtaattgctaaaaatgaaaactccaaacctatgataaaagatttagaatttcctaacgaagcatttttcaagtaatttacaattccattctaaaatttatcgctttaaaaccaaatatggaatactcattgctaatccttagctataatttttttataaaggattacaatgttaaaaaggattttagtctctttttttggattaatttcaattagtttcgcttctgaccccattactttggattcgctttttaaaaaacaaattggcttaagaagtattacaagcgtaagttatctaagtagtggtaatgcctacatttataatatgtatcccacacttgtggcacagcctgacacaaaaacttggacagatacaaaacaagtctctattagtcaaacttttatttacactcttacacctaaatttgatattcttgtagctggtaatggaagctataaacaaaacgaatatgtaagcaattttggtttttcttttgaaagtgagagaagttttgattttgattctttatggattggtggaatttatacaggggatactatcggaggtatttttgtcccacaagttaccctacaaggtggagttattcaaagagaggaacattttgatgttttagttccttcttaaatttctttatggtaaaattctagatgatttagtaaatgaaagaataaggttttagttccttcttaaatttctttatggtaaaatttatacctaaaaaaccaagaaatttagggatttaagtagaaaaattagtgaaaaatatgctaaaatttttctaaagaaatttaaaaagggactaaaataagtggttttcggtaagccacgcaggattaaaattccttttaaaaccgaatctttattttatgctttctttagaatatttataatcttttgtatttctcgctccatttaaaaagtatttcctaaaaataatgtaattaaaccacaattacttatttaaacaaagaatccaatagatttattgagtaaaaatttacaccattaagattttacaaacacttttaatagaactaatgctatttcaatttctttagccaccaataatccaaataaatttaaacccaacaatcattcaaacaaacgcaccaattccaacctatttaaacccttttacacccctttagcagaatcacatcaacaccaatcatcaataatctagatctttatttattgaaccttatttattaagtctttcaataataaatttaaacccaacaatcattcaaacaaacgcaccaattccaacctatttaaacccttttacacccctttagcagaatcacatcaacaccaatcatcaataatctagatctttatttattgaaccttatttattaagtctttcaatctctagcaactctttattatcccaccctttcccttttacactagaatttctatcttttattttttcagtttctccccaacaatcctaatgttaaaaattacaaagctcatcatcaaacacccacaaacctatacaaaaacctatacaaaccttaaatttaccattttaaaatatttatattttattctattaccttccaatacacaactcacacattattgattaagcaacctatttgcatataataagactatttaaaaatataaaataatattattatctttaaaccaaatactatttctcttttttaagacaaatttaccgctaacaataagcaatatctcttatattaaaataacttttttctttaatagttttcaagtatttttatttttattatctaaatcttatatttcttatatccattcacacacttattatctatattatcttataattcttttctatctattcaatgatttagttaatataagttttacaagggagaaataaaaagcagtttaactcattttcttttacactctcatctccgcaccgtcctactttaccacatctgaaagttgcagtatcatcagcgaagaagagcttaacttctaggttcggaatggagctaggtggaacctcttctctattagcacgaagatgacaatgtaaaaaaagcctattagtatcaatcactaactaagatttaagagtgctttacactcattaaggcagtggcttaaagtctttatattaagccaatcggtctattagtagtagtcagctaaacatattactatgcttacacccctaccctatcaagcaggtagtcttcctgcgaccttcagggattgttcatcttggagttggcttcacgcttagatgctttcagcgtttatcacatccatacgtagctacgctgcgatgcccatagcaggacaacagctacaccagtggtatgtccatcccggtcctctcgtactagggacagatctcctcaacaatcctacgcccacggcagatagggaccgaactgtctcacgacgttctgaacccagctcgcgtaccgctttaaatggcgaacagccatacccttgggacctgctccagccccaggatgcgatgagccgacatcgaggtgccaaacctccccgtcgatgtgagctcttgggggagatcagcctgttatccccggggtaccttttatcctttgagcgatgacccttccacacagaatcaccggatcactatgaccgactttcgtctctgcttgacttgtttgtcttacagtcaggctggcttatgccattacactctacaaatgatttccaaccattttgagccaacctttgcaagcctccgttactttttaggaggcgaccgccccagtcaaactacccaccaggcattgtcctactagaggataactctagctagttagcagacagaaacattaagggtggtatctcaacgatggctccatctctaccagagtaaagatttcatagcctcccacctatgctgcgcataatgctcccatcggcagtgccaagctgtagtaaaggtccacggggtctttccgtcttgccgcgggtaggaggaattttcacctccactacaatttcactgaatcactctttgagacagctcccatctcgttacgccattcatgcaggtcggtatttaaccgacaaggaatttcgctaccttaggaccgttatagttacggccgccgtttactcgggcttcaattcaaagcttcgccttgcggctgactaatcctcttaaccttcgagcaccgggcaggcgtcacaccttatacttcctcttacgagttggcaaagtgctgtgtttttggtaaacagtcgggagggactctttgctgagacctaattgcttaggcacaccttatcgcgaacttacggtgttagtttgcagagttccttaaagagagttctttcacgcgccttagaatactcatctcatctacctgtgtcggtttgcggtacgggcaacattagctaaacttagaagcttttcttggcacgacgatcttaacaattctctcatccatccgaagacttcagaaagcctgttgggtttgggatacgggagcggatttgccaatctcctaacttgcacccttcggctagcatttctatcggctagcttgtcttgaccctatgcgtccctccatcgcacactaatgttggtattggaatattaaccaattttccatcgactacccctttcggacttgtcttaggacccgactaaccctacgatgacgagcatagcgtaggaaaccttagatttacggcgaagtggattctcaccacttttatcgctactcattcctgcatgctcacttcacaccgctccaccactccttaccggtatggcttcaacgctgatgtgaacgctcttctaccactgtgcatcagcacaatctacaacttcggtgtctatcttagccccgttatattttcagcgcaaaatcactagaccagtgagctgttacgctatctttaaaggatggctgcttctaagccaacctcctggttgtctaagtaacttcacatctttttccacttagaatagaactttgggaccttagttggtagtctgggttgttcccctttagacgattgattttatcacccaccgcctgactcccaagatacggtaataggtattcgtagtttgacaggggttggtaccgcggtgagcagccctagcccaatcagagctctaccccctattactatcacttgaggctatacctaaatatatttcgaagagaaccagctatcactgagtttgattggcctttcacccctatccacagctcatcccaacccgtttcaatgggtacgagttcagtcctccggtgggtgttaccccactttcaacttggccatggatagatcactcagcttcgggtctgcagcatctgacttaagcgccctttcagactcgctttcgctacggcttcacattagtttaaccttgccagataccacaactcgcaggatcattatgcaaaaggcagtccatcaccctgataaatcatagggctctgaatgattgtaggcaaatggtttcaggttctatttcactccgctcactgcggttcttttcacctttccctcacggtactggttcgctatcggtgtagtagtagtatttagggttggagggtggtccccccagcttcagcccggatttcacgtgtcctgacctactctggatcctgctacctaaaaatactctttcatatacgggactatcaccctctatggctatcctttccagaatgttctattagagtattttagtggatattgcagtcctcaaccccgaatgcaagcattcggtttgccctattcccctttcgctcgccgctactaagagaatctcgtttgatttcttttcctctagttactgagatgtttcacttcactaggttcgctccatttaaggtaatatgtattgctacatattgggttgccccattcggaaatctagggatcaaagtttcttgacaactccccctagcttatcgcagtctagtacgtccttcatcgcctctactacccaaggcatccaccatttgcccttcacaagcttaactgactttattctaacgccactgccttaaagaatgtaaatctctaagattaacaatctttaggcaaatctttagttatttgtttgcgtgattgtagttatttacttatataggctttaacaatgagtttttaaataacttttagacttaaaaagtctaatgtgaatcttaagattaaaaaaactcacattaaaccttttaatggtggagaatagcgggatcgaaccgctgacctcctgcgtgcaaagcaggcgctctcccagctgagctaattccccaatggtgggcttaggaggacttgaacctccgacctcacccttatcaggggtgcgctctaaccacctgagctataagcccctactctaaagcttggatgatctctgaaaactaagcaggaaaaaagacttccttattcaactaaataaatgaatatttagtgatgtctcttgaaaggaggtgatccaaccgcaggttcacctacggttaccttgttacgacttcaccccagtcgctgcatccgccgtgggcggtaactagtttagtattccgacttaaggcgaatacaactcccatggtgtgacgggcggtgagtacaagacccgggaacgtattcaccgtgacatggctgattcacgattactagcgattccagcttcatgtagtcgagttgcagactacaatccgaactgagagatgttttagagattggctccacttcgcagtattgcttctctttgtgcaccccattgtagcacgtgtgtagccctaggcgtaagggccatgatgacttgacgtcatcctcac

SEQ ID NO: 3774 - DNA, 23003 bp, synthetic construct
  misc_feature 1..23003: note = Synthetic
  source 1..23003: mol_type = other DNA
tttaaaggcgatactcaaggttcaaacaaaaaacctgctacacttgaaacaggcgcggttgtacaaattcctttccatgttttagagggcgaagttatacgcgttgatacagtgcgtggagaatatatagaaagagctaataagtaatttaaaaagcttttgatttatttcaaaagcttgactttattacttaaatttttatccttataaataaaaaatattttttacatcttctcttaattaaatcagtttttacttattgtttgaaaaataaagtttcaaaagactaagataagcaataaatcctataaattttttaagtaaatatgatcagaatatacaattgatttatctttttaaaagttttggataaatgagtaaaattgtaaccagtatgaattatttcataataaaaaaatttattttattattaaaatattatttttctgctattatgctcacaaattaatttttgaaggaaataaatgatattgttgataatttcttgcattttactagcaattgtcttaggttatattactaagataaatgtaggactttttgctatggttttttcttatattataggtgctttttttatggatctagaggttaaaaaaatcattgctttttggcctatttctatattttttgtaatttttgctgtttcacttttttacaattttgctgtggttaatgggactcttgaaaagttatctggatatttaatgtatcgttttgctaattatccttatttgttaccttttgttatttttgctatcagtgcgattatcgctgctttgggtgctggattttatacagttttggcttttatggcaccgcttacattcttgctttgtgataaagtgggtttaagcaaaattgcaggagctatggctataaattatggagctttgggtggagctaatttcatgacttctcaaagtgggattatttttcgtactcttatggaaaaatcagggattgatacgggtgtagcttttataaattcgagttttatttttatagcgactattgttttacctatctttgttttatcatttttcgtattgagcgcttttagaaacaaaacacaggtgagtgtgatagaaaaaccagaagcttttgatacaaagcaaaaaacaactttgattttgatgtttataatgatatttatcgttttggcaggacctatagctcatcttatttttcctcaaatttccataatagagtattttaataaaaaaatagatattgcgatgatagctattatttttgttgccattgctttattcttaaaattagccgatgagaaaaaagttatagcacttattccttggaatactttgattatgatatgtggggtagggatgcttattagcgtagcggttgaagcagggacaattaaatggctttcaactcttgtaaaaaatgaagtgagtgtggtttttatccctttaacaatgtgtgccatagcggcctttatgtcacttttttcaagtactttaggtgtggtaactccagctctttttcctataattccaagtatagctcaaagtagtggtttaagcgaagccttactttttacttgtatagttataggtgctcaagcttctgcgatttctccattttcttcaggaggaagtttgattttgggtgcttgtcctgaaaaatacagagaaaaattatttaaagatttgcttataaaagcagtgccgataggctttggtgcagctattatagctaccattattatcagttttattttataggggttttgttatgaaaatagatactcacgcacatatttttttaaaagaattaaaaagcattgaaaatgctcgttataagcctgattatgatgcgagttttaaagattataaggcaaatttagatcgttatgattttgacaagggtgttttagttcagccaagttttttaggtgtagataatgagtttttgcttgatagcattaaagatgatgaaaatattaaagctattgttgtagtggatgaaaacattaaatttgaagaattggaaaaattaaaaaaaagaaaagcttgcggtgtaagattaaatcttatcggcaaggagttggatgattttaaaaatcctatttggatggaattttttgaaaatttagctaagcttaaaatgcaagttgaaattcaaagagatttggatgatgatcttgtaaaaatcattaaacaaatccttccttttggttgcgatatagttatagatcatttagctagagcaagcgataaatctaaaaatttagaagaattgcttcatcttaaaaatcctaaaatattttttaaaatcagtggattttatagggcaaaaattcattatactaaaaatgaagaagcaataaaatttgctaaaacaatgtatgaaattttaaaagagcattttttacctacaaattttgtttttggaagcgattggccgcatactaattttgaaaaaaatatcaattttctaagtgcttttgaagcttttgaaaaaatcgttacctccaaaaaagaacaagagcaaattttaggagataacgcttgtgttttatttggtttttagtcttactctaaaaatatattttgcaatgtattcaaaatattttcttaaataaggcttgtgaataacaaaaccccctagaagccctaaaaggcttcctatgataatatcttgcaagcgagcgtgtatcaacatatcgacacttaagtttccaaaagaagccgcctcagccaaataagtcacataaggagtaagaaaaattacagttaaggcgtagtttctaactactaaaaactcaattataaaagctaaaaacatcatcaaaaagacaaattctagaggggtaaatttaatctttaaaagccaccatgcaaataaaattcccactgtcgtcccaagaatgcgttgaagctgttttatccagactgattttaaattggctccttgcaagataacagttgtactcactgcaacccaataacttctatcgagttctaaaaatgctcctagaaacactgcaaaaccaacaaaaaaagcaataatcatagaatccacaaagatgatatcaaaacccaaatttccattctgtaaaacaggcttgggtggggaatttttaaaaatataaatgacagatatagagtataaaaaagcagctatgttggcaataataccacctatacaaatcaatcccactagaaaaatataatctttgggtggaaaaggaaaaaatgaagccaataagcaggaaaaaacaaagaaaaaataccccggtgcacctatattgtaatagcgtatcaaaatagagctagccatggctactagaccgattatgagcggagaaaacgcaggaaaaaaatgggtgcaaagtcctattaaaaaagataagcacaaaccaaaagaacagcacattgtaacagccattctgtgatatatgggcgtattggttgtataaacaaaagccataattcctatcatagcaattaatcccaagtccatacgctcataatatgcggcagtactaagtgcaaatccaactgccaaggcaaagaaaaaaggcatttgccaaactctttcagttggattaagttgtatgatttctttatattgttgttttaaaatttttcttttgctcattttcttatttgtccttctccactgattaggtatttataagtgcaaatatcttcaacccccataggacctcttgcatgaagtttgcttgtggaaattcccacttctccaccaaagccaaattcacccccatcactaaaacgagtcgaggcattgacataaatacaagatgagtgtagaaggcgttgaaatttgcttatgtttaaagcattgtttgagattatggtttcagagtgtaaagagctgtgttggttaatatgctctatagcctcatcgcaatcttttaccgattttatactgatggcataatcaagccattccgtatcaaaagtgctttcatcagcctttgaaatttctaattttgagtttttaaaatgctctaagatattttcatgtgcgtgaatttttaccttaaatttttcaaattcagggattaaaagctttataaaatctttagcaattttttcatggatcaaaagggtttctagggcattacaaacgcttactctttggcattttgcattaaggatgatttctaaagccatatttaaatttgcactctcatccacaaaagcatgacataagcctttatcttgtttgatgagtggaatttttgtatgactagcaatttcttgtatcatatttgaacttccacgaggaatgatcacatcgactaaatcatcaaaagctaaaatttgcatgatctcatttctttcataaagcatagcaaaacaatcttgcaaattaaactcttctagtactttataaacaagatcaaatatagctgaatttgtgaattttgcttcgctgcctcccttaagcacgcaagcattggagctttttatcattaaagcgatgatttcagcacttagactcggtcttgcttcataaatcacaccgattaaccctatgggaatgctgactttttctatctttaagcccgcataattaacccagcctttggaaattttacctataggatcttctaaataagcgattttttccaaagcatcgcaaagagaaaaaatgcgtttttcatctagcaaaagtctgtcccgcattgctccacttttagtaaaattggctatatctttttcattagcttctagtacggttttgaaattctttcttaaagtgtgagctagttttaatataatattttctttgtctttgggtgttaaattgagtagtttttgagaatttttcttaatattttcaagtaaatttcgcatttttaatcctttatttacaaaaaacttgataaattatacaaaaaaatttagaattgaaaggtaaattttcgaatgaaaaaagtagatttaatcgtagtaggtgcagggccaacaggaattggctgtgcagttgaggctaagcttaaaaataaagaagttttagtattggaaaaatcaaacaatatttgccaaactttaatgcagttttacaaagatggcaaaagagttgatatggcttataagggctgcgaaggaacaaatcacggacatgttccttttcaagatggaactaaagaaagcaccatagaaacttttcaaaatgctttaaatgagcataatatagaagttgaatttggctctgaggtagagagcgttaaaaatgaaaatggagtatttttagtaagtacaggcaagggtgtttatgagtgcaaaaatatcatcgttgctataggtagaatgggtaagcctaataagcctgattataaacttcctggaactttaacaaagattattaatttcaatgctaactctgttttaggtgatgaaaaaatcctcgttgtaggaggtggaaattcagctgcagagtacgcagtagatttggctagttcaaacaaagtaagcctttgttatcgcaagaaagaatttacaaggctaaatgatatcaatcttaaagatatccacgaagctggaaattcaggcaaagtagaattaaaactcggtatagatatagaagagcttgaggatgataatggcaaagctaaagtgaaatttaacgatggtagcagtgagacttatgatagaatcatttatgctatcggtggttctactcctcttgattttttacaaaaatgtggaatcaatgttgatgataaaggagttcctttaatggatgaaaataaacaaagcaatgtaaaaggcattttcgtagcaggggatattgcaactaaaaatggtgcaagcatagtaacaggtttaaatgacgctgtaaagatacttgccgtaatttaatcaaatttggcccttgggctgaatttgacttattaaactttcaatattataatttcttcattatattttaatttttaaatattattatgcaaacacaagataaaaacaataaaaaaattataccgatagaaacctatcgcttagctttctacatactaggacttcaaacactctattagctccttttaagatatttgtattgttaaatattttaaaggattttttatgtcaaatatttttagcaccttaagcccttttaggctttttgttaaatgtgctgtgcctaatgtaataagcatggcatttatttctttttattatattgttgatggaatttttgttggaaaatatctaggaaatgacgctttagcagctttggccttaattattccttttattatgatatcttttgctttggctgatatgatagccattggttcagctgtacaaatttccatgcatttaggacttgggaagaagcatttagctagaaaaatctttagttctagtatgttaattatcttccttatttcatgcttggtaggtattttagaatatcttttaagtcctgttttgatcgattttttagatgtaaatgaagatatcaaatcaatggcgaaagagtgtatgcttgtatttgctttgttcgccccctttacaatgtgttcatttgctttggataattatcttagaatttgtggaaaaacaacttatagtatgataatgaatgtgattatagcattgagcaatatagtgcttgattatattttcatcgttgtgttgggttggggattgttttcagcagctcttgcgacttgtttgggacttatgttaggtggtatttttggaatttttccttttttatttcaaaatttagagcttaaattctcaagtttgtatatgaatatgaagattttcaaaaatatagtttacaacggaagcagtgaattttttggcaatatctcgggttctttatatggcatatttgccaatttggttttattaaaaatttcaggtactcaagcggttgctgctttttctatcgtttcgtatattgataattttatcattatgcttattatcgctatgggtgatgcgatgcagcctgcgttaagttataattatgctaaaaaggatttttcaaggattaaaaatattttaaaggtaatgttttttgcgggtgcgattttgtctttgctgtctatcgtgatgatatttgtttttggtaaggatttggtgggattgtttactcaagaaggtgatcaagaatttatcatttttgcttatatagctttgatactgttttcttttaattatctttttgcgtggtttaatgttttaagtggttcttttttaacagcgagtaataaagcgagtttttctttaattttaagcttgagtcaaaatctttttattcctttgtgttttcttttgattttatcttctatcatgggtttaaaaggagtgtggcttagtccattttttgctgaactttgtgttttgattttagcttgtatttttgttagaaaagtctttaagaaactatcgttttcataatgatagtttctttagattgattttagaatttatatcctacgcctgtaagtaagatgtggtatgtttcatcgtaaaaatctatatcgctatttcttttttctaggccataatttgcaaaggcataaagcgagtcatagcctaagaattgattttttacgagcttgagattgagttttgtaatactaccgtcttgttttttgttaaaaataggatctgtgccttctgctttgtattgatttaagcttaagcttggggttaggatatagttttttgcaaaaactagatgtgtgcctattttaaagccatatcttgagtagctttgagcttttccatcggcatcattgtaatcatagtttaagcctaaatttaataaagaataattatagcttaattctagctcatgataatttccctctcgcttaagagaagtaaatgctacgctttctttgtctaatttgttttttgcaaaaacataagaagcattaaattttccaaaatcactttcgtaaagttgcgaaattttaaagccgtatttactcacatcggtttcttcgcgattgcctatagcataaggattagcataggctttttctcttaaagatgaaatgagagaaaaggaagtgctaaagcgttctagataagctctttcatagcccaaagcgataccgcttaaatctcttccattatagtttttaagaaatactctatcattatcgattaaattcccatagtaaagctcaagacctataagagggatagcagaagtatcggaattatcagcattgtatccacttagataatcgctatttgctagaggtgagatattgcttttaacatctcttgcgcctattcctaggcttaaatttccactaaagccactttgaaattctatagatgaagcttgacttatcatcaaagaagctaaagcaaaagaaagtaaggtttttttcaaaataaactccttgtatagttttataattaaaattataactttattgtaactaatattactttaatttttcataaaaagcttatgtgaatttttagattcttttagataaaatctttcaataatttttactcaaaaaaggaaaatagggtgcagcaagagcattttgatttggatttagagcgcgcaattttaagtagttgtatcatgagcgaggatgcttattctagtatagcaggagatatagaacctaaagattttagtcttaaagctcatcaggatgtttttaaagctattattgcttgcgtgaatgctggagagcctatatcgattagctttttaaaaaaacataaaaaaatagatgaacaaattttaacagagattatcgcaactccttcgataatagatcttcctgcttatgtcaatgaacttcgcgaaaagtcgattaaaagacagcttttaagttttgcacatcttttgccaacacggatcaatgataatcgcgcagtcagcgaaatttctgatgaaatcggcaaggaaatttttaacattaccaaccgtgtcaatactaacgatatcaaagatatagaattggttttaagcgagcttttagaagaattcaaaaaacaaaaaagccttgaaaataaaacagtgataggacttgatacgggttttgaagatctaaatactatgactaagggttttaaaggtggggaacttatcatcatcgcagcgcgcccaggcatgggaaaaacaactctgtgtttaaattttatagagaaggttttaagacaggataagggagtggtaatgttttcgcttgagatgcctgctgctcaaatcatgcaaagaatgcttgcggcaaaaacttctatccctttgcaaaaaattttgacagcggatttaaatgataatgaatgggaacgcattggcgatgcttgtaattattattctaaaaagaaattatttatctatgatagcggttatgcgactatcacagatgtaagagcgattttaaggcgtttaaaggctcaagaagaaagtatagggctttgcgtgattgactatatagggcttatgatgagcaattctaattttaatgatagacatttacaagtcagcgaaatttcaagagggcttaagcttttagcaagagagcttgatatgcctatcatcgcactttcacagcttaatcgttctttggaacagcgtgcaaataagcgtcctatgatgagtgatttgcgtgaaagtggggctatagagcaggatgcggatacgattttgtttgtgtatcgcgatgaggtttatagggagcaggatgaaaaagaacgcgaaaataaagcaaaagccgaaggcaagccttatcaaagaaatttcattcctaatcctatgcaagaaaatgctgaaattttagtcggcaaaaacagaaatggtcctgtaggggttgtcgaggttttatttttaaaagaaaaatcttgctttgtggataagccgaaatttgagagtgttgaatttcaggagtagggttaaattgttaaaggtgctttgatacgaaagcaatgttatttaaaatcaatcataaataccataataaaagtgagagcgaatgaaaattttaggttttgatatagggattaactctataggttgggcttttgttgaagataatcaattacaagattgtggtgtgagattgtttaccaaggctgaagaccctaaaacaagagaatctttagctttacctagacgcaatgcaagaagcaatagaagacgactaggaagaagaagatcaagactgattgctttaaagcatattatttcaaaagaattaaaattaaattatcaagattatatagcaaacgatggagaattgcctaaagcttatgaaggaagacttataagtccttatgagctaagatataaagcgcttaatgaaaaaatagaacccaaagatttagcaagagtgattttacacatagcaaaacatcgtggttatatgaataaaaatgaaaaaaaatcaagcgataatgaaaagggtaaaattttaagtgctttaaaaacaaatgctttaaaattggaaaaatatcaaagtgtaggagagtatttttataaagaatttttccaaaaatatagagaaaatacaaaagattttataaatatacgcaataaagaaggcagttatgaaaattgcgttctagcaagtgatttagaaaaagaattaaaactgattttagaaaaacaaaaagaatggggatattcttataatgataattttataaaggaaattctaaaagttgcattttttcaaagacctttgaaagatttttcatatttggtaggagcttgtaccttttttgaagatgaaaaaagagcttgtaaaaattcatatagtgcttgggaattcgtagcattaaccaagattatcaatgagctaaaaagcttagagaaagagagtggagagcttgtatcgagtcagattatcaatgaaattttaaatcatatcttagataaaggaagtatcacttataaaaaatttagagaatacattaaacttcatgaaagtatgaaatttaaaagtctaaagtatgataaagacaatgcagaaagtgtaaaactgatcgaatttagaaaattagtcgaatttaaaaaagccctaggagagcattccttaagtagggaagaattagatcaaatagcgacttatatcactctaattaaagataatgagaaattaaaaattgctttagaaaagtatagtttaaataacgagcaaatcaagaatctgctagaaattgatttcaacgatcatataaatcttagttttaaagcacttaatctaatcttgcctttgatgaaagagggaaaaagatacaatgaagcttgcaagcttttaaatttaaaaacaaaatcaaacaatcaaaaattcgatttcttacctgccttttgcgatagtatttttgcacaagagctcaccaatcctatcgtaaatcgtgctataagcgagtatagaaaagttttaaatgctttgcttaaaaaatatggaaaaatgcataaaattcatatagaattagcaagagatatagggctgagtaaaaagcttagggctaagattgaaaaagaacaaaaagaaaactatgagaataatatttgggctctaaatgagtgtgaaaaatttggacttaaggcaaatgctaaaaacatcttaaaattaaaactttggaaagaacaaaaagaattttgtatttatagcggtaaaaaaatatccatagaacacttaagagatgaaaaagctttagaggttgatcatatatatccttattcgcgaagttttgatgattcttttttaaataaggttttggtttttaccaaagaaaatcaagaaaaactcaataaaacaccttttgaagcctttggagcaaatgaagaaagatggagtaaaattcaagctttagctcaaaatcttccctataaaaagaaaaataaaattttagacgaagcttttaaaggcaagcaacagcaagattttatcagtaggaatttaaatgatacaagatatatttcaactcttattgttaaatacacaaaagaatatttagattttttacctttggatgaaaaagaagatataaatctaaaaagtggagaaaaaggaagtaaaatacatgtgcaaacaatcaatggaatgcttacatcagttttaaggcatacttggggatttgctcaaaaagatagaaacaaccatcttcatcacgcgcttgatgccacgatagtcgcttatagcacaaatgccattataaaagctttttcggattttaaaaaagaacaagagcttttaaaagcaaaactttatgctaaagaacttacaagtgatagttataaacatcaagctaagttctttgagccttttgagggatttagagagcaaattttaaatcaaataaacaaactttttgtttcaaaacctcctagaaaaagagcaagaggagctttacataaggaaacattttaccctaaagatgaaatgattaaaaaatacaactcgcaagaaggtttagaaatagcactaaattgtggaaaaataagaaaaataggtacaaaatatgtagaaaatgataccatggtaaggattgatatttttaaaaaacaaaataaaatttatgctatacctatttatactatggattttgctttaggagttttaccaaataaaatagtaattaaaggtaaagataaaaagggcaatccaaagcaatggcaagaaatagatgaaagctatgagttttgtttttctttgcataaagatgatttggttttgatacaaaaaaaagatatgcaagaacccgaatttgcttattataatagttttgatatcagtaactcaagtatttgtgttgaaaaacatgataataaatttgaaaacttaacagacaatcaaaagctattgtttacaaatgcagaagaaggaaatgtaaaggctaaaaaaataggaattcagggattgagaattttcgaaaaatacattataaccccgcttggagaaaaaatcaaggctgatttcaaatcaagggaagatatcgccttaaagacgagcaaaaaacatggcctatgatgaagcttttaaaagtatattgatatccaatcaagcaaaactaagccttgagttcaatcatcttgtgataaaacaagacgataaagaagccaagttttttctcaaagatatcaattttatcatactagaatctttgcaagcaagtatcacttcaagcttgcttagtgctctagccaagtataaaatcatacttttaacttgtgatgaatctcatcatatcaatggaattttttctccatttttaggtcattttatcagtgcaaaagtagctaaaaagcaaattaaagtaacactacaaagaaaagcgattttgtggcaaaaaatcatcaaaaataaaatttcaaatcaagctcatattttaaaaattaccgatcatatcaaagaagctaaagagcttctagctttggctaaaaatgtaagcttaaatgatgctaaaaatttagaagcgactgcagctgctttgtattttaaaactttgtttggtagcaattttacaagaagtgagatatgttttgtaaattctgctctaaattacggctatgctgtcataagatcacttatagttagagcggtttgcataagtggacttttgccttggcaaggtataaagcacgataatatttataatgattttaatctttgcgatgatttgatagaagtatttagacctttggttgacttgtgcgtatttgatttaaaagatataaaggagagtgaatttttagataaggaagcaaagcaaagattaattggtattttgcaagaagaaatcattattgaaaataaagcttatcctttaaatagggctataaatttttatattcaaaattttaaaaatgctttattggaaaatgatgaacttatgatggtaaatttatatgatagaagataaatttatgagagtgttgttgatgtttgatatacccactaaaagcaagaaagagcaaaaaagtgcaaataaatttagagtttcgcttgtaaaacttggcttttttatgatgcaatttagcgtatatgttaaaatttgtaaaggaatgacttcggctaaaacagcaatcaaatccgtagaaagaattttacctccttgtggcaatataagagtattaaccataaccgaaaaacaatttgacaatatgcaaatacttttaggtggagttacttttaatgaaaaaatgaatgatgataaaaatttagttctttttgaatacgatgaaaaaacacaagattttaaatacagcaatgacaagatatgtaaagaaaataaaaccaagtctaataaaattagacaagctagtttgtttgaattttaacggttttaaagggattgtaaccctgcgtggctaaccgaaaaccacttattttagtctctttttaaatttctcttttaaaatgatagcatgtttttatacatttttgtatacaaaaagctctatttttctttatttgttcaaagtctattttaccataaagaaatttaaaaagagactaaaacttctacattgctagaattaaaaactctaaaattttaccataaagaaatttaaaaagagactaaaacaacaacattatcatctataacgactgctatattttaccataaagaaatttaaaaagagactaaaacaaagattttagaaatctctaaggctgatggattttaccataaagaaatttaaaaagagactaaaactatgataatacttcaaatccaaaagagataattttaccataaagaaatttaaaaagagactaaaacttaatcatatattcacgccactcactctttattttaccataaagaaatttaaaaagagactaaaacaaaatactcacttttgcttttctgtgatatattttaccataaagaaatttaaaaagagactaaaactccaactctaactaatatttatggaactttattttaccataaagaaatttaaaaagagactaaaacaaatacacctatgcgtgtaactccgacacaattttaccataaagaaatttaaaaagagactaaaacatcagttacaaggactaaaaatccaaaaaattttaccataaagaaatttaaaaagagaatcggtttctatttcaatttaaggtgatagtaaacggtatagatattatttgtagttaaagttaatttaattcattttttggattagatatctacaactaaagtagtggtggatttagcaggactcgaacctgcgaccaaccggttatgagccggttgctctaaccaactgagctataaatccgcctttgatttgtgaagatagaattatatcttatctttgcttaaagttattttatttatttttattatctgtccaaaaatatctaaaagtgattaaatgttgtaaaattccaaagaaaatcataaaaattgtaaaagaacttccaccataactaaaaaaaggcagtggtataccgacaaccggtgcaaaacctatagtcatcgaaatattaactcccgcataaataaaaataaacaatgctacgcagtttatggcaactctggcaaaataatcatttttaagcttatgattaagacttagcaagtgaaagatgagcaggatataaagtaggattaaaacaaacccgcctataaatccaaaacgctctataagatatgcaaagataaaatcactcgtagcgataggcaaaaagttaaaatgtgtctgcgtggcttcgtcttcagatttgcctatgagtccaccattgcctatagctatcattgactgtgcgacttgatagcttggtttttctgagataaaatcatgaattctttgtttttgataaggctttaaaaaatgcgtataaatgataggagaacttataccaatagcgataatgatgctgagccaaattttataattcacacccatgataaaaagcacaccaaaacccacgatcaaaagtaccatagcactacccaaatcaggctcttgagcgatcagtaaaaaaggcaagatgataaaaaaactaagttttagaaattgttttaatttatagccatttttaggcggtggattttgatagatgagataagcaagcattaaaataaagctgggtttaaaaatttcagaaggttgaatggtaaaatgagtaaatggaatttcaagccatcttttggcacctagcctttcaactccaaaaatatctgtacttaaaagcaaaaagatatttacccaataagctacaggtatgagccacataagtttgcgtatgggtagtaagaaaaatacgctaaatgctgcaatccctacacaggcataaacgaattgtttttcagccaaaaaggtattggcttcgtatattaaaaaaaatgaaattgaaatgataggtataaataaaataggttgtatataatcaaaatgtgttaaaattcttctatcgggtataaacaaaatttgccttcaatttgtagtattaaattataattataggataaaactctaaattgtataaaattttataaggaaaaaatgcaaacttttttagtcgatgaatcctcaaggcttgatatttttttagctaaaaatcttaatcaaagtcgcagtcaaatagctttaatgatagaaaaaaactgtgtttgggttaatgataaaattcaaaataaaaattcatttaagttaaaagtcggagataagcttgttttaaatttgccacttgtagaggaagctaagcctaaatttgatatagattttgatatagaaattttatacgaagatgaggatttgttggttttaaacaagccttcaaatttggtagttcatggagcaaagagcgtgaaaagcgcgactttggtggattggcttatagaaaaacaatacactctttctactttaggcggagaagtacgagcagggcttgtccataggcttgataaagaaacaagcggagctatactgatcgcgaaaaataattttacccatcaaaagcttagtgagcaacttagcgataaaactatgggaagaatttatcttgcgttaattgatttgccactaaaagaggataaaattatcatagataaagccttgattcgttccagtgcgaatgctattaaaaaaatagttacaaattcccatactaagggctctaaggaagctaagagtgcttttgtcaatttggcaaaaagcgaggaattaagtcttattggggctaaactttttacgggtagaacgcatcaaatcagagcgcatttagctagcataaatcgtcatattttaggagatgaattatacggctataggggaaaatacgagtgcaggatcatgttgcatgcgtattttttatattttgttcaccctagaaatggagaaaagatatttgttcaagctccattgatgaatgattttaagcaaattttagaaaaaaattttattttaggagagcttaatgaaaaaatttcacttgagtctttgcttgggtgctttgactcttttatttagtgcttgtagtgtttcacaactttctagcgtgggttctagtaaagaacttttagttaatgaaagcttgccaaagattgaaagcttaaaaagcttgagtgatattagcaatatagcgtttgaatgggagcctttgtatgatgataatattaaaggattttatttatatcgttcaagtgatgcaaatcctgactttaagctcatagggacgataaaagataaatttcaaacccattatgtagatgctaaacttgagccaaatacaaaatattattatatgatgagaagttttaacaatcaaggtcatatttcagaagatggaaaggtagttgaagtaaaaactatgccaagattagaggctgtcccttttgcacaagctattacaaatctacctagccgaatcaaattgatttggcgtccgcatccagatccaagagtggcttcttatatcatagaaagagctaaggcggatgagcaagaatttaaaaaaatcgccgagataaaaaatcgcttgaatgctgaatttatagatgaggatttaaaaccaggggagaatttcagctacagaatcatcgctgttggatttgacggagtgcaaagtgagccaagttctgttttaaattctacaagcaaggctttgccacctcaagttgagcatttaaatgcaagtttagatggctctaataaagtgattttgacttgggatgctcctaaatatcaagatttttcatattataaggtttattctacgagttcaagcttgcttccttatactcttttggctaaaactgagcaaaattattatgaagatagggttgagggtgctgcaaaaagcaagtattataaagtaaccatggtggatgtggacgggcttgaaagtcctatgcctgaaaatggagtagagggcaaaaccttaggactcccgtcttctcctactgtgattttagctcaaagtacaagtgagggcatcgatctagaatggatagataatgattctagagcagttgaatacgaagttagacgctatggcggagatcaagatgccatttttaagggtataaaagaaaaaagactaaaagatatcaaagctttgccaggcgtggagtatagttatgaggtgatagcgattgattctgttggacttcgttcagaaccttcaaaaagagttaaggcagggcaatagtgccaaattttaaagcgagaagacttaaagaaatcattctaccctttgaaaaagatggggtagaatttgtttggatggcatataatgacaatgtgaatttaatctatacaaaggttaaagaagaaagcttttttctacagatcaaaaaaggagaaaatgaatttgtagttaaggtagataaacatactaaaccttctaaaatagcttatttgcacaaggctttagatatctttaaacaatatttttgcgaagatattatcagcgaggctttcggtgtaaaaaacaatgctttggctgaaaaaactcctttgattgctaatgattttgaagaggtgctagcaagacttggaggaaaaatttacattgaaatcggctttggttcagggagacatttactttatcaagccaaaaacaatcctcaagttttaatccttggaatagaaatttataatccagccatcacacaggtagcaaagcttgcaaaagcacagggtattgataatattttattaattcaaagtgatgctaggcttttactaagcgttcttcaatctcattctatagaaaaaattttcttacactttccagttccttgggataaaaagcctcatcgccgtgttatttctaaagcattttgtaaagaatgcgcaagagtgcttacagcacaaggagtttttgaacttagaacggatagttatgagtattttgattttactcttaaggaatttttggaattctcatcgccacaatttagcattagaaaaaatgaaaatttagaaatttctagcaaatacgaagatagatggaaaagacaagaaaaagatatttatgatctttgggtgtggaatttagacaaggaagaaaacgatgtctttgtagaagaatttgatttttcagatatgcatttaagcagaaatgatttaatgcttttagagaaaaattttaaaaactttaccctgaaaaaagaggatttcttcttgcattttgaaaatatttataagcaaggggaaagtttattgttaaagatagcctttggtgcgtttaataagcctgagcactgctatttacatacagatgagacgattagctttgtttttaaggagccttttaaaatacaagaaaatttaaaagctataaaaatgcttaaggaaagtattaaatttcattttaatacagatcattttcttgaaaattaagtaaaaataaagcataatttacgaattttgaaattcaaagaggatggaatgtcaaatttaattcaagcacataaactttctttaggttatgatgaattagttatcaaagaagctagctttacttttaaagatgatgattttgtatttattacaggtaaaagtggaagtggaaaaagcactctgttgaaatctttttatggggatttagaactcctttcaggtcagcttgaagtatgcggatcttctatgcgaaagatcggaaatttagagcttttaaaattgcgtcagcaaatcggtattatttttcaagattatagacttatacaagaatacagcgtggaaaaaaatgtcatgcttcctcttatgatcaaaggttatagtaagaaagtttgccatgatcaagctagtaagcttttaaagcatgtaaatttgacatttaaagcagataaattgcctaaccagctaagcggaggagagcaacaaagagtcgctatggctagagctttagcgcacaatcctaagcttttgctttgcgatgagcctacgggaaatttggacgagtattcttcggatattatttggacacttttaaaatcagctagagagcttttaggtacttgtgttgtggtggttacgcatagaattccgagcaatttaagactgaattatcgtcgtttcaatatagaaaatggaaatatgaatgaaattttttaaaactcacttatctttgattttgcctttgctttttatgatgtttgcctttgagtttattttacttacaaatgctactttaaaatactacgaagagcttgttaataaagattataatatcattgtcgcaagttctactgaacttgataagaatgttataaaaaccaaactttcttctttttctagtttagaattattagatcctaaggatttgatagagcgtttaaaaaatgatgtttctgataaaaatttaaaagttttgcgggattctttgcctaaattttatagcattaaacttgattatttgcctacgcaaaatgagcttaatactattaaaaatcagcttttaagcataccaagcattagtaaagtcgagacttttgctaaaacgcatgataaggtttattctttacttgttttgatgaaatttgtattttggctgtttttatttatcattatcttgctttcctttgttttatttttaaagcaaatgagaatttggctttttgaacacaccgaacgcgtagagattatgtgcttgtttggtgcacctttttggtttagatctttcatgctgtataagattgtagtggtggattgttttatcgcttttgtgattttatttgtatttttcacacaaatttacgatctttctatagttcaagatagtctaaaggcggttgatattatcttgcctcctattaattttatcgtgcatttgggtgtgatttttttagctactttatttgtatgcttattgtgcgtaaattcggtgatgtttagggtaaagaaatgagaaaaattttaatttttctttgtttttttttgctaagcaatgaaatttatgctaatgctatcaatgaaaaaaccaagaacttagcagaaaataaacgcattcaagagcaagtaaataaaaagcttgaagatttggcaaatgatatattaaatggggaaaagagtttaaaagaactgagtgctcaaatcgaaactcttaattctcaaacccttaagcttgaagctcgagccaaggctcaaaataaagacttaaatttgcttacaagccaaaatacagatcttttaaaaagcaaagccagtatggaaggtaagcttatagctttaatggctaaagattttgcttatgatttgcctataccgcaaggttatgttgaaagcaaggaaagctttatggcttttgaagttttaggcggcttggataaaattttacaagatgaaatttttaagctttctaaggattatgaggatataagcaaactgattgatagcaagcaaagtcaaattaaaaaaatcaatgaggatttaaaagattacaatgctcaattagcaaaacttcaaaatctaagacaaaagcaagttaaagaaatcaataaacaaaaaactgatcgtgcgatttatgctaagaaacttgagaatttacaagatcagcaagatgagttaagaaaaactctaaatcagttaaaaattatagaaagtaaacaagaagacaaaaaacaaacccaaaaagttgttagcgatagcaaaatcactaacaatactcaaaaaattcgtcaaattggttctagctatcaaggaagcactactaagcgctatacaggtaaaaaaactatagctcctttagaatcctttactgtaaagcaaaaatttggaaattatatcgatcctgtttataatattaaaattttcaatgaaaatgttgttttaagaagcaaaaaatccgatgctgtggtaaaaagtgttttggatggaaagatagtttttgccaaagatacaagtatgcttgcaagagttgtgatagtcgaacatgataatggaattcatactatttatgcacacttggataagatagcgcctaatatcaaagtgggtaaaaatgtaaaaaaaggtgcggtagtaggcaggataaaaaatgatttaacttttgaagtaacacaaaagaattttcatatcaatcctttagaacttattagcttaaattagctaaatttaatggaattttcaatataatttcgagttgattaaggagaaaaaatgcaagagaaaaaaagagttttagtaaaattttcaggagaagctttagccggagaaaatggctttggtattgaaaattctattttaaaattcatagcgaatgagattaaagaactagttaaaaataatatagaagtaggtatagttataggtggtggaaatatcattcgcggtgtttcagcagcaaaaggtggtcttatcaaacgcacaagcggtgatcacatgggaatgcttgcgactgttattaatgctattgctatccaagaagctttagaaagttacggacttgatgtgagagtacaaagtgcgatccaaatggaagctttttgtgaaacttatattatgagaagagctcaaagacatttagaaaaaggcagagttgtaatctttgctgcaggcacaggaaaccc

SEQ ID NO: 3775 - DNA, 22988 bp, synthetic construct
  misc_feature 1..22988: note = Synthetic
  source 1..22988: mol_type = other DNA
catcaggctcactcaaaatacctgtttgtgaaagttgttctataatatttgcagcacggttatagcctatttttaatcgtctttgtaaataagaaatacttgtttttttatcttctaaaatcacagccttggcttcttcgtaaagctcatctaaatcactatcattaaattcgctttttctataaacactatcttgattatcatcttttaaaaagctttcatcatattctaccacttgctgagcttttaaaaactctactatattttctatttcactctcacttgcaaaaggcgcatgcaaacgcacaagtccacttactccaggaggggtaaataaacaatctccacgccctaataagctttcagcacccatagaatctaatataaccttagaatctatcttttgtcctactttataagaaattctacttggtaaatttgcttttacaactccagtaaccacatccactgaagggcgttgtgtagctacgattaagtgaattccactagctcttgccatttgagccaaacgacctatataaaactccacatctttgcctgcagtcatcattaaatcagctaattcatcaataatcactacaataaatggtaagatttctccaccttgttctttgattttttcattgtaattttctatatttttagtttttgcttcagccatcaaacgataccttcgctccatttcagctaccatatttgataaagcatttacagcctttttaggatctgtgataactggagtaagtaaatgcggtatatcattataaatactaaattcaagcattttaggatctatcatcataagtcttaaagtttttggcgaatttctataaagcaaagataaaagcatagaattaattcccacacttttaccacttcctgtagttcctgctatcaaaagatgaggaagtttcttaagatcagttacaaaaggatcacctactatatctttacccaaggctatggttaatggcgaacttgaatttttaaacacttcactttctaaaatttctcttaaataaatagtattgattttttcatttggcacttctatacctactacatcttttcctgggattggagcttgaattcttattgtttgagcctttaaagccattgccaaatcatcttgtaaagataaaatcttactcactttaacatcagctgctggacgaaattcaaaagtagttacaacgggtcctgtgtaagttcttactacatctccacctatcttaaaacgtcttaacttttcaagtaaatcataaatttttctatcgatttcctcttcatcaatttcacttttatcttcttttgacatagttagaaagtccaaaggaggtaaagaaaaatcttttggtttttcaaaatttccaaaatcaagatcttttaataaagctttattttcacttacttcattggtgatagaatgatgaattttaccttcaaaatcttccactaaaggtttttgaatattatcatctaaaatatcatatatggctgtgttttgtattttttctactacaaaagaactttcagaggattttttgcttcttaattcttctatgcttataggtttagtaaattcatcttcactaaaatccaattcttttgtttcattttgcgggataaaatcttcatctttaaagtctttaacccctaaaaaacttgttttatcttgaatttttttaaattcaacttctttttgagcctcaatagcatttaattcttcaatttttttaaaatcttcgcttaattcttctaaaattttttctttttgcaaagctttatattcttctaacaacttcgctttttgcaacatctgttcacgctctttaagttctttagcaaataaaaaattttcttctatttcttgttctttttcttcatttaaatctatattacgtcttttataacttggttcatctaaattcttgcttattaaagtttgagtataaatatcttcacttttgtttttatattttgataaatactcttcaggggtcattttattttcctttgtatttattttacttgctttttgagcaaaatttgcaataggttctgaaagttcatagatataacttgtccctaattttttatcttcttcgttaattgtcacttcttctaattcttgattttttaaatcttcaagattaaattttttattttcttgtgtttcttgttttaataattcgtttgactctttatctttttctattttttctttgattaaaagttcttgtttaagtttttcttgttcttcctttgtttcattttcatacttatcgccaccaaagaaaccaaatattttgtttttcattaaagtttcaagttttaaataaaaatcaaaatctaattctattttaaaaatttcttttatcacttgtggaaaagaaatactaaaagcaaaaactaaaagtaagattaccaaaatcaaacttcctatttttccaaaaaaatcatttaacacaacaaacatagccgatgctatataacctttatcttgcaaaaacattgatgcaaaaacaaatgaagcaaaaatacaagtaaatacagctacaacaaatctacgctctataacctctaaattataattatttttatacaaaagataattaaaccaaaaaaagataaaaggataaactttagtcaaagaaccaaataagaaataactaagctttgctaaaaaataccctataatgcttactaaagcttgttcgggtattaaagcacataggcaaaaataaaaaattgaaatatttaaaattacaaaaatagcttctttttttataacacatcctttataaaagaaaaaagctattatatcaaaaaattataagtagtttaataaactaatctgagaaattttagaagtggctgaaagcatagcttgataagaaatcatagtttgcataaattgcatatatgtttgtccataatcagcatcagttactccacttttaatagaagctacattaacatttaagaaagtcattcttttattagtctcttctatggtattagtatatgaacctatggttgtatgcatttttcttacatgatcttgtaaatgatctattctttctaatgcaccttgcaatcctgtatttctaggatctttaccttcagaatcagctctcatattgccatttaaaacagcatcaatcatttcatctaaatctttaatcaaatcaacatttggatcatctattgttagtgaattatttgcactaaatacaaagccagaaccactatttacttgacctccagtcgtaggaaaacctgcatttgaattagaatctttaatagttaatcctatattggtatttgttgaaaatttatcactaatagtaatacgccctttataatccatacttacttctataaaatccttagaatcagaaatatttgtttgaatggtttggaaatcactattactaatagtaccaccagtacctacagatatacttgcagttggtgctttatcagccgcaaacatactaataatatcatttaactgtccataagtgatatcttcaggtcttgtctgtacgcccgatgaagttccagttgcttcgttatactgagaatgtattattggaaaatttatatttgctccagttgccggatcaacataactgaccatagaatttccaagatcaatttctactttatagttttgaccactttttgaagtgatattcatttcaagcttttgaccattcatacttccatttgcattagctataacttcacttaattttgtactttctgtagcatattcgctggtacctttaataatttgcgaaacatttccaaatactttatttccatctttttcaaaaggcacatcaaaatcacctccattagtcctgttgccattaatactgctttttataaaatctgttgtatgaatattcatagtgaaattttgtccattaactgtaacagtgactggatttacagcattatttaaatttccaccatgagttgcttgcataatacgatcagctaactgatccattgtaataccttcagctgcagctgcagcacttaaatctttaatttcttctgcatcctgaagttgtggagtcatagcaacagcgtgaaaatctaaagagctatttccttcttttaaattttttatttcaatctgcccactatcattcatagtaacatctacaactttattgccagcggtattgccatataattttcctatattctctaagacatcacctattttatcttcaggacctatattcaaagtagctttaaaactggttccatcaggtctaacaccttgaatatacatagatgaacttgggaaaggtaatttactatctatataatcaaaatctttatcaggatctaaaggaccatgttgaacataattttgtcctattaaataagaaaatttagaattttcatctaaatattttttttgttcaggatttttcataacatcataacgattatctataaaagatacattagtagaaataagcttattctcattagaatcgggcttaaagaataaatcccaacctggtatattatatggtatttgcgtaccagctccacttacaacaaaaatattatctttattgccagtataatttccatatttatcaaaaggtttagtagctgtatttgatccagcaaataaatattgcccatttatactagtattagcaatatttactatagattcttttataagttttaattctttagctattgcttctcttgaagtttgtgaattcccatcactagatgcttttaccaaaagagttttaaatttttctaaaagctctgtaatattttttaaagctgtatctgtatttttagccatttcttgtgctgctttagttccctctataatttgacctatattagccatctcatattctaaccttgaaccattaatatagatatttgcattttcccaagaatgctgaataatttgtcctgtttgtaattgcaaattatacttgttaagtaaagattgcccatctgtgtaattttttattgaagtataaaaagtgtactgattactaattctcatttttttgctccacaagttatttatttttagattttataagcaaaaaaagttccaatataaaactattcttaatgcattcatatttatattattttaaaaaaatatatattataattcaaaatttataaagcctgagtggtgaaactggtagacgcgccagactcaaaatctggtaagggcaaccttgtgtcggttcgagtccgacctcaggcaccatttgttttttactctcaagtgttattttttaacaaattatatttaaaatctcaaaaatagagtttttatattttcaaaaatagctttttgtatattatataaatataaataaccataataacaatttattttacatctaaattatatattaggtataaatctttttcatagataaaactgattatactatgtgagttattatcatactttataatattttctaaagctttgaaaatcactaggaactttgataatcaaattttcatttttaagttttaatttcttaaatgataggttttattgtcatagtaaaaactttggtttaaaaatatttttttaaaaatgcatagtctttatagaaaaagcttcttgataaattttatttaaatttatatctagattaatataaacctttatatcactcaaggttattgatttaatatcatcataaaaaacttcatcttgtgaatttgggtttacaaaaccttgttttaaaagcatatatctactaaaacccagttgcattcaattgcattacccaaattctttaaaaatagcctttataaaaacacgatattttctaaagcaattgcaaagtttttattttgattaacaaatcacacacttactactttctactttcccctacttcaatctcgcattcataatcatattagataaaaagatattatctttatcaaagccttttaagttatattctagttttaagtatcttttttgtatatcttgtattaaagttgaaagattgtataaacttaaactttctaatatatttataagctctattttgcttaaagtattaaaatcatttaacaagctaagataattacttataatagaagaagaattgatattatgaaatacaattttattttttatatcttctttaataaaaaattgattattttttatataaaaataatctttaagatgattattacttaatatttgattataaaaacctgaaagattttctttattgtttaagtctataaaatttaaaaatatattttcttttgataatacttcttgtaattcttttaagtttttaaaagattgattgatactagaagtattttttaaagcataaatgatattttcatctttagaaatttttctattaatattatattgtaataaagtgtttttataaagtgtatcactattgattaagatattaatataaaaagatttctttacttttcttagttaatcgaagcaaagataaaagcgtagaaaagataaaacatcttttgtgacttataaaattcatttactacttcaccataaccccaagtaaagatgatatgatcatcatctatatttgtagcaccaaataataaagaaggtgcaaaaaataaaacactaaagaataaaatataaaatcttttcatcagttgtattaaagaagttaaaagtttgtttggtataattgtattaagggtgcaacgccaaaggggcgcaaccctttagcgttaatttaccgcccagaagggaggtgagcttaatgctaataaaaattatccttataattatactcttaacgctttgctatgtcaaggcttattgagtatcccctgcttttgcagggtttaggataatccctttggcttaccaaacaaacttttaactaaactttatctcctttcttttagttttattttctttttaattagcaggttttcttgttaaattctcaagattgctttcaatcttttcttgtatttttatagaatcagcttgtatcttatctacatcaatacttccaacaatatcagcaataaattcacttaaatctatttcgctaaagtctaacttttgaaattcttctggagtaaatcctctacaatcaggactctttggagaaccccaccctcttttaatttgtgggcgtccttgctcattaaatattcttgctaattttgaattaaaacaacaatgtgtttttttatgctgaatacaacctataaatttaatttttttagagcaatattcacctatttcaacacatctattttgcttattgagttttgctaactttttttcatcttctttacaaggtacaagccctataaatactttatctttatcacagcaaccaccaccagttaagccaaaaaatttgtctttagagcgacatctattatcttttccattaaagataaaaatttgtcctccacaagaaccatcatcttcccagccattgttgtttgcgtcattaataccaacttgagtatcctcatcttcaatatcgctagcaccttctataaaatacaatcccaaaatcaaaatagttattattttaagcatacaatatttctactagcttctaaaactgtctaaagcatagtattcatattttattttaccagtataaacatagtataatgtagaatttataaatattagaaaaaaatttaaatagtaatggttttaaaaaatgtttatagcattgaaaaaaatagctaaaattatatcaagtgggggggggttaaatctttaaaatgaaatttaaccatacaaattattgaattttaaaaagtatatgttattgagatatttaatttttaaagtatggatacttaggggtttgattaataaatcatatggcgacctcgggcaccattatatttcaaagtgttttctaaaatttttaaaaaactcagggagcagtttttttcttaaaaattaattttaacactctatattctaaaataatacaatttatcattataatccaaaaaagaaattgacttttataaaaatatttaaaaaagaataaaatagaaaatacattctacttttttacattcaattgctaattcattctctatttctttttttattaaaagaaaacagtataaaactaaatacattaaattttttattttattcataaggctttaaaaatagttaaaccattaaaacatatgaaattttataattattagtattggtaaaataatggtttctaaactttttcggttttttgcttttagggttaagaaaatattattttacatatatcttaatctttttatcgaaaatataaaaaaaattattttaatttaaaattattataaaattattttacttagtatttttaactagtgattagccaaagctatgatcttttttattgttaaatttcaaagaaataattatgattaatcttgatgttataattaaaattaatttaacactattattcttattttataaaaaaactaaaaatttattttagttggatcactagcttaaaaatactctcattttttcttaaaatatatcttcatttttttaaagttatgaaaaaatatccaaaaaatcaaagttaatttttttcttaaaaaaataaaaatcacaccctttattttgataaaaaatctagtaaaaaatggaaattttaagccgtattttaaagctttgttttttgggttttagaggttaaaattcatcaaaaatagcccattttttaaaataatcattactccatgctaagtagatatgccattttcgttacctttaatgcaaaaaagtatatatttcgtatattttggtaaattttttgtgatttttgtatgataaaatatcgaaaattgttgttaaaaaaggtaaaaacacccatgataaaaaacattttttctaaaaaactatatctgctgataatcctaaaaatgagataaaactagatgaaactcctacgcaaaacaaaagtgatagattagaaaaaataattcacacttgggtagtaaattgcactaaatattctttaaaaaatccttatgatacaagacgcattaacagaaaaaatggctgtatcaaatttgtcttaagtgtctttgagaaaactaaaaacaaaaatgctttaattggcattagctcttcactttacgataaatataaaaatatctataaatcaaaacttgctagagtaaaacactcaagcaaaataaaaagcttacaagaaaaatatcctgatttagatattatcaatgcttacaaatacgccatattaagcaataaatgtgctttattaaatgaagatattgaagattttgaaaatattataaagattttattacaattaaataccgccaaatataaacaaaaacaagcctaaaatcaaaaatctactataaagtaatatcaatatagcattaaataattaaaatctatttatgagcttgttttgttagattatgttaaggaagtggtgttttagttattatttgtgtaattttggcaagatcaaacggatcttacttgccgtgatgatagtacattatagcgaatttattttaaaaatctacatagcatatccatccatagcatttagtactttttactatcttttttaaagcatattgtaatagagttttataatttaaagctaaatgtagtaagatagtattataagctactaaccacttagccatttcttgcattaaattctttaagatctgtaaaaaaataaatctttataataattagaaatctttcttttaaacttctattttctttcaaatttacttcattgcaaatttattgtttatcttttattgaaatgtcttctcacaaaaataagaatgatttcattttgtttttagtatttttttacattaatttttgtaaatttataataaaacataaatgcttatttaggatcaaaagatgaaagttataggctttgatataggaattaattccataggttgggcttttgtagaaaacgatgagttaaaagattgtggggttaggatatttacaaaagctgaaaatccgaaaaacaaggaatctttagccttgcctagacgcaatgcaagaagttctagaaaacgccttaaaagaagaaaattaagattaatcgctatgaaacatattcttgctaaagaattaaatttaaattataaagattatatagcaaacgatggagaattacctaaagcttatgaaggaaaattaataagtccttatgaattaagatataaagctttaaatcaaaaattagaagctaaagatttagtaagagtgattttgcatatagcaaaacatcgtggttacatgaacaaaaacgacaaaaaatcaaacgacgccgaaaaaggaaaaattttaagtgctttaaaaaataatgctttaaaattagaaaaatatcaaagcgttggagaatatttttataaagaatttttccaaaaatataaagaaaatactaaagatttcattaaaattcgtaatatcaaagataattataataattgtgttttagcaagtgatttggaaaaagaattaaagttaatcttagaaaaacaaaaagaatttggttatagttatagtaatgactttatcgaagaagttatacaagttgcattttttcaaagaccattaaaagatttttcacacttggtaggaacttgtactttttttgaggaagaaaagcgagcttgtaaaaattcatatagtgcttgggaatttgtagctttaactaagattgtcaatgaattaaaaagcttagaaaaaataagtggagagcttatatcaacacaaacaataaatgaaattttaaattatattttagacaaaggaagtattacttataaaaaatttagatcttatatcaatctatatgaaagcattaaatttaaaagtcttaaatatgataaagataatgcagaaagtgcaaaattaattgactttagaaagttagtagaatttaaaaaagctttaggggaacactattttaacaggcaagaactagatcaaatatctacatatattactttaataaaagataatgtcaagctaaaaactgctttagaaaaatataatttaagcaatgaacaaatcaataatttactagaaattgaatttaacgatcatattaatcttagttttaaagcacttagcatgatacttcctttaatgaaagaaggaaaaaaatatgatgaagcgtgtgaaattgcaaatttaaaaccaaaaacaactaatcaaaagcaagatttccttccagctttttgcaatagtatattcgtgcatgagcttagcaatcctattgttaatagagctataagtgagtatagaaaagttttaaatgccttgcttaaaaaatatggcaaagtacacaaaattcatttagaattagcaagagatataggacttagtaagaaagcaagagaaaaaatagaaaaagaacaaaaagaaaatcaagcaatcaatacatgggctttaaacgaatgtgagaatatggggattaaagcaaatgccaaaaatattttaaaattaaaactatggaaggaacaaaaagaaatttgtatttatagtggcaagaaaatatccatagaacatttaaaagatgaaaaagctttagaagttgatcatatatatccttactcaagaagttttgatgattcatatatgaataaggttttagtttttactaaagaaaatcaagaaaaactcaataaaacaccttttgaagcttttggaaaaaatattgaaaaatggaataaaattcaaacattagcacaaattcttccttataaaaagaagaataaaattttagatgaaaattttaaagataatcaacaacaagattttattagtagaaatttaaatgatacaagatatattgcaactttaatagctaaatacacaaaagaatatttaaattttttacctttaaatgaaaatgaaaatataaatttaaaaagtggagaaaaaggaagtaaaatccacattcaaactgtcaatggtatgcttacttcagttttaagacacacttggggttttgataaaaaagatagaaataatcatcttcaccatgcacttgatgctattatagttgcttatagcacaaattcacttataaaagctttttcggattttaaaaaaaatcaagaacttttaaaagcaaagctttatgctaaagaacttacaaatgataattatatacatcaagctaaattttttgaaccttttgaaggatttagagaaaaaattttaaataaaattgatgaaatatttgtttcaaaaccacctagaaaaagagcaagaggtgctttacataaagaaactttttattctgaaaaaaaaatgattaaaaaatataattctaaagaaggtttaaatatagcattagattgtggaaaaataaggaaaataggcacaaaatatgttgaaaatgatactatggtaagggttgatatctttaaaaagcaaaacaaattttatgccatacctatttatactatggattttgctttaggaattttaccaaataaaatagtagttattggcaaagataaaaataacaatccaaaacaatggcaagaaatagatgaaagttatgaattttgtttttcattatataaaaatgatttgattttgttgcaaaaaaaagatatgcaagaagctgaatttgcttactataatggttttgatatagatagttctcgtataaatattaaaaaacacgataataaatttgaaaatttaacatctaatcaaaaattattatttacaaataaagaaaaaaacagaacaggaattcaaaatttaaaaatatttgaaaaatatattgtaactccacttggaaacaaaataaaagcagattttcaaccaagacaaaatatttctttaaaatcaagtaaaaaaaatggcttatgatgaagcttttaaaagtgtattgattgcaaatcaagcaaaactaagctttgaattaaatcatcttgtaataaaacaagatgataaagaggttagaatttttctaaaagatattaattttattatattagagtctttacaagtaagtattacttctagcttacttagtgctttagctaaatataaaattatacttttaacttgtgatgaatatcacaatataaatggaattttttctccatttttaggacattttataagtgcaaaagtggctaaaagacaaattaaagtaagtttgcaaagaaaagcaattttatggcaaaaaattattaaaaacaaaattttaaatcaagcttatgttttaaaaattacaaatcatcccaaagaagctaaagaacttttaaatatggctaaaaatgtaaatttaaatgactctaaaaacttagaatcaactgcagctgctttatattttaaaactttatttggtaaagattttgcaagaaatgatatatgttttataaattcaggattaaattatggttatgctattataaggtcgcttatagttagggctgtttgtataagtgggcttttaccatggcaaggaataaagcatgataatatttacaatgattttaatctttgtgatgatttgatagaagtttttagaccattaattgatttgagtgtatttaaactaaaagatataaaagatagtgaatttttagataaagaaacaaaacaaaagttaattggtattttgcaagaagaagttattcttgcaaataaaatttttcctttaaatagagctataaatttttatgtgcaaaattttaaaaatgctttattagaaaatgatgaacttatgatggtattttatgatagaagataaatttatgagagttttattgatgtttgatgttcctactaaaagcaaaaaggaacaaaaaaatgcgagtaaatttagaacttcattaataaaacttggattttttatgatgcaatttagtgtatatgtaaaaatttgcaaaggattaacttcggcaaaaacaacgataaaatctatagaaaaaattttaccaccttatggaaatataagagttttgaccataacagaaaaacagtttgataatatgcaaattcttttaggtggggtttcttttaatgaaaaaatgaatgatgataaaaatctagttttatttgaatatgatgaaaaaagtaaagaatttaagtatggcaatgaaaaaataagcaaagaaaagaaaaaaactaagtttatacaacctagtttgtttgaattttaatggttttaaagggattgcaaccctgcgtggatgaccaaaaaccacttattttagtctctttttaaatttctttagtaaaaattatatcataattttagatatttttttcataaaaagtatctatttttctttgtttgataaaagtggattttatcataaagaaatttaaaaagagactaaaacgatgaattcggatatattaaaactagtggtattttatcataaagaaatttaaaaagagactaaaacaaaataatactaataaaatctaatcaagatattttatcataaagaaatttaaaaagagactaaaacctaataatactaacaaagcttgaaagtcttattttatcataaagaaatttaaaaagagactaaaacttaatggattaattaataaaagagttttaattttatcataaagaaatttaaaaagagactaaaactggtttagacaccacaactcacgttggtgaattttatcataaagaaatttaaaaagagactaaaacaaaatagtttcatctcttgtagatgaaattattttatcataaagaaatttaaaaagagactaaaacgctcaaaagctcgctcattccaaaaattatattttatcataaagaaatttaaaaagagactaaaacctacaatcaaaaggaacttcaacaggtgtaattttatcataaagaaatttaaaaagagactaaaacacaaagcccgtcgtctaaatttacgacgaaattttatcataaagaaatttaaaaagagactaaaactatactttgactatattatcactatcatttattttatcataaagaaatttaaaaagagactaaaactttaaaataccataaaccttaaatttattaattttatcataaagaaatttaaaaagagactaaaaccgaggatgctctttatcatatattagctctattttatcataaagaaatttaaaaagagactaaaaccataatatgcactaattatattacaaactagattttatcataaagaaatttaaaaagagactaaaaccaagctatggaaaagtctttggttgatagtattttatcataaagaaatttaaaaagagactaaaacttaaagtctattaatgatactttgttatttattttatcataaagaaatttaaaaagagactaaaaccttccgcgtggtattaataccgctcttcccattttatcataaagaaatttaaaaagagactaaaaccaaaacaaacttataccctatgtcatagaaattttatcataaagaaatttaaaaagagactaaaacttgggaagcgtaaataataaatacttagaaattttatcataaagaaatttaaaaagagactaaaacttttgaagaattcattactggtcgcggtacattttatcataaagaaatttaaaaagagactaaaacccaaaaatatcttttttgtattgtctatttattttatcataaagaaatttaaaaagagactaaaacaaaaaggtcctcaagttacaattcctgttgattttatcataaagaaatttaaaaagagactaaaactgacattttggtgccttgtggtcaatgtctattttatcataaagaaatttaaaaagagactaaaactgtttgaatattgattattctaaacaagtaattttatcataaagaaatttaaaaagagactaaaacagagtagttttatctcttgtagatgatctaattttatcataaagaaatttaaaaagagactaaaacacttatccccattaatgttgttgatattctattttatcataaagaaatttaaaaagagactaaaaccagaaggtttcgactttatggtaactctagattttatcataaagaaatttaaaaagagactaaaacataacttttttatatgcttcatcttttgtaattttatcataaagaaatttaaaaagagactaaaacctttctccctctacctcaatcacaacatctattttatcataaagaaatttaaaaagagactaaaacctaggatgctctttatcatacattagctctattttatcataaagaaatttaaaaagagactaaaacgtaattagaagtgcttatcaaatgtgtcaaattttatcataaagaaatttaaaaagagactaaaacagaaagggtcaaatataaccattcctgttgaattttatcataaagaaatttaaaaagagactaaaacttctgagcccaaggacgagaagtagtaaaatttatcataaagaaatttaaaaagagactaaaacatattgttatgatataattatacttataattataaaggagtgaaaatgcaaaaacaataccccgaagtgcatagcttagaagaaagtcttgcgatacttaaaaaatataaagatgatttgactaaagagcaatatgaagctataagatcaaatataggtaattttgcaatagaagatatgtttttgaatgaaagaaacattattgataatatcaaaattttaaaaggtgaagcgacagctaatgaaatcatcactgaatataaaaaagaatggaaaatatcttaatgtgggattctcaaggaaatttatcagagtttgataaatttttaatcaaaactaataaaataggtgcaaaatcattagatgagttatttcacaaagaaagagatataaccagtgcaaaagccttggaattaagcaaaaatcccattaaatgcaattttgattatcagcatttaaagatatacataaagcactttttaaagatgtttatacttgagcaggacaagatagaatgcaaatgggactaaaagaaaaatttgcaaaatatgtgcccaatggagcaattattaattttgttcctagaaaagagttagataaatactctaaaataatttttgatgaacttacaaaaaataattatctaaaaactccaaagatctaaatcattttgcaaaagatttagcaaattttatgtcagatctaaatgctttacacccttttagagaaggattttatcataaagaaatttaaaaagagactaaaacaaaatttgattttaattcattttctattttagaacgcataaatcagacatatcagcttttttacccttaatgtctttttttagcattgagtataaattctctaaagacagcacctaaattacctataacatcaagattatagtctttattctcttttaaaaaatcatcaaatcttttccatttatcatcatcattcattttttggtttttgattttttcatcaagtttttcttttatactctttttgctttctttagctttgatattatcttttagcttttaaattaagttttctttaggccttattttgggtagaatttcttaaaaataaactcgtggtatttcgcatatctttgccaccttacgagtttatattttccacttctgccatattttctttaggatgtacattggcctaggaagtgggcttaattcttctaattccaaagaataaatactataaaaacaaaaaataaaatttgaaaaaattgtatttatccaaccaatgctaatattttaaatcattatagctttaaaatcaatccctttaaaaacattcacaagaaaatctttgtaattttggaatttctaatgagagtttgtttatattttttaatatatctttgcaaaaatcattgatattttcctttataccataataagcccaaacaccttgtctatccacatctaacattcctgcatcttttaaaatctttaaatgccttgaaagtcttgactggctcatatttaaagaactttgcaaatcacaaacacaaagttttccgtatttttgcaaaaatgctaaaatcataaccctgctttcatcattaatcgcacctgtaatttttaaaaaaccattcataattaacccttatatataaaacattaaaagtccaaaacaaattgctataaaaacaattgcactagcaaataatactaaaaaacttgttttaaaaaatctttttaacaatacaagttctggtaaagaacaccctgctccagctatcaaaaaactcatcattacactaagtggaatgccactagttgttaaagctagagcaataggtatcatagcagtacaattcatataaagtaaaacccctataaaagcagctataaacacaccataaattccataatctttcatataagtttcaaaaaaatttgaggaaaaagaccatgtataaatgcaccaatacccatacctataattatataaggtaaaatttttttatattctttaaaactttgaaaaaatatttctttgattttgtttttcttagcttgagttttaaaattaaaagctttaatagtgtttttaggattttttataaaaattaaattagttttattgttttgataattagtatttttagaacaacaagtttggaaagtttcctttaaatcattttgcaaaaaatctgtcggtggaaaaataaaaatacactttttggtgtaattttaattttccacaaagcttaaacttaaaatgtaattattatatttattttactttatttttccaaaaatcaatatttttttatcaattttggatttatttcagcttcttttattaaatcatttatacaatcaattcttttttgcctagatttaatggtttttagtttcttagcgtcttcataatacttaacacattgattttcaaaaagacttacatcataattatcttttaaaaactgaatgatatcagcaattaaaccataagctttagggtgtcttttttgtattttttctttcatttctaatgcaagtttttctatcttctgcagtatctttattttttgattttaaagctatatcaacgctttcttctgcaatttgaataaatcttaacacttctacatattcatcatttattatttaaaagcaagttatgtaaaaatttttcttgctcatttatagaaaggcttttgtattctttatatattcctttatatgagtcttctattttttctaaatctttttgttctttttttattttaaatttctcatttattttttgcattttttgcttatatttattccaaatttcttttagcgacttatttgatatgtctttatataaagggtttaaagagtgtaaaattactccattatcttgttttaaaacttgtttgataaaaagtccatctttagtattgactacataaatacttctatctttgataattggttccatgctttcaccatagcaagtaataagctcacaatcttttgttttaaaaaaatctaatatcttttgatctattaatatgttttcaaagtctaaaatatcattaataccacctccacctaagctagcattggttttatatagttttaaaattttatatttgtattcacattctaattgatcttttggagagcttccataaaagaagtaattaatactaatatttcttttttctaagaaatttaaaatatgtgcataaggaatggagtttctaaacttcattgagttaaatgtgtctgggtggatacctaattctttagctatatcttttgtttttaaattatttttgccttcacttgcaagtatgtcttttaacttctcaattacttcttgcatttgcatgttaaatccttttattttaatttaaaagaatttaacaaaaaattacaaaaagcaatgaaaagattttattttgaaaggtttaattataagtataatttttacactattaattgattttaaaaaaacaaatttttcattaaataaataataatttataatcttaaattgattttttaatatataaattatataatccttgccaattaaagaatcaaagccatcaaaaggacttatattaatgaaaagctttaataccatagtaacaaccagaacaatcaaaagtgattctagtattatgagattaaatccaattagcgaagcaatcaagaatgctattgatgcaaaagcaactcatattgatatttgttttgaagagtgcgaaagcgatggtttgtttgataatagtatttctatcaccattaaagacaatggggccggctttaattgtttcgatgatcaatatatgcaaaatagatggacgcattataaaggtggagattatattaaaaatactttaggaggaagaagcagaggccgatattcttatcttaagtttgttgattttgaaaatgaatgtttgagtgatattaaaatatatacaaaatataacaataaaagttatagcgttatctttcaaggtgaaaatcagaatataggatttagcgtcaaagaagaagttgcaaatcacacagaaaattttacaacgaaattatatatcaaaagactaggaaataaatttattaatggcaatacaatagaacagatgattgaaaaagcaaaaaaagaaattatagttgaattttcagataaacttctaaagggtataactttatctattaacaatataaaaattaatgttgaagaatatatagaagaacaactggaaaaagagtatgaattaaaaaatggacaaaaaattagtgcatatatggttgtttggaaaaatgagattgatttggcaatcgataaaaagcatgtttttttatttaatattgataacattcctcttggaaaaataccatctggttgtcaaaaatcaatatttaactgtcatactgtatttttaacgagtagctgttttgaagaggattgtgaatttatcgatattaatcctaactataaaaaaattatagaggaagccaagaatttatataaacctgacttagataaattattatataaagtttggcttaaaaatgcagatttgatggctaataaattagcagaagagagtgaatttttcaaagatgaaaccgataaaatgatacaagaaaaaattaaagaagcgtatatggttttatctttgccgttgcttataaaacaacataatattaatcgcagcaacgcatcatattttagcaactcgctaataggattaatttcagataattcttataatacacttgagaatttggaacttgtttttaatttagaaaaagaagatcatgaagtttttaattatgtaagagagaatgttaatattctgaatctaataaaaaaatattataattatatatcaagacttgattttttacagcattttgaaaatttggtattaaacgaagggaaggcagaaacaaaggaaagaaaggagctacataaaattgtagaaaataatttatggttgtttgatgaagaatatctaaatcttgatttttttagcgatcaatcattaaaaggaatttttaatgaaataaaattaccaataaatatagatagtgaaaatcaattaaatacaattccagatatttttatacctcgtactaaggataatgaattaatacttatcgagttaaaatcaccaaaagtagaaataaattcatcaatacttactgatgtgtttaataaatatatcactaaaattcttaaatcattatcaaagcaaggaagtaatattgattatgtgaaggctatatgcatttcatcaaaaaagcaagaatttacaggaagcttaactggagataaatatagcataaatccaatgacttggaaagaaataattagtgtaagaaaaaaagacttggaaaaccacataaaagatgttaaaagtaatttatctttatcaaaatataaagatattcacaattttaaagaaaaagaaataaaaagggaaagggttgacaatttaaaaaaaatataaaaatttgaatattttatatagcaaaaaatttccaatatgataattatctaagcaaaactatattttatttataactacctgtctattatttattttttaaattatctagtaatgttaagctttgtacgtaactatcctccaaaccttaaagctatatagatagttacatattatttttgtataaaaagtggttaaactatgattatatagtgttttataaagatagttacattaaaaacaaaacataagtttattttaagtaaaaatgtaactatctttggagagtaaaacattttttaggatttaaaatttaaaactaaacttcgcctttacatgccttttaaacagtatttaatcactttcttgggataaaacggatattttgggatatttgggatattttatgctttgaattgagaaagataaaaatgtatttctataagctttaaaagcctattatttagcatttttgctaaaattatttagagatagttacatattctttttaaaataccccttacaaaatctttgttaaaaaaatttgagtatttattttagaaacaaaaaacgcaattaatataattacaaaaaacaaaaagcctatataaaataatgaaaatttaaacccaaaacttgctataaacataacaactataacaggattaatcaaaggtgaagtgataagataagctatgcaaactccaagaggtactttagcttttaaaaaagcatttaaaagcggaatactagaacatgaacaaaaaggagttaaactacctaaaataattgctttaatataagttataaaagattctttttttaaatgttctttaaaaaaaattagcataacgttcgttgataaaagctaccaaagaattcactaaaataaacaaaacagatat

SEQ ID NO: 3776 - DNA, 22985 bp, synthetic construct
  misc_feature 1..22985: note = Synthetic
  source 1..22985: mol_type = other DNA
ttagttggaaagcaattaggcgagcagatttctgatgtttttgaagcagaaaaggaaaaatggttgggcgagcttagaagtagaatgctagaaattgcagaaacttcaggtatgaagagcgcaaaagcatttttagagagccttagcgatgaagaactgcttgtgtatgctagagattggagtaagggtgttaaatttgctactcctgtatttgagagtgcaaatgaagaggagtttgctaaactctttaaacttgcaaaaattgattctgatggtaagacagagctttatgatggacgcacaggcgagaaaatgatggagcgtgtaaatgtgggctatatgtatatgttaaagctccaccaccttgtagatgaaaaagtgcatgcaagaagcacaggaccttacagcttagtaacgcaacagccagtaggtggtaaagcactctttggtgggcaaagatttggtgagatggaagtatgggcactagaagcttatggagctgcacatacactaaaagagatgcttactataaagtcagatgatgttgaagggcgtgtgaaagcttataaagcaattacaagaggagagcaagttaaagaatcagaaatcccagaaactttctatgttctaacaaaagaattgcaaagcttggccttagatgtaaatgtgtttgctaaaaatgaagaaggtgttgaagagccagttgttatcaaagaagatgagcgtccaagtgactttaatgcattccagcttttgcttgctagtccagaaaagattagaagttggagtaatggagaggttaaaaagccagaaacaattaattataggactttaaagccagaaagagacggattattctgcgcaaaaatctttggacctgtaagagattatgaatgcctttgtggtaaatacaaaaaaatgcgttacaaaggtgtagtatgtgaaaaatgtggtgtagaggtaacaagttctaaggttagaagatctagaatggggcatatcgagcttgtaacgcctgtagcgcatatttggtatgtaaattctcttcctagcagaattggaacactacttggtgttaaaatgaaagatttagaaagagtgctttattatgaagcatatattgtaaaagaagcaggagaggctttctatgataatgagggaactaaacctgttgcaaaatttgatgttttaaatgaagagcaataccaaagtctttcacaaagatttgagcatacaggttttgtagcacaaatgggtggagaagcaatcaaagatttattagaagagttagatttagtggagttaatttcacaattaaaagagattattaactctacaaattcagaagctaagaaaaagactattattaagcgtctaaaagttgtagaaagctttgtggtttcagggggacaaaaccgcccagaatggatgatgctaactgttttaccagtgcttccgcctgatttaagaccacttgtggccttagatggtggaaagtttgcagtaagtgatgtgaatgatctttatagaagagtaattaatagaaaccaaagattaaaacgccttattgagcttgatgcaccagagattattgtaagaaatgaaaaaagaatgctacaagaagctgtggatgcactctttgataatggaagaaatgcaaatgcagttaagggagcaaataaacgcccacttaaatctctttcagaaattattaaagggaagcagggaagattccgtcaaaacctacttggtaagagggtggatttctcaggaagaagtgttattgttgtaggaccaaatttgagaatggatgagtgtggattgcctaaaaatatggcattagaactctttaagccacatattttggcaaaattagaagagaaggggtatgccacaactttaaaacaagctaaaaaaatgatagagcaaaagagcaatgaagtttgggaatgcttgcaagaagtagttgcgggttatccagtaatgctaaaccgcgcaccgacattgcataagcaatccattcaagcattccatccaaaactcattgatggaaaggctatccagttgcatcctcttgtttgtgctgcatttaatgcggactttgatggggatcaaatggctgtgcatgttcctctttcacaagaggctattacagaatgtaagcttttaatgctaagttctatgaatatcttgcttccagcaagtggtaaggcagtaacagtgcctagccaagatatggttttaggactttactatctttcattagaaaaagatgagagcaagggtgagcataagcttttctctaatattgatcaaatttatattgcacttgaagagggtgttgtagaaattagcacaaaagttagagcatttgtagaaggaagaatcatcaatacaacagtgggaagaatgattttgaaatctatcttgccagattttgttcctatgaatttatggaataaagtcttaaagaaaaaagatattgctaccttaattgattatgtttataaagaaggaggcgttggaattacagcaagcttcttagataatcttaaaaatttaggttttaaatatgctacaaaagcgggtatttcaatttcggtatcagatattattgtgccagatagcaagaataaggttattgaaagcgctaagaaaaaggtaaaagatattcaatcacaatttggtgcaggtttattaaccgaacaagaaagatacaataagattattgatgtttggacagatacgagcaatactcttggtaatgagatgatgaagcttattgagaatgataaagcaggatttaactctatttatatgatggcagattcaggcgctagaggtagtgcagggcagattagacagctttcagctatgagaggtttgatggcaaagccagatggaacaattattgaaacacctattacttctaactttaaagaagggcttaatgtattagagtatttcatctctacgcatggtgctagaaagggtctagcagatacagcgcttaaaactgcaaatgcgggttatctaacaagaaagcttattgatgtaagccaaaatgttaagattgtagccgatgattgtggaacaaatgaggggattgaaatcactgatataacagtgggtagtgagcttattgagccattagaagagagaatctttggacgcgttgtggctgaaaatgtaattgatcctattactaatgaagtgttgatagctgaaggcacaatggtagatgaagaaaaagctagaaaagttaaagaagcaggagttaaagctgttattattagaactcctgtaacttgtaaagcagaaaaaggtgtatgcgctaagtgctatggactaaacttaggagaggctagaatctctaaaattggtgaggcagtaggggttgtggcagcacaatctattggtgagccaggaacacagctaacacttaggacattccatattggtggaacagcaagtagaagccaagaagaaagacaagttattgctgataaagaaggatttatccgctattataatgtaaaaacttataaaaatagagagggtaaaactatcatttctaatagaagaaatgcggcaattttacttgttgagccaaagattaaagctccatttgaaggagaattaaaagtagatgtagtgcatgatgaagtgattatctcagtagtaggtaaaaaagaaactgctaaatttactttaagaaagagcgatgtagctaagcctaatgaattagcaggtgtaacaggtaaaattgagggtaaatactacattccttatcctagcggacattatgtaagagatgagggaagtattgtagatattattaaagatagctggaatattcctaatcgtatttcttatgcaagtgaattaaaagtagaggataatgcacctattacacaaaaaatctatgctaagggcgagggtattgtaaaatactactatctaaatggagatcacttagagcgttaccatgatgtgaaaaaaggtgttaaagttactgaaaaagggctatttgcagtcgtggctgatgaatatgatcaagaagcagcaagacattatattgcaagagattctattattgaagtagaagataatcaaaaagtagagaaaaatactcttattgcaagaccgatgagcgatgagcatattgtaattgctgattgggatccttattcaaatccaatcattgcagaagagcaaggaacgattaagtttgaagatattatcccgggtcttacagtatctgaacaaactgatgagctaacaggacaaacaagacttgtggtgaatgaatatgttgcaagctcttataaacctactttggtgctctcaacaaataaaggcgggttaatccgttatgcgttagagccaaaaactgcaatttttgtagatgatggtgcaaaagtggagatggctgatattttagcaaaaactcctaaagcccttgcaaaatcaaaagatattacagggggtcttccaagagtttctgagctatttgaagctagaaaaccaaaagatcctgcagtattagcagagctagatggaatcgtaagctttggaaaagccattagaggtaaagaacgcattatgattactgcaaatgatggtagggtagcagaatattccattgataaatctaagcagattttagtgcatgagggagaattcgtgcatgcgggtgaggcaattacagatggagtgattgcaagtcaagatattctaagaatcggtggtgaaaaagagctttataaatacattgtaagcgaagtgcaacaagtgtatagaagacaaggtgttagcattgctgataagcatattgagattatcgtttcgcaaatgttaagacaagttaaaatctatgatagtggtaatactaaatttattgaaggagatttagtaagcaaacgccactttaaagaagagaatgcaagaattattagaatgggtggagtgccagcgattgcagagccagtattactcggtattacgcgtgctgcaattggaagtgattctgtgatttctgcagcttctttccaagaaacaacaaaagttctaacagaagcaagtattgcagccaaaacagatcatttagaagacttaaaagaaaatattgttttaggtcgtatgataccggttggaacgggaatctacaaaggcaaaaaggttaaaatcaaggagaattaaggttagttaaaccttaatttaagcagaatcaaagtggattttccatataatccgcttcattttctctattaaaattatttaggaaggaacaaaaagtgccaacaattaatcagttgattagaaaagaacgaaagaaagttattaaaaaatcaaaatcccctgctttggtggtttgtccgcaaagaagaggagtttgtacgcgtgtttataccacaacacctaaaaaacctaactcagcgttaagaaaggttgctaaggttagattgacaagtggttttgaagtaattagttatatcccaggtgaagggcataacttacaagaacactccattgtattgattcgtggtggtagggtaaaagacttaccgggtgttaaatatcatattatccgtggtgcgctagatactgcaggtgtagcaaaaagaactgtttcacgcagtaagtatggtgcgaaaaaagccaagggcgattctaaaaagtaagtgaggtaacagatgagaagaagaaaagctccccaaagagaagtattaggagatccaatttataacaatatcgttgtaacaaagtttatcaataaaatgatgtatgatggtaaaaagagtgtagctgagaaaatcatttatgctacatttgataaaattgaagaaaaaacaaaagaaaaaggcattgaaacttttgaaaaagcactggaaaaagttaagcctttagtggaagttagaagcagacgcgtaggtggtgctacttatcaagttcctgtggaagtgcgtcctgcaagacaacagtctttatcgattagatggcttttagattctgctagaaaaagaaatgagcgcacaatggttgaaaggctagcaaatgagcttattgatgcagcaaatgagagaggtgcggcatataagaaaaaagaagatgtgcataaaatggcagaagctaataaagcatttgcacactatcgttggtaattttataatgtatcaaagggattctatttatttcccttttacattttctacaatttcttttaaatctcaaattatatttatcccaaaggattaaaaatggcaagaaaaaccccattaaataaaattagaaatattggtattgcagcccacattgatgctggtaagacaacaacatctgaaagaattttgttttatacaggtgtgagccacaagattggtgaggtgcatgatggtgcagcgacaatggactggatggagcaagaaaaagagagaggtatcacaattacttcagctgcgacaacttgtttttggaaagattatcaaatcaatctaattgacacccccggacacgtggattttactattgaagttgaaagatctatgcgtgttttagatggtgcagttgctgtgttttgttctgtaggtggtgtgcaacctcaaagtgaaaccgtttggagacaagcaaataaatatggtgttccaagaatcgtttttgtaaataaaatggatagaattggtgcaaatttctataatgtagaatctcaaattgcaaatagacttaaagctaagccagtgcctttggtgattcctattggtgcagaagatagcttcaagggcgtggtagatcttatcactatgaaagcaatcgtatggaatgatgaatcaatgggtgcaaaatatgacattgaagagattccagctgatttggtagaaaaggctaatgaatatagagagaagcttgtagaggcagttgcagaacttgatgaagcaactatggaaaaatatcttggtggagaagatctaagcgtagaagagattaaagcaggaattaaaaagggttgtttatccatggaaatgattcctatgctttgtggttcaagctttaaaaataaaggtgtgcaaacattgcttgatgcggttgtagaatatttaccagctccaacagaggttgctgatattcgcggtgtagatccaaaagatgaggaaaaagaaattagcgttaaatctacggatgatggtgagtttgcaggtttagcatttaagattatgacagacccatttgtagggcagctaactttcgtgcgtgcttatcgtggtatgttagaatctggaagctatgtgcttaactctactaaaggcaaaaaagaaagagtgggaagacttcttaaaatgcactctaacaaaagagaagatattaaagaagtgtatgcaggggagatttgtgcatttgttggattaaaagatacgctaacaggggatactctatgttctgaaaaagatccagtgattttagagagaatggagttcccagatccagttatttctatcgcagtggagccaaaaacaaaagcagatcaagaaaaaatggcacttgctttagcaaaactagctgaagaagatccaagctttagagtgcatacggatgaagaatcaggacaaacaattatttcaggtatgggtgagcttcatttggagattattgtagatagattaaaaagagaatttaaagtagaagcagaagtaggacaaccacaagttgcattccgtgagactatccgccaaagtgtagagcaagagtgcaaatatgctaagcaatcaggtggtagaggacaatatggacatgtatttattaagattgaacctcaagagccgggcaaaggatatgagtttgttaataatatctctgggggtgttattcctaaagagtatattccagcagttgataagggtatccaagaggcaatgcaaaatggtgtattagcaggttatccagttgtggatttcaaagttacactttttgatggtagctaccatgatgtggattcaagtgagatggcgtttaaaattgcaggttctatggcatttaaagatgcttgtagaaaagcaggagctgtattgctagagcctatgatgaaagttgaagttgaagttcctgaagagtatatgggtgatgtaatcggggatctaaatagaagaagaggacaaatcaattcaatggatgatagaatgggattaaaaatcgtaaatgcttttgttccacttgcagaaatgtttggttattctacagatcttcgctctgctacacaaggtaggggaacttatactatggaatttgatcactatggtgaagttccgggcaatatctcaaaagagattatggagaaaagaaacggctaaataagcttataaagaggagattctcctctttatagaaaaacttctatttttaactgcatttataaataatcttaagctttgtatattttgtccgatttattatggaaactataaggataatccatgataagagctattcatctaaattccacaaatattttggataccccaaataaagcaagtagtggggcaaatatcctttcaaatcaagaagaaatagaaagtaataatgtcataaatgctaatgaagtttttaggatattttcaaagttatttgaaaagttagtgggggatattcctatgcttgaaggttctattagagatcaaattttaaaaggaaagaaaggggagagtgagctaaaatctcttcaaaaatggatggatgaaaatagagcagatatggtttggttagaaatgaatggggagaataatataagagcgatagaggagatttatcgcaccagtaaaagtataggagagtttaaaagcgcctatttagaacttcaagaaaaacacgataattattctaaagaattagcaagtaaaaataaagaaatgctagaagaggaaatgcaagaggcaaaagaacaatatgaagtgcaaaaagagaggaaaaagccatttaagcccatacagggtaaaagtgagagtgaaacttataaagaagaaataaatttaagtttttgggagcaatttataaaaacacaaagagaaaaaggggtggatattttagggcttttagaaagattgcaaaatagagggctagatattaaagcttgatagtttgaaaatattgagatattttaataagacattttttgtaagtttttaatgtgattaaatatttgatatatgaaatttgacttttaataaaagtggctttttaagctaacaaggctattaaacaataataaatttagatattgcttgaattttgatgattatttagaattattaggcggttttagggaattgtaatcccacggagtcccgcaaactccttattttagtcccttattaaattactttaaaagatattagcatattttttggtattttttacttaaataccctcataaaccctcttaaatacttgctttttaaagagactattgtagcataaagtaatttaacaagggactaaaacataatttctctttttctaaaacctcaccgctattgtagcataaagtaatttaacaagggactaaaactggttgatagtcgtaatcgaagtaaataccattgtagcataaagtaatttaacaagggactaaaactcaaggaatttaactactttataaactgaaattgtagcataaagtaatttaacaagggactaaaacttatttgtgtgataataaatatttagctctattgtagcataaagtaatttaacaagggactaaaactttattcttgtaattatgattgtttctgcaattgtagcataaagtaatttaacaagggactaaaactttttacattctcttatccctgcttcttcaattgtagcataaagtaatttagattaatttgtgtaaaaaagtaaaattataaggtaaaatggcattttagaatgaaaattaccccttgttttatataatcaataaaagttatgtataattattaaactaaatataaaaaggattgaggaaatgaagattttgggttttgatataggggttagttctattgggtgggcttttgtagaggataataaattacaagattgtggggttagaatctttactcaagcagaaaatcctaaaaataaagaatcgttagcattaccaaggcgcaatgcaagaagcactagacgcagattaagcagaagaagtgcaagaatgagagctatgaagcacattctgtctagtgaatttgggttaaaatatgaagattatattgcagaagatggggtattacccaaagcctttaaaggaaaattaataagtccctacgaattgcgttataaggcaataaacgaagctttaagcaaagaggaattagcaagagtaattttacacattgcaaagcatagaggttatattgctaaaaactctaaaaatacaaatataaacgaaaaaggtaaaattttaaaagccttaaaggataatggagaaaaattaaaaaactatagaagtgtgggagagtatttttataaagaattttttgaaaaaatgagagaaaatagcaataattttcaaaatattcgcaataaaaataactcttatgcaaattgtgttctagcaagtgatttggaagaagagttgaagcttatttttaaaaaacaaaatgagtttggtatgaaactctctaagaaatttatagacaatgttattaatatagccttttttcagcgtcctttaaaagatttttcgcaaagtgttggagtttgcacattttttgaaaatgaaaaaagggcacctaaaaattcttatagtgcttgggagtttgttgctttaagtaagattgttaatgaattttattctattaaaaataattatggaataatttttaataaagaagtgcttttagaagtattaaatcatattttaaaaaaaggaaatattacttacaccaaattaaggcagattattaaattagaggatggcgcatcttttaaatctttaaaatacaataaagaaaatgcagaaagtaagaaatttgtagaatttaaaaagctaagtgaatttaataaagctttgggggaacattctttaacaagggaaaatttagatgaaatttctaaagatattactttaattaaagatgaaagtaaattgaaagaaaaattgcaaaattatcctttaactcaagctcaacttgaagctttagtgcaacttgattttaaagaacatattaatcttagctttaaggccttaaacttaattattcctctaatgaaagaattaaaaagatatgatgaagcatgtcttgagcttggattaaagaaaaaagaaaatacaatgcaacataaattattgcccccattttgtgaaactctttatgcggaagaaattaataatcctgtagttttgcgagttattaaggaatatagaaaagtattaaatgctttaataaaaaaatatggtttggtgcataagattcatatagagtttgctagggaagttggggttagcaaggagataagaaataaaatagaaaaagaacaacaagaaaatgctgaacttaataaatgggctgaagaacaatgcgtaaaattagaaataaaatcaagttctaaaaataaattaaaattaaaactatggaaagagcaaaaagaattttgtgcttatagtggcaaaaaaattactcttaaagatttgcaagatgaaaaggctttagaaatagatcatatttatccttattcaaggagctttgatgattcttataataataaagttttagtttttgttaaagagaatcaagaaaagggcaataaaaccccttttgaagcttttgggagtaataaagcaaaatgggaagatatcaaaagcgcttcttctatacttccttttaaaaaacgccaaaaaattttagatgaaaaatttatagataaagtgcaaaaggattttattgctagaaatttaaatgatactagatatgcaaccactcttataagtaaatataccaaagaatatttggagtttttacctctgcaagaaggggaaaacaagcaaagtggagataaaggcagtaaaatacatgtgcaagcaaccaatggaacacttacggcgaccttaagacattttttgggatttggttcaaagaatagaaaggggcatttacatcatgggcttgatgctgtgattattgcttatagcacaagctcaatgattcaagcattttcacaatttaaaaaagaacaagaacttttaaaattaaagatattggcaaacaaaatagataaagagcaatataaaataaagcaaaagttttttgatccttttgaaaaagggtttagagatgaaatattgtctaaagttaatgcaatttttgtttctaagccaccaagaaagaaaacaagaggtgctttgcatgaagaaactttttgtgctaaagaaaaatttcttaagctttatgggggagaagaggggcttaaaaaggcattagaatatggcaaagttagaaaaattggagaaaataaatatgtaagcaatggggatatgattagggtagatatttttaagcataaaaagagcaataaattttatggagtgcctatttatacaatggattttgctttaggggttcttccaaatagggcagttgtgagtggtaaaaaagatggaattattaaagattggttagaaatggacgaaaattttgagttttgtttttctttgtataaagatgatttattgcttttaaaaaagaaaggaatgcaagaggctgaatttgtctattatgtgagttttaatgtcagttcagtatcaataaggatagcaaaacatgataatcaaagtgaaaacttgagtgataatcaaaaacaattatttacaaaacttgaaaaagataaggtagagacagaagggattggcatacaaaatttagaggtttttgaaaaatatattgttagtcctttaggagaaaaatttaaagcacaatttgcaccgcgtgaaatgatgaaaaagaaataaaatgggatttgatgaagcttttaaaagtgttttgattgcaaatgaagcaaagcttaatctatattctaatcatcttgtagtcagacaagaagaatttgaagcaaaaatttatttaaaagatatcaattttattattttagaatctatgcaaataaatctcacatcaaatttgctgagtgccttagcaaaaaataaaatcattctcttaacctgtgatgaaacacattgtataaatggtgtattttctccttatcttgggcattttcaaagtgccaaaattgctaaaatgcaaattgctgtgagggagcagactaaggctattttatggcaaaaaatcattaaaaacaaaatcaataatcaagcttatgttttagaaaatgctaataagattagagaagctaagcaattaagaaagcttgctaaagaagttttattgaatgataaaagtaatatagaggcaactgcagcggctttatattttaaaaccttatttggtataggtttttctagggatagtttgtgtttggagaattctgctcttaattatggatatgcaattgttagagcttgcattataagagcggtttgtataagtggtttgcttccttggagtggtataaaacatgataatgtttataatgcctttagtttatgtgatgatttaatagagccttttagacccatcgttgatttgagtgttttaagaagaatggagtttgaaaaaacaaaagagatttgtgtgatattaaataaagatttcaaaagaaaccttattaataatttgcaaagggaagttaggattaatggtaaggattatccacttaatcgtgcaattaatcaatatgtgcagaatttcaagaatgctttatttaataaagaggaattacgagtggtagaatttaatgattgaagacaagtttatgcgcgttcttttaatgtttgatatgccaactgtaacaaaacaagaacaaaaatatgctaacaaatttaggaagaatctgattaagcttgggtattttatgcttcaatttagtgtgtatatgcggattacaaaaggtattgaatctgctaaaaattctattgaggcggtaaaaagagaattgcctccttttggaaatattagagcattaattgttacagaaaagcaatttgataatatgcaattacttttgggtaatacaagttttaatgaggatataaatcaggataaaaatttggctttattttgtattgataataaaggggattatcaatacaaacaagataaatatggtaaagataaaccaaaagaaacacaaaacagaaaagataaatttaagcaaccaaaattatttgaattttaatgaaagtcttctaaggatttatattgcggttttagggaattgtaatcctgcggagtcccgcaaactccttattttagtcccttgttgaattgctttaaaagatattagcatattttttggtattttttacttaaatacgctcacaaaccctcttaaatacttgtttttttaagaatctattgtagcataaagtaatttaacaagggactaaaaccttagaagcttctgcacctagcttcattacattgtagcataaagtaatttaacaagggactaaaacttattagggtgtgtccttaaaataggcaaaattgtagcataaagtaatttaacaagggactaaaacccatacgcaagagattacatttaaagcaaatattgtagcataaagtaatttaacaagggactaaaactataatttgtatagactctactgctggcgagattgtagcataaagtaatttaataagaaaataaaaactttttgtggttgtgtttttataattcttatttctttgattgtttgctaatcctaaaacaacaccaatcccaagacttcctgcattttccatttttaaccttttttaagtgtttgtgttttaaaatttttgcatgagtgaaaaattccccttaacaaaaagagactatctctattcatacggctttatggttgcctgttatattggcattttttatgtgggctataataatgaaatctcttttttgccaatattctcgcagtatttttagcaacttcaatccttattctcataggttatttaattggtttattacagcttattcaaggtttatttatgataagttgcgaaattttattttttatttcaaggcttattcgcaagctttttaaaaaactttttaaacccaaacaacaagagccaaaaaacctagatgaaattttaagtaacaaaactaaaagctcttagactttaagagcttctttgcatctttgtattttagaaatttatacttttaccctaagcaaaaacaatctttgccacgcccccctaaaagaaaggataaatacaaacaaagtttaagggttgaagagattagagagattgtaaaagttttagaggaagaaagaagtctattaggagctgaagtgaatgttgaaagcatacttggaaattgatgccccatcatttgtttgttttttaaaaacaaagtttcaaatgattattgccatataacgaaagtgcataaactaattgcttttgtgttgcatttttatatttagaataatcaactctattaactccttttgtctttttaaaattatagctaaaattccttagccaattcccacaactcgcaaatcattcaagcgtggcttagcttacattcttgttgtgggcttgaaattttgtgctaaaatttacaagctagaaaattttaaccaagaacaaatttttggtataatcatccgaaaaataagtaggggataaaatgttccctagaaggaaattaatcaatgtatgctgttacttgtgttacaaccatacaagcactagtaaaaaccttgccttacttctctatttatgttaaaggtgtaagaatgcttaagattaaagaaaacaatgatttgatgtctgctgttaaggctgttttgtgaagtcaaaattttaaaaataaaggaagtgaaatgaaaaaagcaaaacaaaatattacaaaaaagaacagtgaagagtatttgtcagagaaagaagccattaaaaaaaccagagaaaagatgaaaaaagagctaaaaaaaccagagataagagcagtttttgaaagactaagggacaaatgaactacatagatttagaaactgccattgaaattcataatgatattattgaagaaataggcggattgggtgggtataatgaaacacaaataggttatttagcaagtgttttagagcaaataaagaatgatgaatattatcccgcaattactgataaaattgctcatttaatgttttcttgtataaagtttcatccatttttagatggcaataaacgcacttccatatttttgggaatgcattttttagacttagataataaatataatgagaagtttgctgaaactatggaggatgttgttgtgggtgttgctgatggttctgtttcaaaagaagaattaaataagattttgaaaaaatttgttaaaataaatagaaatcaaaatatgctataacatcaacgctttaggcttgcttttattgtcttttgaagatgtaaaaggagctaatatagaattaatcattgtttttataatgtcgttgatacttcttgttctagtttcaaagaaaaactagaacatcacctttaaacaaacaataagtttctagttaatacctgcttaacttagacttaaagcagtattctaccaagaatacacaaaatttatctttaaaaggcaaagcaggttaggatcttttcttttgccttaaaaatcttctatctaataatctttgcactcattgttactcttttaaatattccttttaaaaatatttataaaatttattttcataaataaaactatacagatactaaaagaaattaaagtattacctctgcaactccttttctaggaattttcctgtatagctacccgtctttttatggcgttttacaatatgctctggagttccgctatctacgatactgcctcccttgcttcctccctctggtcctacatctatgatatagtctgcattttttatcatatcaaggttgtgttctatcacaatcacgctattgcctaaatcggttaaatggtgtaagacttttgtgagcctatccacatccgcaaagtgtaagcctgttgtgggttcatctagcacatagagggtttttccagtatctttgcgactaagttcttttgcaagttttatcctttgggcttccccgccacttagggtgatagcattttgccctagtgtgatatagcctaagcccacatcttttaatgtgtgtaatttttgataaattttagggattttagagaaaaattcacaagcctcatccacactcatttctaaaacttgtgcaatatttttgcctttatattctatttctagcgtttgagggttataacgcattccatggcatgaatcgcattttactaaaatatcgggcaagaagtgcatttctattttaatctctccatcgccttgacatttttcacatcttccgcctttgacattgaagctaaaacggcttacagagtagtttctaatctgtgcttcttttgtttgagagaaaacttgccttatctcatccatcgcacctgtataagttgctgggtttgagcgtggggttctacctatggggctttgatcaagataaatcactttatctaatttttctaaacctaaaatctccacaccatcaacctttttaacttttttgcgattgtttaaaagctcttgagccactggcaaaagagtttgtaaaataagagagcttttgccgcttccactaacccctgtaacacacacaaagttttgcaaaggaatctctacgcttaggttgtggatattattgatattgatattttttagtgtaatccattcttgctggtttcttctaataaaatattcaattttcttcgcgccacttagatattgtgcagtttgggtgttggaagctagaagttgtgtgagattcccgctaaagacaacttcgcctccatatttgcccgcacccggtcctatatctacgataaaatctgcatgttctatggtttctttatcatgctctacgacaatcacgctattacccttttgttgcaaacttcttagggttttaataagttttagtgtatcgcgttcatgcaatcctatgcttggttcatctagcacatacataacgcctgttaagccactgcctatttgactagcgattcttatgcgttgagattccccaccgctaatgcttcttgcatcgcgtccaaggctcagatagcctaatcccacatcataaagaaaataaagtctttcacaaatttcttttaaaataggggcggcaatgagtgcttgttgtgcgttaaaataggcaaaattttgttcatttgcaaaaaagccataacaatctgcaatagaaaaatctaaaatatcacccaaagttttagaagctactctaacggctagactttggggcaatagcctatgccctttgcattcttcacatactttttcgctcatataatctgctaaatctttgttatctttaaacatatcataagctattgaaataatcccactccaagtgcgttttagagggctatttttccaagtgaattccacttcttcttgatttccatataaaagaagcttttgctcatgctcttctaactcatcaaaagtgctttttggattgattttaaaggttttgcaaactcctttaaaaagctcattataatagcttttattaaatccataaaagattttaatcccaccctccactaaaggaagagaagaattaatcacctttttagtatcaatgctatatcttatgcctagtccatcacacttagaacaagctcctttaggagagttaaaagagaagctaagaggttctagtgggctaaaagaaaccttacaatcaaaacaagcaagatgttcgctaaaatggataagttcgtttttcccttcttcatttaaaagctcaacttccacttcaccataagattcttttagggctttttctatggcttctgcgattcttgagctattttgtggattaaccacaagtctatcaatcacaaccttaatggtgtgttttttggttttggctagattgatttcttcatcaagtcgcaccaaaaccccattaatctgtgctcttatataacccttttggcgcaaagattctagcttatcactaaaagtcccctttttttcttttacaagtggagctaaaataagaatctttttgccttcttctaatttttggacttgctctataatatcgcttgcattcattttagaaataggcttaccgcatagatggcaatgttgtgtgccaactctagcgaataaaaggcgtaaataatcataaatttctgtgattgttccaaccgtggagcgagggtttttgcttgtagttttttgatcaattgcaatagcaggggttagcccctctattttatctacatcaggctttcctattttgtctaaaaactgccttgcatagcttgagaggctttctatatagcgtctttgtccttctgcatagagtgtatcaaatgctaaggtgcttttaccgcttccgctaagccctgttagcacgactagcttatttttaggtatgcttaaatttatgttttttaaattgttttcttttgcgtttgtgatgatgatatgatcaagtggagatggattcacaatcttacctttttgtaaaaaattttataattataacaaatgaatgcttattagcttaaaagctctttagtgaaactacaaagctcttctttgaaatttgaatgcaagctttgtatgtgcctagtaaatgcacttcctactaccgctatttgcaccaagccttttagagagttaatttgatctctattttgtatcccaaaacctagtgcgatgggcttgtttgtatgctttttcacaagatcaatgtatgcaaacaaatcttcatcaatttttgttttagcacctgtaatgccatttcttgcaaccacatagataatctctccacttcgtttgcagagcttttctatacgttttgtgggtgtggttttagcaataagtgctattggctctatgcctatgtttttagctaaagaaaaaaggttttcatcattttctagtgataaatctggtgcgataatgccccaaacctcacaacttttagcctcttttaaaaactcttttatcccataggtgtaaaggatatttgcataagtcattatgagaatttttgtagtgcaattatgctctttaaaaagagaatttaactcttttataaagctaaatcccttttttgtgttaaatccattgcttagagaaacttcacaagcattcgctattgcttctccatctgcgttaggatctgaaaagggaaattgcacttctaaatattttgcaccaccaagagcgattcctaatgcactttgcaaacttgcttcataatttgggaaacctgctacaatatgccccattaaatctattacatttctttgcatgtttttgcctcttcttctaaaaatgctatccaattttctttttgtaaatattttgctgtgataaaaatgtccttatcacctctcccagaaacatttacaataattgttttattttttgttgttttagagagtttaatagctcctgctaaagcatggcttgattctaaagcagggataataccttcattcttagcaaaaaacttcaaagcctctagtgcttcttcatcgcttgcagagctaaattccactctacctatttcttgtaaatgtgcaagttgaggtccaatccctgcataatctaatccagcagaaatagaatgcgtatgggagagattgccatattcatcgcttaaaaagtagcttttatagccctgtgctatgcctacttttgcattattattttgcattcttatagcattttctcctatgtttttgcctttgccccccgcttcaatagctagtaattttaccttagaatctaatagaaagtgcctaaaaaatcctatggagttactgccgccccccacacaagctatcaaaatatcaggcgaaatttttagctttttgcattgagtttttagctctttgctgataatgctttgaaaatccctcacaatatcaggaaaaggataggggcctaaagcacttcctaatacataaaaagtattatggctttctttgctccattctcgcaaggcttcatttactgcatcttttaaagtttttgagccactttggacgctcacgacttttgcgccaaagagttgcatattaaatacatttggaaattgtcttttgacatctacttcgcccataaaaatcacacattccattccaagctttgcacaagctgcactgactgctagtccatgttgcccagcacccgtttctgcgatgattctagttttgcccatttttttagcaagtaaaacttgtcctatggcgttgttgattttgtgtgcgccagtgtttgccaagccttcaaattttaaataaatttcattttttaagattttagaggcatttttggcataaattagaggcgttggacgccccacaaacttgcttaaaagctctctatattctttagcaaaacttttcttttgcataattgttttataagcaatttctagctcttttagtgcagggtagaggatttcaggcacatatcttccaccaaatgcgtgagaagtttttgaatcttctccaaaaaatccttttttagaatggataaaaattttatgtttcatagcttttagctccttaaaaaaatctatcttagcacatctttactttttaataaataatatgagtgttccaaaaatgattaaaaaagcaccgctccattgccataaatttaagctttcttttaaaatgatgagtgaaagcaaaacagctacaagaggctctatcatacctaaaattgcggttttggtaactcctagctttgatatgcctaaaaaatatgccatcatagaaaaaagagtggaaataaaggttaatccaagcaaagaaagaattcctaaagagttgatagaagcaggttctatgccacctttgaaagtaaagattataaacatcacaaaagaagcaaaaaggcagatataaaagctacaaaccacagatgagattccaaaagtaatgtttttgctaaaaattacataaagtgcataaaagagtgcaccgattaaagaaagtgctataccaaaatagcttagggttagattttgcgggatttgcaagattaaaactaagcctaaaaagcagaggactaagcaaagaagggttgagaattttagcctatcttttagaaaaaagatagcgatgagtgcgacgataatgggataaatgtggtagattaaaacgcttaaagtcgcagggataaagcgcaaagattctaaatatgcccccgcttgtgctgtatataaaaagcctcctagaaagaaaaaatgccaaagctttattttggggagttttagggggatttttttgaatcttatccaagctaaaagcaataaagcactaaagaaaaatctaaaaaagaggataaaatcactcccaaagccatttttttgtgcaagaaccgtccatataggcataataccatatgcaatacttgcactagaaatccataaaactcctatttgttctgtatttagtcgcattttgttcctaaattttgattatagttttggtattttagagatttgttggttaaagtttagtaattcttatatgttgtttttattaagttgcatgaatgaaagtgtgtttgcattaaaaacaaagtggatttttattgaatatgcctttttataataaaatataaataataaataatatttttttaaggtatggcttgattttttttttttgtaagataagtattatttttaaaagcaaggagtaaaaatgaaatttaaaaaatcattgctaggctt

SEQ ID NO: 3777 - DNA, 22964 bp, synthetic construct
  misc_feature 1..22964: note = Synthetic
  source 1..22964: mol_type = other DNA
tgatggtgcttttcgtcgtggcaaaccttatatgttaaaacctgcagtagataaggctttaagtgaagggtgtgaaagtgtagaaaaagtacttatagttatacgcaataatgagcctatagaatatattaaaggaagggactatgtttataacgaacttgtgaaaaatgagtcttataagtgtgaacccgaaattatggatagtgaggatttgttgtttttgctttacacttcaggatcaacgggcaagccaaaaggagttatgcatgcaagtgcaggatatatactttgggcacaaatgactatggaatgggtttttgatattaaagattatgataattattggtgtagtgctgatgtgggttggattacaggacatacttatgtagtttatgggcctttagcatgtggggcaacgactataatgcatgaaggaactcctacttatccaaattctgggcgttggtggagaatgatagaagagtatcaaataagcaaattctacacttcgccaactgccataagaatgcttcatgctgatgcacctaatgagccaagaaaatatgatttaagtacgcttgaagtgcttggaacggttggagagcctatcaatcctagtgcttggaagtggttttatgatgaaatagggggaactaaaagtcctatatcgatacttggtggcaaacagaaacaggtgggcatatgatcacgcctttaccaggcgccactcctttaaaaccaggttgtgccaccttgcctttgccagggatttttgcggaagttattgatgaagaaggcaataaaaaagatgaaggtgaagatgggttgctttgtataactaaaccttggccttcgatgattcgtggaatttggggcaatgatgaacgctatatagaaagttatttttctcaagctaaaaaagatggaaaagctgtatattttagtggcgatggtgctttttatgataaaaatggttatattaccatcacaggaagaacagatgatgtggttaatgttgcaggacatcgtataggaacggctgaaattgaaagcgctattgctaaacatccaagtgtagcagaatcagctgtagtgagtattttggatacgattaagggcgagtcattgtttgcttttgtggttttaagtcctgcatccagttgtgatcttggcggagctatagaaactttaaaagaacttaatgacattttaagagtagaaataggacctatagctaaaatagaaaaaattctttatactccaggtttgccaaaaactagaagtggtaaaataatgagaagaattttaagaactatagcaagaggcgaagaaatcaaacaggatatttcaacacttgaagattctaaagtagtagaaaccattgttaaattagctaaggcagagtttgaataacaaggcaaaaagaactttgccttgttgcatgaaaattcataaaaataagctataatgataaaaaaataaaaggaaatttttatgcttcaaacttgtattttccctgcggcaggttatgggacgagatttttacctgcaacaaaaactttacctaaagagatgttacctatcttaaccaagcctttgatccattatggagttgatgaagctttagaagcaggaatggaaaatatgggatttgtcacagggcgtggaaaaagagctttggaggattattttgatatttcttatgaacttgaacatcaaatttcaggtacaaaaaaagaatacttacttgatgaaattcgctctttgatcaatcgttgtacctttacttttacaagacaaaatcaaatgaaaggcttaggtgatgcggttttaaaaggtagacctttggttggcgatgaagcttttggcgtaattttggctgatgatttgtgtgttaatgaagaaggcttaaatgttatggctcaaatggtaaaaatttatgaaaaatatcgctgcaccatcatagctgtgatggaagtaccaaaagagcaagtttcaaactatggagtaatttctggaaattttgtagaagaaaatcttatcatggttaattctatgatagaaaaaccaagtcctgatgaagctccaagtaatcttgctatcataggaagatatattttaactcctgatatttttggaattttagaaaatactaaagcaggaaaaaatggtgaaattcaacttaccgacgcgcttttaactcaagcaaccaatggtatggttttagcttataaatttcaagggaaacgctttgattgtggaagtgtagaaggctttgtagaggcgacaaattatttttacgagaaaagtaaatgttaaacaatacgcttttttttaaacaaagtgaaattcacactataagttcttatgcaaatcgtattaatgatgaggtaaaaagtggagatatagggtattatcatcttattgacacaagtttgaatttaatcgatgagagcttgcaatttattcaagataaagagtatgtaaaaaatatcgttttagtgggaatgggaggttcaagttgtggtgtaaaagccttgcgtgatatgctttttaatgaaaaaagcaaccaaagagagctttttatactcgataacacaagctcgcattcttttaataagactttagaaaaaatcaagcttgaagaaagtttgtttttaatcatcagcaaaacaggtagtactatagaagttgtatcgctttttaaacttcttattgaacattttaaacttgatatgcaagaattaaaaaaatactttgtttttattaccgataaggattcaaaacttcatcaagaaggtgaaaatttaggtattaaatgcttttttatccctgcaaatgtaggaggtcgttttagcatactttcagccgtaggtatagttccactttgtttttgtggctataatgccaaagctcttttagaaggagctaaagcttgttttgaagatttttttactcacaaaaaagatgaaattttacaaaaagcctatcattattgtacacacaaaaatgccaatatcaatgtacttttttcatatagcgatgcttttaaaggctttaatgaatggtatatccagcttattgctgaaagtttaggtaaaaagcaaggctataaacgcataggtttaactcctattgcactcattggcgcaagagatcaacatagttttttacaactcatcatggatggacctaaaaataaaactgtaacttttttaaaaatcaaagacgctcaaaaagcacctattatccctgatattcattttaaatttttagattctttaagtaataaagtcaatcttcacgaacttttaaacgctcaatgtgatgcaactatgcacgctttaatcgctgaaaatttgagtgttgatgtgatagaacttgaaaaacttgacgcttggcatgcgggatatttgatgtattattatgaactttttacttcaacttgcggtgttatgctagggattaacacttatgatcaacctggtgtggaagttggaaagttgatcttaaaaaatatattaaattcttaatcaaaattcattaaaaaagagtataatgattttaagttaaaattataataaaaatttttaattaataataataattattatttaagaattttatgttataattttaaaaattaaaaaaaggagtcaatcatgtcagttacaaaacaattattacaaatgcaagcagatgctcatcatttatgggttaaatttcataattatcactggaatgtaaaaggtttgcaatttttttctatacacgagtacacagaaaaagcttatgaagaaatggcagaactttttgatagttgtgctgaaagagttttacaacttggcgaaaaagctatcacttgccaaaaagttttaatggaaaatgcaaaaagtccaaaagttgcaaaagattgctttactccgcttgaagtcatagaactgatcaaacaagattatgaatatcttttagcagaatttaaaaaactcaatgaagcagcagaaaaagaaagtgatactacaacagctgcttttgcacaagaaaatatcgcaaaatatgaaaaaagtctttggatgataggcgctactttacaaggtgcttgcaaaatgtaatttaaggggctttatgccccaattatacaaactaggttataatatccttttttaaaggataaaattgaaagtacttaattttttttatgaaaaccaccctaaatttgaagtaagttatgaaagaaaaaatcaaatttcaaaaccaaatattatcataaaaggcccacgattttgtggtaaaaaaacacttatttttaattttttatctcaatttaaagcaagtgaaattttgtttttagatttatatgatacacgctttgaaaaacaaagtttagaaagacttgctgattttctgaatgaaaatttacaaattaaaattctttgcctttataatttggattttatccctaatttagaaaaaattaacattcccatcatcttaagtacaaatataaaagatttaaatgtaaatgggtttgaagagcttgaacttgattattttgattttgaagaatttattagtgtaagtaagaaaaatttacctataaataatttagtaggtctttttttgcaaagtggacgcagtaaatttggagaaaaaaacatacttctaagacaaagcttcactcttttagaattagaaattttaaagtatttagctttaaatttgggtcagcaaatcagtatttctaagatatttatagaactcaaaaaaagattaaaaacttcaaaagatagtgtttatcaagctataaaaaaattagaaaatacttatgtgatttataccttaaaacatgatgaaaaaaaacttcaaaagatttattttaaagattttggcctaagaaataatctttgtatttcaaaggatttttcacatttatttgaaaatttagttttaagcgagttgtttaaatttaaagaagaatttttttataacaaatactttaacttttatagccaaatatctaaaattgcttatatttcaagtccaactttagatattgatttgatcaagctacgtgctaagaaaattttaccaaaggctttagaacttggaatttttcatgtgatttttatcactctttcaagcgaggataatttttttgaacaaggggttaaatttgaagtcatatcttttgataaattttcacttggattttaggtgttgtttgagtttgtatcgtatttttcaaggttgtatcgtttgatgatttttgtaataagattgatataatatcccttgcgttcagaataagaatctaaagttttaatagcctctagccctgttatctctttgccttcgctttcaaatttagctcttgcatcgcgaaacttttcataagcaaaatgacgatttaaatttaaaacataagagtcaacactatcttgcagactatcaaaaattttaattttgtgttttttatctggatgtcttaaatcaggaattaaacctttctcaccccaagtccattctccaaaaagattgtttgcttctcttgcgaagcgactggtacctgtagcactttcaactaaagcttgggctatacccatggattttggaattttttgaatacgttttttatattctgcaaaatcataaagattttcaatgcgatatttgttttttatcgtgataagtttttcaagatttatttggtttgaagtcctaaagcctgttttgtaagcatctttaaaaaaggcttcgataaaagctctttcttgttcaatttttttaaagctttgatcaaacatttcattcatttttataaaaaaaatttgtcttttttgatctatatcaagtttgtaatattcttctccaaatccactctttagatcatcagcaaaaagtgggattagaaaaagactaaaaaaaattataattggcttcaaaacaatactttacctttccttcaaaaaacaattcttcatttttatatgcaaaccctacctcttcaccacttttaggagttattttaactttattttgtacttttttatttaaaaatgccagataaaaacaagcccccattcctgtgccacaagctaaggtttcatcttcaactccgcgttcataggtgcgaacttttaaatgattttcatctaaaatttttacaaaattaacattggcattatatttttgtctcattttttgacaaagcattgtatcaaattcatctaaattttgacaaaaatgtactagatgtggaactccagtgttgcaaagttgccaagtttttcctaattcttcaaaagtattttgcacgctttttattttgcctaaagatacttcaactttatcttgatttacctttgcttttattactcctgcaccggttaaaaaactcatgttaggatttattttgttaatatgatgtgcaaaatgtgccgcagcccttgagccattgccacacatagcagcccttgagccatcgttattataaaattcccattcaaagtcgtatttttcatgaggcaatatcacgataaagccatccgcacctataccctcataacgattacaaagttctttagctaaagcacttctatcttcttttctatcagcatttgttatgacaaaatcattcccacttgcacaatatttataaaatttcacatttttcctttagaaatttcttgtattactttaacacattcttgcctaaaatcggcataagaattagtatttttaatgataaaatctgcttttttaagtttttcttcaatatctatttgagaatcaagtcttgcttttgcagcttctaagctgagcttatctctttgcatgattcttttaaggcttaattctttaggtgtgtaaattacaatgactttgcctaaattttcataagcaccgctttcaaaaaaaagaggaatttctacaaaaaaagctttattttctttatctagaatttgtatttgttctaaaattttagctcgaattttaggatgagtgaaattttctaagatttttttagcttctttattgttaaaaacaatttttccaaggatttttctatcgattttcttttcttttgtgagtaaattttttaaactaaagggagaaaaaatcttttcaagttctaaagcattttcatctaaaattttatgagcgattttgtctgcgctaatgcttttaaagtctaaagaattcgctatttctataaaagtgcttttaccacaagcaattgaagcggttacaaaaaaagcatttttcatcttatgccttattaaaacttttttcgttaaaatacctttttagttcttaaaggaaaataaatgaaaatttcatatgaagatgcaggcgtaagtatagataatggaaatacctttgtagaggctataaaacctttggttaaagaaacttttaatgataatgttgtaggtggaattggttcttttgctggtgcttttagaatgccaagtggttttaaaaagcctgtgattttaggtgcaacagatggggttggtaccaagcttcgcttggcaattgatgctaaaaaatatgatactatagggcaagatttagtagcaatgtgcgtgaatgatttgatttgtaattttgctacgcctttgtttttcctagattattatgctacagccaagctcgaagtagaagtagcaaaggctgttgtatcaggcattgccaagggatgtaagatggcaaattgtgcattaattggcggagaaactgctgaaatgcctggaatgtatgcaaaagatgattttgatcttgcgggttttgcagtgggtatggctgaagaagatgagattgatagaagtaaatttgttaaaaatggtgatattttattggcactttctagttcaggacttcattcaaatggttattctttagctagaaaagtactttttgaaagtttaaaattaaaatttgatgacaagatagagggtaaaaatttaattgatattttgttagaacctacaaggatttatgtgcgtgattttcttacactaaagccttatatcagtgctctagctcatattacagggggtggtttagtagaaaatttaccacgcgttttacctcgtggtatgggtgcaactatacgcaaacatcatcttaaaactcctgaaattttttatactataggacaggctgtagaagaaagcgaaatgtatagaagctttaacatgggagtgggtttagtaatggttgtagatccttctaatgtaagtaaggttttagaaaattcagatgcctttattatcggcgaaatttgcattaatgaaggtattgttttagaatgaaaataaagcgttaatacgctttatttttgtattttaagttctatttttgtagtgttttgttcttttggcaaaggattggtttgtgctagataaaaggctacaagcacatttacaagcatagcgataagtaaaagaggagtggttcgttttataatatccattggagctacttttgcaaatccagctaaagctatgatttcgcctgctattggtgaagctgcacgacctaaacaagatgcaatttctataggtaaaactagagtaataggtgcaacgcctaattttgtagctatatcaggagctagttttccaaaagtattaaaagcggcaattccacttcccataatcactgtggcaaaataaactaaaaagcttaaaatagctatactcaaaagaattccaaaccatgcaaaatttcctgttccaagatttgaaaccgcgttagcaaggatattaactccaccaagtgctttaatgccttcagcaaatactccagcggcgatgattatgcttacgactgagataaaaatttcagccatagccttttaaaatcaccatcatatcttcgcctaattttctagcatttctgtgtcttgcaaattcaacaagaaaaactaaagaaattcttacaaaatttgctatcacaacatcgagcttgatagtaaaaaaatacgctataaataaaaatacaacaggtaaccaaggaaagagtatgtaaaaagtagggcatttaggatcaatgatttgcggaatttcaacttcatcatttaaaacacctttttctttatctcttttatcaatccaagcaaaataaaaaggaatcaagatggcaataattacaacataggtaatcacactataaatttggtaatttaaaaaaagccttacgacattatcactttgtcctaccatatctgccatattgattgaatttccatcttttggatcataatcaagtgcaattaaagaaagcgcacatacagttgtaataggacggattttaagtgagattaaaacaggataaatatatgctaacaaaagcaaaagcaattcagcatagctagaaatgacgatttttaaagccattccaacaacaaaagttccacttaaaattaagtatttattttttgatttttcctgagggtttatttgctaaaaaagcaagttttgccgaagcattgatatgtttcatgtaagcagtaaagcctgccacactcatgataataagccctgctccagaaagctgacttttaaaagtcgctgtgataaaagataactatcaggtaaaacatttaaaagcttgtatactctctgcttggagtttttggtataggtgttcctgtgatataaaaagcaaaaataagcaagataatacctgaaagaaaaaatacaaaaataggattgtattttttaagtatataataagcaacaacaattaccgctaaaagtgtagaacatatcataaaaattggcatgatttctcctaaagttattattagcttttattttattttagctaaaatttaactaataaatatttttcatttaaaattttacttattttttgcattataaaattaataatatgtatagtttggttactgaaaagtttatgtttgtttaaaaaaatgatttttgtattataattatacacaaatcataaatattaaaaaggatctagtgtggcaagaattttggcatttgatataggaataagctctattggctgggcatttagtgaaaatgatgagttaaaagattgtggagttaggatttttacaaaggctgaaaatcccaaaacaggagaatccttagccttgccaagacgccttgcaagaagtgccagaaaacgccttgctagacgcaaagcaaggctaaatcacttaaaacatttaatcgcaaatgaatttaagttaaattatgaagattatcaaagctttgatgaaagtttagctaaggcttataaaggctctttaattagcccttatgagttaagatttagagctttaaacgagcttttaagtaagcaagattttgcaagagtgattttacatattgcaaaaaggcgtggctatgatgatattaaaaataatggtgatgaagaaaagagcgagattttaaaagctatcaagcaaaatgaagaaaaactagtaaattatcaaagtgtgggagagtatctttataaagagtattttcaaaaattcaaagaaaattccaaagaatttataaatgttagaaataaaaaagaaagttatgaacgctgcatagcgcaaagttttttaaaagatgaattaaagcttatttttcaaaaacaaagagaatttggcttttctttttcaaagaaatttgaagaagaagtgcttagtgtagcattttataaaagggctttaaaagatttttctcatttagtgggaaattgtagtttttttactgatgaaaaaagagcgccaaaaaattcgcctttagcttttatgtttgtagcacttacaggaattatcaatcttttaaacaatcttaaaaatactgaaggaattttatatacaaaagatgatttaaacacccttttaaatgaagttttaaaaaacggcactctaacttataaacaaacaaaaaagcttttgggcttaagcgatgattatgaatttaaaggagaaaaaggaacttattttattgagtttaaaaaatacaaagaatttataaaagccctaggtgagcataatttaagccaagataatttaaatgaaatagcaaaagatattactcttataaaagatgagattaaacttaaaaaggctttagcaaaatatgatttaaatcaaaatcaaattgatagtttaagcaaattggaatttaaagaccatttaaatataagttttaaagccttaaaacttatcactcctttaatgcttgaaggtaaaaaatacgatgaagcttacaatgagcttaatttaaaagtagcaatcaatgaagataaaaaagactttttacccgcatttaatgaaacttattacaaagatgaagtaactaatcctgtggttttaagggcgattaaagaatatagaaaggtcttaaatgccttacttaaaaaatacggtaaagtgcataaaataaacattgaattagcaagagaagtaggtaaaaatcacagccaaagagctaaaatagaaaaagagcaaaacgaaaactacaaggccaaaaaagacgccgaacttgaatgtgaaaaactaggcttaaaaataaatagcaaaaatattttaaaattaagattatttaaagaacaaaaagaattttgtgcttatagtggagaaaagattaaaattagtgatttgcaagatgaaaaaatgcttgaaattgatcacatttacccttattctagaagttttgatgattcttatatgaataaagttttagtttttaccaagcaaaatcaagaaaaacttaatcaaaccccctttgaagcctttggcaatgatagtgcaaaatggcagaaaattgaagttttagcaaaaaatttacctactaaaaagcaaaaaagaattttagataaaaattacaaagacaaagagcaaaaagactttaaagatagaaatctaaacgatactcgctacatcgcaaggcttgttttaaactacactaaagattatttagattttttacctttaagcgatgatgaaaatacaaagttaaacgacacacaaaaaggctcaaaagtgcatgtagaagcaaaaagcggtatgcttacatcggctttaagacacacttggggctttagcgctaaggatagaaataaccatcttcatcacgccatcgatgcagtaattattgcttatgcaaacaactctatcgtaaaggctttttcagattttaaaaaagagcaagaaagcaacagtgcagaactttatgcaaaaaaaattagtgaattagattataaaaacaaaaggaagttttttgagccttttagtggttttaggcaaaaggttttagataaaattgatgaaatttttgtctcaaaacctgagagaaaaaagccaagtggagctttacatgaagaaacatttagaaaagaagaagaattctatcaatcatacggcggaaaagaaggagttttaaaagccctagagcttggtaaaatccgcaaagtaaatggtaaaatagttaaaaatggcgatatgtttagagtggatatttttaaacacaaaaagacaaataaattttatgccgtgccaatttatactatggattttgctttaaaagtattaccaaataaagccgtggtgcaaggtaaagataaaaagtcaggtcttataaaagattggattttaatggatgaaaattatgagttttgcttttctttatacaaagatagtttgattttaattcaaactaaagatatgcaagagccagaacttgtttattttaatgcttttacaagctctactgttagtttgattgtttcaaaacacgataataaatttgaaacgctaagcaaaaatcaaaaaatattgtttaaaaatgcaaatgaaaaagaagtaatcgcaaaaagcataggaattcaaaatctaaaagtatttgaaaaatacatagtttcagcacttggagaagtgacaaaggctgagtttagacaaagagaagattttaaaaaatgagttacgatgaagcttttaaaacactgcttattagctctaatgccaagctaaatttagagttaaatcatcttgtgattaagcaagatgaaaatatagccaaattgtttttaaaagatataaatatcatcgttttagaaagcttacaagtaagcctgagttccgcactttttaacgcttttgcaaggcataaaatcatcttactaacctgcgatgaaactcatagtataaatggtgtttttactccttttttagggcattttcaaagtgcaaaaatcgcaaaagagcaaatgaatgtaagtgctcaaaaaaaggctattttatggcaaaaaatcattaaaaataaaatcctaaatcaagcctttgttttgaaaaaacacaataaaatagagcaaagcaatgagcttataaatttggctaaaaaagtaagcttaaatgatagtaaaaatatcgaagctgttgcggcggcgctttattttaaaactttgtttggcgtttctttttcaagagatgagctttgctttgaaaattctgctttaaattatggctatgcaatcattagagcttgtattattagagcagtttgtataagtgggcttttgccttggcttggcataaagcacgataatatttataattcttttgcgctttgcgatgatttgatagaagtgtttagggctagtgttgatgattgtgttttaaagcttaagggtgaaagtgagtttttaagcaaagatgataaaagagcgttgattggcaatttacaaagcaaaatcaattttgatgggcaaaattatcctttaaacagagcgataaatcattatgtggcaaattttaaaaatgctttattgtatgaagatgagctaaagatagtaaaatttgatgattgaagataaatttatgcgtgtgcttttgatgtttgatgtgccaactaaaagtaaaaaagaacaaaaactagcaagtaaatttagaaacaatcttataaaattgggttattttatgctacaatttagcgtttatatgcgtatttgcaagggtttaagttctgcaaaaagttctattgaaaatgtaaaaaagattttgccaccttatggaaatgtaagggctttaatcatcactgaaaagcagtttgataaaatggagcttttgcttggtggcatagtttttaacgaaaaagttaataacgaaaccaatgtaacgctttttgatatagatagtcatggagaatttaaatacaaaaattcaaataatgaagaaattcaaataaacaaaaaacaagaaaaatatcatcagcaaaatttatttgaattttaaaagcggttttaggggattgtaaccccgcagagtcccgcaaactctttattttagtccctttttaaatttcttatgagattatagcatgatttttgctattttttatcaaaaaatcccgaaattttcattatctggtaaatatctattttaccataaagaaatttaaaaagggactaaaacttcactccacccctgcttaagcattccaacattttaccataaagaaatttaaaaagggactaaaataaaccctagtggattgaaactccgctagggctaattactccactaaaaggaggttgcgaatttgaaacttattgaaatttagggttgattaaaatcgaaataaaattatttaaataattttaaggcataaagataatatctactaaactttcattttctaacatttcacattcttttggcaccaccataagggcagctttattgttaagattgtttataatcgcactagagccttcttttttgccttcaagattggctaaaatgcgtccatttttaaactctatattgcaagcgacaaattccaaataaggtgtttttttcttgtaacttccttgtaaaaaggctttgcaaatatagtctttaggttgaagtaaccaagagtttaaaatctctcttgtgtaaagattaaacattaccatagccgagtaaggaaaacctggtaaggcgatgatgaatttttcattagccttagctattttgatatgtctacctggttttatgtcggctttatcgatgatgatttcgtattctttgatggctttttttaaaaagtcaaaatctcccatagaaaccccgcccgttgtaaccaaaatatcacaactttgcaaagcactttcaagggtggaaaaagtggctttctcatcatcttttaaaagaggaaaaacccttgtatcgcaatttaaatttttagctaaattagctatggcgatatgatttgaagagcggatttgagcaggattttccaaggcttctcctagatctttgatctcacttccactacttaaaacccctacaataggctttataaacacactaatgtgaaaaaatccaagttcagctaaaagagctatctcgctataatttaaccttgtgccttttttgagtaaaatttcatcttttttatagttttctcctaccgcacgcacggcaaaagcttggggaacttttttttctataaaaagagtattattttctatgcgtatattttcaacagggactaaagtatcgcttccttcgctcatgagtgagcctgtaaaggtttttacacaagtgccattttgtacgctaaattgtggcatagtacccgcaggtgtgaggcctaaaatttttaaaggcttgtcttgatcttcaaatttgatcgcataaccatccatagccgaggttggaaattcaggctgatttttaggggcttttatatcttgagctaaaatgcgtcctaaacactctgtaagagctattttttcaatcttttcataagttttgatatgagaatgtaaaatttttaaactttcttcataagacattagcattttttatccttttaaaagtcctgcaccgcaaagcttggttgatctttctttggcataaattctttctttgtttatcacatcatacttccaaatgggcgcacttgctttaaaatcttcaacaaattcattaagaagtttaagtcctaattttctttgtttgcttaaaattcctgcaaaatacgagctttcatgtatcgctacatcgcctatagagtgagcaaaaagcaagctaataccatcaaaatctactcttttttgccactcatcaaaccatttttttaaaagcgattcataaatatcaaaactaagtgcctcaatacctccttcttcacgcacaataccacaaaaagtcagtaaagcaccgcagtttttatccttggaaaattcataccattggctataaattttaggaatatctaaagagccttgataaagtgtaaaatgtttcatttagcctccacaaactggcggtaaaagtgctattttatcaccatcttttaacttggtgttttcatcaaaaatgatttcatcatttaaagatacagcacaaagttctagccattcttttaaactctcatctttttgcaaaatttcttttaattcttttaaattttttacttcaagttctaaattttctttatttatagggcctaaaaattccacttttaccattttattcctttacttctaaatttcccatcattcctaaatcttcatgttctaaaatatggcaatgatacattctaagtcctttaaaatcttgtttcattctaagtcttaactcttcattaggacgcacatttatagtatctctgaaggctctaaattcggctttttgaactttgccattgagttttgatgagatgagttcaaattgcgtgccgtgtatgtggaaaggatgatccatgtgagatttgtttatcactatccagtcttcaactactccaagcttggagcttaaatcaatgcgttttaaatcatagcttttgccattgattaaaaacatagacgcaagagcgatttttaattcattttcactttttcccatcattccatgcatttgcatatgatcttcactcatgattatttctttaaattccttaggttcttctaaaggtttgaaaatttttaaattttttggaagttctaatttttctttttttaggctaatactagctaaaaatagggtattagattcttcttttaccatcattttgtccctatcataataagcactttctagcttaaaattcccatcttttggagcgtcgattaaaacttctacacgagaagcaggactcaagaaaagttcttctttataaatagctttttctataagtccaccatcagtaccaacaagtataaacttagctccttgtatgcgtaaatttaaatatcttgctgcagtagcattataaatgcgtatgcgttcgtttgtggcgagtttgattttaggtttaaattgtccattgatgagtacaaattctccttctctaccatttagccaatcatttaggttgttgtttggaatttgagcgttttcatcaagacgcaaatcgctaatcatcaaatctttttcttttaaatgacttaaagcatctttttttgctttgatcacaaaagcccctgctaaacccataaaaacttgtttagaagccgtataatgaggatgtggatgataccagtaagttcctgcgctatcttgaggaatttcaaaacgatatattctttcttctcctgctaagataggatcatgtgggcttccatcttgatcaggtggcacaggaacgccatgccaatgtatagttgtagcttctttgagtttgtttttgactaaaatttcaagtttatctccttcaaaaacttctatttttggagcaggcacgaggccattgtaagtataaaataaggtttttttacctttgataagctctatatgattttctttgatttctagggtagcacgaaaaatatttttttctttactttcatttttgagtaaaggcaaggcttttaaaatttctccttgggggaattgttttggatctaaaagctttaaattttttggagcaaagtttataaaagaagtatctaagtcatgatttatagaatgatttttatgcatggagtgcatatcatgcataggatttgcataggctacacccatacttgctagagtgagtgcattaaattttaaaaaatttcttctattcattagtttttccttttgcttgattttttgtattatagtcattatttttttaactttagtaaatatttattttgaaaatttggtttaattttgttatgattttagcaatttaatcaaggaaaaataatgttttatgaaaaaattcaaaccccagcttatattttagaagaagataaattaagaaaaaattgtgagcttttagcaagtgttggcgaaaaaagtggtgctaaagtgcttttagctttaaaaggttttgctttttcaggagcgatgaaaattgttggagaatacttaaaaggttgtacttgtagcggactttgggaagcaaaatttgctaaagaatacatggataaagaaattcatacttattcgcctgcttttaaagaagatgaaataggtgaaatagccagcttatctcatcatatagtgtttaactctttagctcaatttcataaatttcaagctaaaacacaaaaaaattccttaggtcttcgttgtaatgttgaattttctctagccccaaaagaactttacaatccttgtggaagatactcaagacttggaattcgtgctaaagattttgaaaatgtggatttaagtaccatagaaggacttcattttcacgcactttgcgaagaaagtgctggtgctttagaagctgttttaaaggtttttgaagagaaatttggcaaatggatagggcaaatgaaatgggtgaattttggaggaggacatcacatcactaaaaaaggctatgatgttgaaaagcttattgctttgtgtaaaaatttcagtgataaatacggtgtgcaagtttatcttgaaccaggcgaagcggtgggttggcaaacaggaaatttggtggctagtgtagtagatatcatagaaaatgaaaaacaaattgctattttagatacttcaagcgaagcgcatatgccagatactatcatcatgccttatacaagtgaagttttaaatgctagaattttagccacaagagaaaatgaaaaaatttcagacttaaaagaaagcgaattttcctatttgcttactggaaatacttgtttagcgggtgatgtaatgggagaatacgcctttgataaaaagcttaaaatcggcgataaaattgtttttttagatcaaattcattacaccattgtgaaaaacacaacttttaatggtataagacttccaaatctcatgcttttaaatgcaaaaaatgaacttcaaatgataagagaattttcttataaggattattctttaagaaattagtattatttataatttgcataaaatgttaattttactcggaagagaatcaaagatgtaaattttatgcaaagtattttattttttcaaatataaaatcaactcaaatatctaattttcaatactttggtatgattttttaatattttaaatccttgtggaattttattgaaattcagtgatttttaaatcaaatagtattaagataaatcgatttaaaaatcggctttaaaatgaatattaggtatattttgcataatattcattcaagcaaaatttaaagctatttttgaaaattttgaatgcatggaagctttaatggatttggaaaaattaagattagctagaagtctttattatcaatgtctaggagagctttttgttttttcattttctgaagaaagattgtcaaaattacaagagtatttaaagacaatgcaagaatgtttatttgatgaaaatttaaaatcaaattttgatatcttgcttaagcatttagatgatgaaaattctatacaagcattttttaaagaatatgatttgctttttttaagtcttaaaaatagcattccaacgactttttcttacatagaagaaggttttgaaaattcaaatcctttactttgcgtgcgtcaaattttagtcaaaagtaaaataagacgcaatgaaaaattttttaaagaaagtgaagatagtgttggattttgtttattgttgatgagtgaatttttaaggcaaaatgaagatgatttagccaaagagctttttgaaaaagtgatcaataaaagcattgatgagtttttaggcgatgttttcatgaataaaaatgcgaatttatataaggaaattgcaagtattgcatcggcttttatggaatttgaaagactttgctttgaagtggaaaaacctgcaaaaataaattctaaaaaagtgcaaaacgatctatcgcgttcagaatttttaagaagagaagcaaataaacaaaggaggactcgtgaaaaatcgcagggaatttcttaaaaaatccgcttttgccttaggggctgctggagtgcttggtagcacaactttagctctagctaaagatgaagaaagaaaagatttagttaaaggtaaaagtaagaaaaaagaagtgctttttcaaagaagtgctaattgggaaaattattatataaaggctgagtaatgtcaagtgtaggtgaaaatatcaagcttacgcgtcgttcttttcttaaaatggcagcactttcaagcctagcaacaccgttgcttgctagaagtgaaactttaagagaagcgagtgctgatgagcttaaagaagcttatgaaggtagtaaaaaagtaaaaacagtttgtacagcctgttctgtaggctgtgggattattgcagaagtgcaaaatggtgtttgggtgcgtcaagaaatcgctcaagatcatcctgtgagttcaggtggacattgctgcaagggatctgatatgatcgatatggtgcgttcacatgtgcgtttaaaatatcctatgaaaaaagaaaatggagaatggaaacgcataagttatgagcaagctttaagtgagatcggagaaaaactagctgcttatcgtaaagaaaatcctgaaagtgttatgtttttaggttctgcaaaacttaataatgaacaagcttattatataagaaaatttgcagcattttttggaacgaacaatgtagatcatcaagctagaatttgacacagcgcaacagtcgccggtgtggcgaatacatttggttatggcgctatgacaaaccatcttggagacatccaaagaagtaaatgtatcattatcattggagcaaatccagcggtaaatcaccctgtgggttttagacatttcttaaaagcaaaagaaaaaggtgcaaagcttatcgttgtagatcctagatttacaaaaagtgcagcaaaagcggatatttatgcaagaattcgtccaggaactgacattgctttcatgtatggaatgttaaaaatcatttttgatgaaggcttggaagatacaaaatatcttgatgaaagagtttttggaattgataaaattcgtgaagaagcagcaaaatggacagttgaagaagtggaaaatgttacagggatctctaaagaacttttggtgcaaatcactcacgaagtagctaaaaacaaaccaactacgcttatttgggctatgggtttaactcaacatactgtaggaacttcaaatacacgtttagcacctattgtgcaaatggtacttggaaatataggtaaatttggtggtggagttaatatcttacgcggacacgataatgttcaaggtgcttcagatatggcttgtttgagcgaaaatttaccaggttattatcctttaaatgaagcgacttggagatactatgccaaaatttggggtgtggattatgagtggcttttaggaaattttgtaagcaaagattggatgcataaaactgggctttcacttgctagatggtgggcagcggctttaaatggaaaagatggaaatgatgctatcgataatgcaggaacgcctttaaaagctttagtagttatgggaaatggtattacttcgactgcacaacaagtaaaagttaaagaaggtttggaagctttagagcttttagttttagccgatccttttgtaaatgaagcagggattattgcagaaagaaaagatggaatttatcttttacctgcagcaacacagtttgaaacaagcggaagtgtaacagcaacaaatcgtagcggacaatggagatttaaagttgtagatccactttatgaaagcatggaagatcaagaaattttatttgagcttgctaaaaaattaggtttttatgaagactttaccaagactttacgcgatgaaaaaggtgagattgtttggcctgaaaatgcaacaagagaaattgcaaaagcagttagaagtatagggcttaatggttggagtcctgaaaggcttaaaaagcatactttatactgggataaatttgatgaggtaactttagaaggaaaagacgaagttgctggcgagtattacgggcttccttggccttgttggagtgataagcacccaggttctcctgtgctttataataccgacattgaagtagcaaaaggtggtatgggctttagaaacaattttggacttgaatatgaaggagagagtttacttgctaagaatgcacctttaaattcacctattgatacaggttatccacaaattactaaagataatatagaaaaagttttaggtattactttaagtgctcaagaaaaagaaaaaatgggatcaacttggtcttatgatgatagcaatatcatagcaactaaatgtatagaaaaaggcatagttccttatggaaatgctaaagctagagctgtagtttggacttttaaagataaaattccactccaccgtgagcctttacattctccaagaaacgatttggtgcaaaaatatccaagttttgaagatcaaaaagcgctttaccgcgtggatactaaatttgtttctgtgcaacaagctaaggattattctaaagaattcccgcttaatcttgttactgcaagacttgtgaatttaaatggtgcaggtatggaaaatagagcatctatgtatctaa

SEQ ID NO: 3778 - DNA, 22964 bp, synthetic construct
  source 1..22964: mol_type = other DNA
  misc_feature 1..22964: note = Synthetic
gctgatggtgcttttcgtcgtggcaaaccttatatgttaaaacctgcagtagataaggctttaagtgaagggtgtgaaagtgtagaaaaagtacttatagttatacgcaataatgagcctatagaatatattaaaggaagggactatgtttataacgaacttgtgaaaaatgagtcttataagtgtgaacccgaaattatggatagtgaggatttgttgtttttgctttacacttcaggatcaacgggcaagccaaaaggagttatgcatgcaagtgcaggatatatactttgggcacaaatgactatggaatgggtttttgatattaaagattatgataattattggtgtagtgctgatgtgggttggattacaggacatacttatgtagtttatgggcctttagcatgtggagcaacgactataatgcatgaaggaactcctacttatccaaattctgggcgttggtggagaatgatagaagagtatcaaataagcaaattctacacttcgccaactgccataagaatgcttcatgctgatgcacctaatgagccaagaaaatatgatttaagtacgcttgaagtgcttggaacggttggagagcctatcaatcctagtgcttggaagtggttttatgatgaaatagggggaactaaaagtcctatagtcgatacttggtggcaaacagaaacaggtgggcatatgatcacgcctttaccaggtgccactcctttaaaaccaggttgtgccaccttgcctttgccagggatttttgcagaagttattgatgaagaaggcaataaaaaagatgaaggtgaagatgggttgctttgtataactaaaccttggccttcgatgattcgtggaatttggggcaatgatgaacgctatatagaaagttatttttctcaagctaaaaaagatggaaaagctgtatattttagtggcgatggtgctttttatgataaaaatggttatattaccatcacaggaagaacagatgatgtggttaatgttgcaggacatcgtataggaacggctgaaattgaaagcgctattgctaaacatccaagtgtagcagaatcagctgtagtgagtattttggatacgattaagggcgagtcattgtttgcttttgtggttttaagtcctgcatccagttgtgatcttggcggagctatagaaactttaaaagaacttaatgacattttaagagtagaaataggacctatagctaaaatagaaaaaattctttatactccaggtttgccaaaaactagaagtggtaaaataatgagaagaattttaagaactatagcaagaggcgaagaaatcaaacaggatatttcaacacttgaagattctaaagtagtagaaaccattgttaaattagctaaggcagagtttgaataacaaggtaaaaagaactttgcctagttgcatgaaaattcataaaaataagctataatgataaaaaaataaaaggaaatttttatgcttcaaacttgtattttccctgcggcaggttatgggacgagatttttacccgcaacaaaaactttacctaaagagatgttacctatcttaaccaagcctttgatccattatggagttgatgaagctttagaagcaggaatggaaaatatgggctttgtcacagggcgtggaaaaagagctttggaggattattttgatatttcttatgaacttgaacatcaaatttcaggtacaaaaaaagaatacttacttgatgaaattcgctctttgatcaatcgttgtacctttacttttacaagacaaaatcaaatgaaaggcttaggtgatgcggttttaaaaggtagacctttggttggcgatgaagcttttggcgtaattttggctgatgatttgtgtgttaatgaagaaggcttaaatgttatggctcaaatggtaaaaatttatgaaaaatatcgctgcaccatcatagctgtgatggaagtaccaaaagagcaagtttcaaactatggagtaatttctggaaattttgtagaagaaaatcttatcatggttaattctatgatagaaaaaccaagtcctgatgaagctccaagtaatcttgctatcataggaagatatattttaactcctgatatttttggaattttagaaaatactaaagcgggaaaaaatggtgaagtccaacttaccgacgcgcttttaactcaaacaaccaatggtatggttttagcttataaatttcaaggaaaacgctttgattgtggaagtgtagaaggctttgtagaagcgacaaattatttttacgagaaaagtaaatgttaaacaatacacttttttttaagcaaagtgaaattcacactataagttcttatgcaaatcgtattaatgatgaggtaaaaagtggagatatagggtattatcatcttattgatacaagtttgaatttaatcgataagagtttggcttttatcaaagacaaagaatacataaaaaatatcgttttagtgggaatgggtggttcaagttgtggtgtaaaagccttgcgtgatatgctttttaatgaaaaaagcaaccaaagagaactttttatactcgataacacaagttcacattcttttaataagactttagaaaaaatcaagcttgaggaaagtttgtttttaatcatcagcaaaacaggtagtactatagaagttgtatcgctttttaaacttcttattgaacattttaaacttgatatgcaagaattaaaaaaatactttgtttttattaccgataaggattcaaaacttcatcaagaaggtgaaaatttaggtattaaatgcttttttatccctgcaaatgtaggaggtcgttttagcatactttcagctgtaggtatagttccactttgtttttgtggctataatgccaaagctcttttagaaggagctaaagcttgttttgaagatttttttactcataaaaaagatgaaattttacaaaaagcctatcattattgcacacacaaaaatgccaatatcaatgtacttttttcatatagcgatgcttttaaaggctttaatgaatggtatatccagcttattgctgaaagtttaggtaaaaagcaaggctataaacgcataggtttaactcctattgcactcattggagcaagagatcagcatagttttttacaactcattatggatggacctaaaaataaaactgtaacttttttaaaaatcaaagacgctcaaaaagcacctattatccctgatattcattttaaatttttagattctttaagcaataaagtcaatcttcacgaacttttaaacgctcaatgtgatgcaactatgcacgctttaatcgctgaaaatttgagtgttgatgtgatagaacttgaaaaacttgacgcttggcatgcgggatatttgatgtattattatgaactttttacttcaacttgcggtgttatgttagggattaacacttatgatcaacctggtgtggaagttggaaagttgatcttaaaaaatatattaaattcttaatcaaaattcattaaaaaagagtataataattttaagttaaaattataataaaaatttttaattaataataattattatttaagaattttatgttataattttaaaaattaaaaaaaggagtcaatcatgtcagttacaaaacaattattacaaatgcaagcagatgctcatcatctatgggttaaatttcataattatcactggaatgtaaaaggtttgcaatttttttctatacacgagtacacagaaaaagcttatgaagaaatggcagaactttttgatagttgtgctgaaagagttttacaacttggcgaaaaagctatcacttgccaaaaagttttaatggaaaatgcaaaaagtccaaaagttgcaaaagattgctttactccgcttgaagtcatagaactgatcaaacaagattatgaatatcttttagcagaatttaaaaaactcaatgaagcagcagaaaaagaaagtgatactacaacagctgcttttgcacaagaaaatatcgcaaaatatgaaaaaagtctttggatgataggcgctactttacaaggtgcttgcaaaatgtaatttaaggggctttatgccccaattatacaaactaggttataatatccttttttaaaggataaaattgaaagtacttaattttttttatgaaaaccaccctaaatttgaagtaagttatgaaagaaaaaatcaaatttcaaaaccaaatattatcataaaaggcccacgattttgtggtaaaaaaacacttatttttaattttttatctcaatttaaagcaagtgaaattttgtttttagatttatatgatacacgctttgaaaaacaaagtttagaaagacttgctgattttctgaatgaaaatttacaaattaaaattctttgcctttataatttggattttatccctaatttagaaaaaattaacattcccatcatcttaagtacaaatataaaagatttaaatgtaaatgggtttgaagagcttgaacttgattattttgattttgaagaatttattagtgtaagtaagaaaaatttacctataaataatttagtaggtctttttttgcaaagtggacgcagtaaatttggagaaaaaaacatacttctaagacaaagcttcactcttttagaattagaaattttaaagtatttagctttaaatttgggtcagcaaatcagtatttctaagatatttatagaactcaaaaaaagattaaaaacttcaaaagatagtgtttatcaagctataaaaaaattagaaaatacttatgtgatttataccttaaaacatgatgaaaaaaaacttcaaaagatttattttaaagattttggcctaagaaataatctttgtatttcaaaggatttttcacatttatttgaaaatttagttttaagcgagttgtttaaatttaaagaagaatttttttataacaaatactttaacttttatagccaaatatctaaaattgcttatatttcaagtccaactttagatattgatttgatcaagctacgtgctaagaaaattttaccaaaggctttagaacttggaatttttcatgtgatttttatcactctttcaagcgaggataatttttttgaacaaggggttaaatttgaagtcatatcttttgataaattttcacttggattttaggtgttgtttgagtttgtatcgtatttttcaaggttgtatcgtttgatgatttttgtaataagattgatataatatcccttgcgttcagaataagaatctaaagttttaatagcctctagccctgttatctctttgccttcgctttcaaatttagctcttgcatcgcgaaacttttcataagcaaaatgacgatttaaatttaaaacataagagtcaacactatcttgcagactatcaaaaattttaattttgtgttttttatctggatgtcttaaatcaggaattaaacctttctcaccccaagtccattctccaaaaagattgtttgcttctcttgcgaagcgactggtacctgtagcactttcaactaaagcttgggctatacccatggattttggaattttttgaatacgttttttatattctgcaaaatcataaagattttcaatgcgatatttgttttttatcgtgataagtttttcaagatttatttggtttgaagtcctaaagcctgttttgtaagcatctttaaaaaaggcttcgataaaagctctttcttgttcaatttttttaaagctttgatcaaacatttcattcatttttataaaaaaaatttgtcttttttgatctatatcaagtttgtaatattcttctccaaatccactctttagatcatcagcaaaaagtgggattagaaaaagactaaaaaaaattataattggcttcaaaacaatactttacctttccttcaaaaaacaattcttcatttttatatgcaaaccctacctcttcaccacttttaggagttattttaactttattttgtacttttttatttaaaaatgccagataaaaacaagcccccattcctgtgccacaagctaaggtttcatcttcaactccgcgttcataggtgcgaacttttaaatgattttcatctaaaatttttacaaaattaacattggcattatatttttgtctcattttttgacaaagcattgtatcaaattcatctaaattttgacaaaaatgtactagatgtggaactccagtgttgcaaagttgccaagtttttcctaattcttcaaaagtattttgcacgctttttattttgcctaaagatacttcaactttatcttgatttacctttgcttttattactcctgcaccggttaaaaaactcatgttaggatttattttgttaatatgatgtgcaaaatgtgccgcagcccttgagccattgccacacatagcagcccttgagccatcgttattataaaattcccattcaaagtcgtatttttcatgaggcaatatcacgataaagccatccgcacctataccctcataacgattacaaagttctttagctaaagcacttctatcttcttttctatcagcatttgttatgacaaaatcattcccacttgcacaatatttataaaatttcacatttttcctttagaaatttcttgtattactttaacacattcttgcctaaaatcggcataagaattagtatttttaatgataaaatctgcttttttaagtttttcttcaatatctatttgagaatcaagtcttgcttttgcagcttctaagctgagcttatctctttgcatgattcttttaaggcttaattctttaggtgtgtaaattacaatgactttgcctaaattttcataagcaccgctttcaaaaaaaagaggaatttctacaaaaaaagctttattttctttatctagaatttgtatttgttctaaaattttagctcgaattttaggatgagtgaaattttctaagatttttttagcttctttattgttaaaaacaatttttccaaggatttttctatcgattttcttttcttttgtgagtaaattttttaaactaaagggagaaaaaatcttttcaagttctaaagcattttcatctaaaattttatgagcgattttgtctgcgctaatgcttttaaagtctaaagaattcgctatttctataaaagtgcttttaccacaagcaattgaagcggttacaaaaaaagcatttttcatcttatgccttattaaaacttttttcgttaaaatacctttttagttcttaaaggaaaataaatgaaaatttcatatgaagatgcaggcgtaagtatagataatggaaatacctttgtagaggctataaaacctttggttaaagaaacttttaatgataatgttgtaggtggaattggttcttttgctggtgcttttagaatgccaagtggttttaaaaagcctgtgattttaggtgcaacagatggggttggtaccaagcttcgcttggcaattgatgctaaaaaatatgatactatagggcaagatttagtagcaatgtgcgtgaatgatttgatttgtaattttgctacgcctttgtttttcctagattattatgctacagccaagctcgaagtagaagtagcaaaggctgttgtatcaggcattgccaagggatgtaagatggcaaattgtgcattaattggcggagaaactgctgaaatgcctggaatgtatgcaaaagatgattttgatcttgcgggttttgcagtgggtatggctgaagaagatgagattgatagaagtaaatttgttaaaaatggtgatattttattggcactttctagttcaggacttcattcaaatggttattctttagctagaaaagtactttttgaaagtttaaaattaaaatttgatgacaagatagagggtaaaaatttaattgatattttgttagaacctacaaggatttatgtgcgtgattttcttacactaaagccttatatcagtgctctagctcatattacagggggtggtttagtagaaaatttaccacgcgttttacctcgtggtatgggtgcaactatacgcaaacatcatcttaaaactcctgaaattttttatactataggacaggctgtagaagaaagcgaaatgtatagaagctttaacatgggagtgggtttagtaatggttgtagatccttctaatgtaagtaaggttttagaaaattcagatgcctttattatcggcgaaatttgcattaatgaaggtattgttttagaatgaaaataaagcgttaatacgctttatttttgtattttaagttctatttttgtagtgttttgttcttttggcaaaggattggtttgtgctagataaaaggctacaagcacatttacaagcatagcgataagtaaaagaggagtggttcgttttataatatccattggagctacttttgcaaatccagctaaagctatgatttcgcctgctattggtgaagctgcacgacctaaacaagatgcaatttctataggtaaaactagagtaataggtgcaacgcctaattttgtagctatatcaggagctagttttccaaaagtattaaaagcggcaattccacttcccataatcactgtggcaaaataaactaaaaagcttaaaatagctatactcaaaagaattccaaaccatgcaaaatttcctgttccaagatttgaaaccgcgttagcaaggatattaactccaccaagtgctttaatgccttcagcaaatactccagcggcgatgattatgcttacgactgagataaaaatttcagccatagccttttaaaatcaccatcatatcttcgcctaattttctagcatttctgtgtcttgcaaattcaacaagaaaaactaaagaaattcttacaaaatttgctatcacaacatcgagcttgatagtaaaaaaatacgctataaataaaaatacaacaggtaaccaaggaaagagtatgtaaaaagtagggcatttaggatcaatgatttgcggaatttcaacttcatcatttaaaacacctttttctttatctcttttatcaatccaagcaaaataaaaaggaatcaagatggcaataattacaacataggtaatcacactataaatttggtaatttaaaaaaagccttacgacattatcactttgtcctaccatatctgccatattgattgaatttccatcttttggatcataatcaagtgcaattaaagaaagcgcacatacagttgtaataggacggattttaagtgagattaaaacaggataaatatatgctaacaaaagcaaaagcaattcagcatagctagaaatgacgatttttaaagccattccaacaacaaaagttccacttaaaattaagtatttattttttgatttttcctgagggtttatttgctaaaaaagcaagttttgccgaagcattgatatgtttcatgtaagcagtaaagcctgccacactcatgataataagccctgctccagaaagctgacttttaaaagtcgctgtgataaaagataactatcaggtaaaacatttaaaagcttgtatactctctgcttggagtttttggtataggtgttcctgtgatataaaaagcaaaaataagcaagataatacctgaaagaaaaaatacaaaaataggattgtattttttaagtatataataagcaacaacaattaccgctaaaagtgtagaacatatcataaaaattggcatgatttctcctaaagttattattagcttttattttattttagctaaaatttaactaataaatatttttcatttaaaattttacttattttttgcattataaaattaataatatgtatagtttggttactgaaaagtttatgtttgtttaaaaaaatgatttttgtattataattatacacaaatcataaatattaaaaaggatctagtgtggcaagaattttggcatttgatataggaataagctctattggctgggcatttagtgaaaatgatgagttaaaagattgtggagttaggatttttacaaaggctgaaaatcccaaaacaggagaatccttagccttgccaagacgccttgcaagaagtgccagaaaacgccttgctagacgcaaagcaaggctaaatcacttaaaacatttaatcgcaaatgaatttaagttaaattatgaagattatcaaagctttgatgaaagtttagctaaggcttataaaggctctttaattagcccttatgagttaagatttagagctttaaacgagcttttaagtaagcaagattttgcaagagtgattttacatattgcaaaaaggcgtggctatgatgatattaaaaatagtgatgataaagaaaaaggtgcgattttaaaagctatcaagcaaaatgaagaaaaactagcaaattatcaaagtgtgggcgagtatctttataaagagtattttcaaaaattcaaagaaaattccaaagaatttacaaatgttagaaataaaaaagaaagttatgaacgctgcatagcgcaaagttttttaaaagatgaattaaagcttatttttaaaaaacaaagagaatttggcttttctttttcaaaaaaatttgaagaagaggtgcttagtgtagcattttataaaagggctttaaaagatttttctcatttggtgggaaattgtagtttttttaccgatgaaaaaagagcgccaaaaaattcgcccttagcttttatgtttgtagcacttacaagaattatcaatcttttaaacaatcttaaaaatactgaaggaattttatatacaaaagatgatttaaacgcccttttaaatgaagttttaaaaaacggcactctaacttataaacaaacaaaaaagcttttgggcttaagcgatgattatgaatttaaaggagaaaaaggaacttattttattgagtttaaaaaatacaaagaatttataaaagccctaggtgagcataatttaagccaagatgatttaaatgaaatagcaaaagatattacccttataaaagatgagattaaacttaaaaaggctttagcaaaatatgatttaaatcaaaatcaaattgatagtttaagcaaattggaatttaaagaccatttaaatataagttttaaagccttaaaacttatcactcctttaatgcttgaaggtaaaaaatacgatgaagcttgcaatgagcttaatttaaaagtagcaatcaatgaagataaaaaagactttttacccgcatttaatgaaacttattacaaagatgaagtaactaatcctgtggttttaagggcgattaaagaatacagaaaggtcttaaatgctttacttaaaaaatacggcaaagtgcataaaataaacattgaattagcaagagaagtaggtaaaaattatagccaaagagctaaaatagaaaaagagcaaaatgaaaactacaaggccaaaaaagacgccgaacttgaatgtgaaaaactaggcttaaaaataaatagtaaaaatattttaaaattaagattatttaaagaacaaaaagaattttgtgtttatagtggggaaaagattaaaattagtgatttgcaagatgaaaaaatgcttgaaattgaccatatttacccttattctagaagttttgatgattcttatatgaataaggttttagtttttaccaagcaaaatcaagaaaagcttaataaaaccccatttgaagcctttggcaatgatagtacaaaatggcagaaaattgaagttttagcaaaaaatttacctgaaaaaaagcaaaaaagaattttagataaaaactataaagacaaagagcaaaaagactttaaagatagaaatctaaacgatactcgctacatcgcaaggcttgttttaaactatactaaagattatttagattttttacctttaagcgatgatgaaaatacaaagttaaacgacacacaaaaaggctcaaaagtgcatgtagaagcaaaaagcggtatgctaacatcggctttaagacacacttggggctttagcactaaggatagaaataatcatcttcatcacgccatcgatgcagtaattattgcttatgcaaacaactctatcgtaaaggctttttctgattttaaaaaagagcaagaaagcaacagtgcagaactttatgcaaaaaaaattagtgaattagattataaaaacaaaaggaagttttttgagccttttagtggttttaggcaaaaggttttagataaaattgatgaaatttttgtctcaaaacctgagagaaaaaagccaagcggagccttacatgaagaaacatttagaaaagaagaagaattctatcaatcatacggcggaaaagaaggagttttaaaagccctagagcttggtaaaattcgcaaagtaaatggtaaaatagttaaaaatggcgatatgtttagagtggatatttttaaacacaaaaagacaaataaattttatgctgtgccaatttatactatggattttgctttaaaagtattaccaaataaagctgtagcacgaagtaaaaaaggtgagataaaagactggattttaatggatgaaaattatgagttttgcttttctttatacaaagatagtttgattttaattcaaactaaagatatgcaagagccagaacttgtttattttaatgcttttacaagctctactgttagtttgattgtttcaaaacacgataataaatttgaaacgctaagcaaaaatcaaaaaatattgtttaaaaatgcaaatgaaaaagaagtaatcgcaaaaagcataggaattcaaaatctaaaagtatttgaaaaatacatagtttcagcacttggagaagtgacaaaggctgagtttagacaaagagaagattttaaaaatgagttacgatgaagcttttaaaacactgcttattagctctaatgccaagctaaatttagagttaaatcatcttgtgattaagcaagatgaaaatatagccaaattgtttttaaaagatataaatatcatcattttagaaagcttacaagcaagccttagttccgcactttttaacgcttttgcaaagcataaaatcatcttgctaacctgcgatgaaactcatagtataaatggtgtttttactccttttttagggcattttcaaagtgcaaaaatcgcaaaagaacaaataaatgtaagtgctcaaaaaaggctattttatggcaaaaaatcattaaaaataaaatcctaaatcaagcctttgttttgaaaaaacacaataaaatagagcaaagcaatgagcttataaatttggctaaaaaagtaagtctaaatgatagtaaaaatatcgaagctgttgcagcggcgctttattttaaaactttgtttgggacttctttttcaagagatgagctttgctttgaaaattctgctttaaattatggctatgcaatcattagggcttgtattattagagcagtttgtataagtgggcttttgccttggcttggcataaagcacgataatatttataattcttttgcgctttgtgatgatttgatagaagtgtttagggctagtgttgatgattgtgttttaaagcttaagggtgaaagtgagtttttaagcaaagatgacaaaagagcgttgattggcaatttacaaagcaaaatcaattttgatgggcaaaattatcctttaaacagagcgataaatcattatgtggcaaattttaaaaatgctttattgtatgaagatgaactaaagatagtgaaatttgatgattgaagataaatttatgcgcgtgtttttgatgtttgatgtacctactaaaagtaaaaaagagcaaaaactagcaagtaaatttagaaacaatcttataaaattaggttattttatgctgcaatttagcgtttatatgcgtatttgcaagggtttaagttctgcaaaaagttctattgaaaatgtaaaaaagattttgccaccttatggaaatgtaagggctttaatcatcactgaaaagcaatttgataaaatggagcttttgcttggtggcatagtttttaatgaaaaagttaataacgaaaccaatttaacgctttttgatatagatagtcatggagaatttaaatacaaaaattcaaataatgaagaaatacaactaaacaaaaaacaagaaaaataccatcagcaaaatttatttgaattttaagcggttttaggggattgtaaccccgcagagtcccgcaaactctttattttagtccctttttaaatttcttatgagattatagcataatttttgctatttttcatcaaaaaaccccgaaattttcattatctggtaaatatctattttaccataaagaaatttaaaaagggactaaaacgcattaagaattcaatactatctgctaaatattttaccataaagaaatttaaaaagggactaaaactccaacagaggtataattaatattgtaagtattttaccataaagaaatttaaaaagggactaaaaccagtgtttcttattttattcttagctactaattttaccataaagaaatttaaaaagggactaaaataaaccctagtggattgaaactccgctagggctaattactccactaaaaggaggttgcgaatttgaaacttattgaaatttagggttgattaaaatcgaaataaaattatttaaataattttaaggcataaagataatatctactaaactttcattttctaacatttcacattcttttggcaccaccataagggcagctttattgttaagattgtttataatcgcactagagccttcttttttgccttcaagattggctaaaatgcgtccatttttaaactctatattgcaagcgacaaattccaaataaggtgtttttttcttgtaacttccttgtaaaaaggctttgcaaatatagtctttaggttgaagtaaccaagagtttaaaatctctcttgcgtaaagattaaacattaccatagccgagtaaggaaaacctggtaaggcgatgatgaatttttcattagccttagctattttgatatgtctgcctggttttatgtcggctttatcgatgatgatttcgtattctttgacggctttttttaaaaagtcaaaatctcccatagaaaccccgcccgttgtaaccaaaatatcacaactttgcaaagcactttcaagggtggaaaaagtggctttctcatcatcttttaaaagaggaaaaacccttgtatcgcaatttaaatttttagctaaattagctatggcgatatgatttgaagagcggatttgagcaggattttccaaggcttctcctagatctttgatctcacttccactacttaaaacccctacaataggctttataaacacactaatgtgaaaaaatccaagttcagctaaaagagctatctcgctataatttaaccttgtgccttttttgagtaaaatttcatcttttttatagttttctcctaccgcacgcacggcaaaagcttggggaacttttttttctataaaaagagtattattttctatgcgtatattttcaacagggactaaagtatcgcttccttcgctcatgagtgagcctgtaaaggtttttacacaagtgccattttgtacgctaaattgtggcatagtacccgcaggtgtgaggcctaaaatttttaaaggcttgtcttgatcttcaaatttgatcgcataaccatccatagccgaggttggaaattcaggctgatttttaggggcttttatatcttgagctaaaatgcgtcctaaacactctgtaagagctattttttcaatcttttcataagttttgatatgagaatgtaaaatttttaaactttcttcataagacattagcattttttatccttttaaaagtcctgcaccgcaaagcttggttgatctttctttggcataaattctttctttgtttatcacatcatacttccaaatgggcgcacttgctttaaaatcttcaacaaattcattaagaagtttaagtcctaattttctttgtttgcttaaaattcctgcaaaatacgagctttcatgtatcgctacatcgcctatagagtgagcaaaaagcaagctaataccatcaaaatctactcttttttgccactcatcaaaccatttttttaaaagcgattcataaatatcaaaactaagtgcctcaatacctccttcttcacgcacaataccacaaaaagtcagtaaagcaccgcagtttttatccttggaaaattcataccattggctataaattttaggaatatctaaagagccttgataaagtgtaaaatgtttcatttagcctccacaaactggcggtaaaagtgctattttatcaccatcttttaacttggtgttttcatcaaaaatgatttcatcatttaaagatacagcacaaagttctagccattcttttaaactctcatctttttgcaaaatttcttttaattcttttaaattttttacttcaagttctaaattttctttatttatagggcctaaaaattccacttttaccattttattcctttacttctaaatttcccatcattcctaaatcttcatgttctaaaatatggcaatgatacattctaagtcctttaaaatcttgtttcattctaagtcttaactcttcattaggacgcacatttatagtatctctgaaggctctaaattcggctttttgaactttgccattgagttttgatgagatgagttcaaattgcgtgccgtgtatgtggaaaggatgatccatgtgagatttgtttatcactatccagtcttcaactactccaagcttggagcttaaatcaatgcgttttaaatcatagcttttgccattgattaaaaacatagacgcaagagcgatttttaattcattttcactttttcccatcattccatgcatttgcatatgatcttcactcatgattatttctttaaattccttaggttcttctaaaggtttgaaaatttttaaattttttggaagttctaatttttctttttttaggttaatattggctagaaatagggtattagattcttcttttaccatcattttatccctatcataataagcactttctagcttaaaattcccatcttttggagcgtcgattaaaacttctacacgagaagcaggacttaagaaaagttcttctttataaatagctttttctataagtccaccatcagtaccaacaagtataaacttagctccttgtatgcgtaaatttaaatatcttgctgcagtagcattataaatgcgtatgcgttcgtttgtggcgagtttgattttaggtttaaattgtccattgatgagtacaaattctccttctctaccatttagccaatcatttaggttgttgtttggaatttgagcgttttcatcaagacgcaaatcgctaatcatcaaatctttttcttttaaatgacttaaagcatctttttttgctttgatcacaaaagcccctgctaaacccataaaaacttgtttagaagccgtataatgaggatgtggatgataccagtaagttcctgcgctatcttgaggaatttcaaaacgatatattctttcttctcctgctaagataggatcatgtgggcttccatcttgatcaggtggcacaggaacgccatgccaatgtatagttgtagcttctttgagtttgtttttgactaaaatttcaagtttatctccttcaaaaacttctatttttggagcaggcacgaggccattgtaagtataaaataaggtttttttacctttgataagctctatatgattttctttgatttctagggtagcacgaaaaatatttttttctttactttcatttttgagtaaaggcaaggcttttaaaatttctccttgggggaattgttttggatctaaaagctttaaattttttggagcaaagtttataaaagaagtatctaagtcatgatttatagaatgatttttatgcatggagtgcatatcatgcataggatttgcataggctacacccatacttgctagagtgagtgcattaaattttaaaaaatttcttctattcattagtttttccttttgcttgattttttgtattatagtcattatttttttaactttagtaaatatttattttgaaaatttggtttaattttgttatgattttagcaatttaatcaaggaaaaataatgttttatgaaaaaattcaaaccccagcttatattttagaagaagataaattaagaaaaaattgtgagcttttagcaagtgttggcgaaaaaagtggtgctaaagtgcttttagctttaaaaggttttgctttttcaggagcgatgaaaattgttggagaatacttaaaaggttgtacttgtagcggactttgggaagcaaaatttgctaaagaatacatggataaagaaattcatacttattcgcctgcttttaaagaagatgaaataggtgaaatagccagcttatctcatcatatagtgtttaactctttagctcaatttcataaatttcaagctaaaacacaaaaaaattccttaggtcttcgttgtaatgttgaattttctctagccccaaaagaactttacaatccttgtggaagatactcaagacttggaattcgtgctaaagattttgaaaatgtggatttaagtaccatagaaggacttcattttcacgcactttgcgaagaaagtgctggtgctttagaagctgttttaaaggtttttgaagagaaatttggcaaatggatagggcaaatgaaatgggtgaattttggaggaggacatcacatcactaaaaaaggctatgatgttgaaaagcttattgctttgtgtaaaaatttcagtgataaatacggtgtgcaagtttatcttgaaccaggcgaagcggtgggttggcaaacaggaaatttggtggctagtgtagtagatatcatagaaaatgaaaaacaaattgctattttagatacttcaagcgaagcgcatatgccagatactatcatcatgccttatacaagtgaagttttaaatgctagaattttagccacaagagaaaatgaaaaaatttcagacttaaaagaaagcgaattttcctatttgcttactggaaatacttgtttagcgggtgatgtaatgggagaatacgcctttgataaaaagcttaaaatcggcgataaaattgtttttttagatcaaattcattacaccattgtgaaaaacacaacttttaatggtataagacttccaaatctcatgcttttaaatgcaaaaaatgaacttcaaatgataagagaattttcttataaggattattctttaagaaattagtattatttataatttgcataaaatgttaattttactcggaagagaatcaaagatgtaaattttatgcaaagtattttattttttcaaatataaaatcaactcaaatatctaattttcaatactttggtatgattttttaatattttaaatccttgtggaattttattgaaattcagtgatttttaaatcaaatagtattaagataaatcgatttaaaaatcggctttaaaatgaatattaggtatattttgcataatattcattcaagcaaaatttaaagctatttttgaaaattttgaatgcatgggagctttaatggatttggaaaaattaagattagctagaagtctttattatcaatgtctaggagagctttttgttttttcattttctgaagaaagattgtcaaaattacaagagtatttaaagacaatgcaagaatgtttatttgatgaaaatttaaaatcaaattttgatatcttgcttaagcatttagatgatgaaaattctatacaagcattttttaaagaatatgatttgctttttttaagtcttaaaaatagcattccaacgactttttcttacatagaagaaggttttgaaaattcaaatcctttactttgcgtgcgtcaaattttagtcaaaagtaaaataagacgcaatgaaaaattttttaaagaaagtgaagatagtgttggattttgtttattgttgatgagtgaatttttaaggcaaaatgaagatgatttagccaaagagctttttgaaaaagtgatcaataaaagcattgatgagtttttaggcgatgttttcatgaataaaaatgcgaatttatataaggaaattgcaagtattgcatcggcttttatggaatttgaaagactttgctttgaagtggaaaaacctgcaaaaataaattctaaaaaagtgcaaaacgatctatcgcgttcagaatttttaagaagagaagcaaataaacaaaggaggactcgtgaaaaatcgcagggaatttcttaaaaaatccgcttttgccttaggggctgctggagtgcttggtagcacaactttagctctagctaaagatgaagaaagaaaagatttagttaaaggtaaaagtaagaaaaaagaagtgctttttcaaagaagtgctaattgggaaaattattatataaaggctgagtaatgtcaagtgtaggtgaaaatatcaagcttacgcgtcgttcttttcttaaaatggcagcactttcaagcctagcaacaccgttgcttgctagaagtgaaactttaagagaagcgagtgctgatgagcttaaagaagcttatgaaggtagtaaaaaagtaaaaacagtttgtacagcctgttctgtaggctgtgggattattgcagaagtgcaaaatggtgtttgggtgcgtcaagaaatcgctcaagatcatcctgtgagttcaggtggacattgctgcaagggatctgatatgatcgatatggtgcgttcacatgtgcgtttaaaatatcctatgaaaaaagaaaatggagaatggaaacgcataagttatgagcaagctttaagtgagatcggagaaaaactagctgcttatcgtaaagaaaatcctgaaagtgttatgtttttaggttctgcaaaacttaataatgaacaagcttattatataagaaaatttgcagcattttttggaacgaacaatgtagatcatcaagctagaatttgacacagcgcaacagtcgccggtgtggcgaatacatttggttatggcgctatgacaaaccatcttggagacatccaaagaagtaaatgtatcattatcattggagcaaatccagcggtaaatcaccctgtgggttttagacatttcttaaaagcaaaagaaaaaggtgcaaagcttatcgttgtagatcctagatttacaaaaagtgcagcaaaagcggatatttatgcaagaattcgtccaggaactgacattgctttcatgtatggaatgttaaaaatcatttttgatgaaggcttggaagatacaaaatatcttgatgaaagagtttttggaattgataaaattcgtgaagaagcagcaaaatggacagttgaagaagtggaaaatgttacagggatctctaaagaacttttggtgcaaatcactcacgaagtagctaaaaacaaaccaactacgcttatttgggctatgggtttaactcaacatactgtaggaacttcaaatacacgtttagcacctattgtgcaaatggtacttggaaatataggtaaatttggtggtggagttaatatcttacgcggacacgataatgttcaaggtgcttcagatatggcttgtttgagtgaaaatttacctggttattatcctttaaatgaagcgacttggagatactatgccaaaatttggggtgtggattatgagtggcttttaggaaattttgtaagtaaagattggatgcataaaactggactttcacttgctagatggtgggcagcggctttaaatggaaaagatggaaatgatgctatcgataatgcaggaacgcctttaaaagctttagtagttatgggaaatggtattacttcgactgcacaacaagtaaaagttaaagaaggtttggaagctttagagcttttagttttagccgatccttttgtaaatgaagcagggattatcgcagaaagaaaagatggaatttatcttttacctgcagcaacacagtttgaaacaagtggaagtgtaacagctacaaatcgtagtgggcaatggagatttaaagttgtagatccactttatgaaagtatggaagatcaagaaattttatttgagcttgctaaaaaattaggcttttatgaagactttaccaagactttacgcgatgaaaaaggtgagatcgtttggcctgaaaatgcaacaagagaaattgcaaaagcagttagaagtatagggcttaatggttggagtcctgaaaggcttaaaaaacatactttatactgggataaatttgatgaggtaactttagaaggaaaagacgaagttgcgggcgagtattatgggcttccttggccttgctggagtgataagcacccaggttctcctgtactttataataccgacattgaagtagcaaaaggtggtatgggctttagaaataattttggacttgagtatgaaggagagagtttgcttgctaaaaatgcacctttaaattcgcctattaatacaggttatccacaaattactaaagataatatagaaaaagttttaggtattactttaagtgctcaagaaaaagaaaaaatgggatcaacttggtcttatgatgatagcaatatcatagcaactaaatgtatagaaaaaggcatagttccttatggaaatgctaaagctagagctgtagtttggacttttaaagataaaattccactccaccgtgagcctttacattctccaagaaacgatttggtacaaaaatatccaagttttgaagatcaaaaagcactttatcgcgtggatactaa
